United States Patent Application Publication US 2009/0018031 A1 - sequence listing, part 2

SEQ ID NO: 839 - DNA, 6000 bp, Homo sapiens
caaaagagatttgaaggatgtggctctcaggctaagtctccctggagtccattagtaagttcaattttgtctgttctacagtcttttgctatccctttaaagtgctgattcagtattattttgttaggagctgcacctctgaaaaaatttaacaagtaacacatacaaagtttaaaaaggagaaatacaaagtaaggggaaatacaaattaagagcaatatgagattttcagtttgcatatggttttgagccataaacctaggtttaaagacaactaattgaagaactcaaacagttattcgagacagcagggagttaggtgagacctggggtaaccacatggcctgctttcttattttgtgtataggagcctcaacttttctcagaggaatttattcaggtatagcatgtcgtattagcaacatcacagacaatttcttgcttaaccaatggatactaaagaattttgtaggttgggttctgttaagttataagcagaaggaattgatcataaaatttaagttacaccattattctgctaagtagaaaaggtcgaattaagtgagatgaaagtctcattatgatatagagtcttgtttcagcatcttgcagaaagttatacagtgtgaaaacaccaactttttctcctggtttgtagtgtgaacgtctctggttatgatattgggcagtttggtaaactattgtgtgatccgcatatcagccttgaggtttgttccctctttcattttcctctggatcaccaacatgctaatctacgttcacatcactgaaaccgtagaggccaataccaatttcaccatttctggtcctggatatttgcaagactgttgtcaaactaggccatacatacaataatttaatatacatttggggcttggattatatttctgttaaattgcactgctctatgggacttattttattcattccacaaatatattttgcacatgttccttattcttggtactatttaatggatttggcatacatccgtgatctaaacagataaaactcccccaaggatcatttataaatgtcatggtgattcgccatgtcctgtttgtgttcctcatggtctggaccagcatcaacatggccagtctcctctgcagacaccggcggagagcccagcgtctgcacagccctagcctctcttcccagccatctcctgaacacagagccacccataccatcctcctgctgcttggttgctttgtgtgcttttattgctcaaacaacttcatcactctttatttcttttataaatctgagaaaaaatcaagactagagatgatcactggaattatttcatcatgctacccaaccatctgcccttttgtgctaataaaaaataataaaattatttcctaatttacctcttcctctctaagacaagaatgatcagctctcagggagcattcaatggctgatctcaaaccccatactttcttctgcagctgggaagtctccatgatgacttttgtggagaaaaagtcatgcagttattgagcaattgaattagggctagtttgaattgaggtgtatcataaatttaaaaagcattcaggttttgaagtcaatataaataacagtatataaatattatcttaataactttcacattgctgacaagtttaaattatgacattttgggtaaaacgtatgtatatgttttgttatgtttacatatatatgcatatttaaataaaatacatatacacaaatatgtaagtaaaacatatgtaagaatatatataatatatataattttttttttttgagacagagtcttgctctgtcacccaggctggagtatgcagtggtgtgatctcagctcactgcggcccccacctcctggattcaagcaatcctcccacttcagccttccgagtagctaggattataggtgtgcaccaccatgcctggctaatttttttgtattttttagtagagacagagtttccccacgttggccaggctggtctagaactcctgacctcaagtgaaccgcctgtgtcagcctccaaaagtgctaggattgtaggtgtgagccaccgcactggccttatcagtatatacacacacacacacacacacacacacacatatgtgtatacatatacaactacataggtatttttaaactaactgtatctgcttgtttttgcttttttaaatgcagttgctagaaaatttaatatacatttggggcttggattatatttctgttaaactgcactgctctatggcacttcttgtattcattccacaaatacattttgcacatgttccttattcttggtactatttaatgggttggacatacatccatgatctaaacagataaaacataatagcacaagagattatacagaatgtttgtggtacaggaaaacgtatatgtacacatgataggagctaaaaagaataggactggttaagagaatgtggtgtgtgagagtacaggtgcagggagctgcagtgactgggattacaggtatgcatcaccatgcctggctaatttttgtatttttgtagagacggggtttcaccaatttggccaggctggtctcgaactcctggcctcacgtgatccacctgcctcagcctcccaaagtgctgtaattacaggtgtgagccaccgtgcctggccaacatttatcattttaaatactcatctgcaaaaatgtttccaagtggggccacttccccacccctcatatgacagtggcagtgatataccatatacatggttattaaaaagaatctggagcaacaatatgaatgtcagacaaattaggcttcaagagcatttccctccatcttacaggggataaacccaaagaagttatattaagattccaataaaagaatgcaagatgactatctgtgtaaaaatgtaatcaatggggagcaggtgcacctccaataatattagacaaaatatattttacctaaacagcattactaagtataaagtagatcacttcaataagaataacaattttaattttgtgtatacatattcacactttcaatatgtatatagtatacacgggtagaatgataaacagatatagaataatcctccactcttgtgggaaatctgttcaatagtctttcagcaattaacagaataacagagtatcagtaaagatataaaaaattgaccaaagcaattcatattcttgacttaagtgccctagaataacaactcacacagccattgaagaatccccatcatcctatctcaagcatagaggaaacacatagcatacatatgtagccacatagcaaacacagaaatgactatcaacaaagtggaagagtttaatgcacagattaagttatctgaatatatgtacaatgagttataaataataaataattgagccaggtgaagtagtacatgcctgtaatcccacctacttgggaggctgaggtaggagtttgagcccaggagtttgagtctggtctgggcagcattgcaagatcccatcccccaaataataaataaactaactaagtaatcaataattgaatgagaaaagttagctcatatttcaatatgttcaatcttaggatatatacttctaggcaaccacttagtgacaaaaattctgtagaaatccatcattgaaagttcattatgtaaataaatgtgaagactagataagaaccacagaacacaatgacattggaaaaaatgccacagtaattctttgaaaaaagaaatgcaggcctggtgcggtggctcatccctgtaatcccagcactttgggaggccgaagtgggcagatcacaagtcaggggttcgagaccagcctggccaacatagtgaaaccccgtctctactaaaaacacaaaaacaattagctgggtgtggtggtgggcacctgtagtcgcagctactcgggaggctgaggcaggagagtgctttcagagaaacttcttgatcacaaggggaaatctgaaagttgtcagaacaaaatggagtcacttatgttaagataaccctgacaaatagagccaggaaggccatgaagagagggctcttatccttgcatgcctgaagatgaaaaagactctacaaaacccacaaccttacataaaggtcttcacaaccttaaaaaaatatatatttctgcaaggaatgctgcccagcaactgctggtccaacctaggactaatgtcacccttgttactgatctttgtagccaaggaaaattctgttaaaacaatatgcaatcctccccatttctgtcttcctttatctccctgaatatacacatagtttaatacggcatgtctattcccaattgcaatgctctattcccaaataaacattgtttccggctgggcgcagtggctcacgcctgtaatcccaacactttgggaggccaaggcgggctgatctcgaggtcaagagacggagaccatcctggccaacatggtgaaaccccgtctctactaaaaaataaaaaattagctggatgtggtggtgcacgcctgtagtcccagctacttgggagactgaggcacgagaatcgcttgaacctgggaggcagaggttgcagtgagccaagatcatgccactgtactccagcctagccacagagcgagactccatctcaaaaagaaaaaaaaattgtttcccttaggaagctttcatatgtttgttagttaggttaacacttctaataattaaagttatacagttacagtgtaaaattattagtattaacaacataaacattggtataaaaattattattacagaaattaaaacaaattgagtgtgagagagattattaagactgtccaagccaagtcactgaagtcataaatttaagttatgacaggatgccgagcttccagagggttttgtttttaacaagggaggggccctatttccccttctgacacgctcatatgaacttctcactttgtcgtactccttccttgctgactaagaggaacagaacacagagcagcctggcggtgtcctaccaacaagcctccgtttctccttcctgtacactagggctcctgaaactcacctggtaagcgctccagaaaagcagcaggtggtgactttagggtaggacgggccaaatgggagaatccccttaggtcggtttctctggttctcaacttcttttgaaataacgctcgcagaggaggtgggctttctgagaactgagggaagtaagctctcaggacttccggtcgccatgatggctgtgggcagtcaatggggtcagtgcaagcatctgggccatctttaatgtgggcaggaaaaaaacacgattacacttacttctgcagagtttataatatccttgttcattatttaaaataaaatatctaagacataggtaatagtatattttaaataaaattgaagcaatatatgaaatttctctggaattcatccagccactctcagctgttaccactatccagaaacgtcttaatccgcctgcatgatttatgtatttggtttgtattttaaatatcattttctgtaatatttaaaagttgtatttgcttggtatcctgctatgcattctcatgcaatttgatttttaatcaatattacttttttttttttttgagatgaagtctccgtctgtcacccaggctggagtgtaatggagcaatctcggctcactgcaacctctgcctcccaggttcaagcgattctcttgcctcagcctcccgagtagctggaattataggtgcatgccaccacgctcggctaattttttgtatttttagtaaagacggagtttcaccatgttggtcaggatggtctccgtctcttgacctcgagatcagcccgcctcggcctcccaaagtgctgggattacaggcgtgagccactgtgcccggccttggtttctaaatactattttgaagtatctgtggagaaatggttacttcgagggctggggcaggaatatataagataacatt

SEQ ID NO: 840 - DNA, 6000 bp, Homo sapiens
gaactcccgacctcaggtgatctgcctgccttggcctcccaaagttctgggattacagacgtgagccatcgtgcccagtctgagagttctaagttcttagaaggtggttgtgtttacctactaaaattttattggtagcaataatcatctaatggaaattcagagaagtgattttaaagatttgaattccaaaaccctatacaaacgttttattttaccaccaatgaatttatctgcaacacctgagttgtggggcggaaagccacccaggtgccgaggcgagagaccgagggcacgagctgttccagtataataaagaaaatatagaaaataagaatagttatactagatctagatcatagatatgattatatatgaatatcattaatcattagtttgtagcaattaccctttattccaatgttataataatcctcgctctacaatcataacctaggaaaaaccaggccatacagagataggagctgaaggggcacggtgagaagtgactagaagacgagagtgcgagccttctgtcacacccagacatggccactagagggctccctggtctagcggtaatgccggcgtctgggaaggcacctgttacttagcggaccttggtctagcggtagcgtcagtgcctagaaaaggcacccgttacttagtgggccaggaaagggagtctctctttccccgggggagttagagaagactctgctccaccgtctcttgtggaaggcctgacatcagtcaggcccgcccgcagttatccggaggcctaaccggctccctgtgatgctgtgcttcagcggtcacgctcctgtttcactttcatgttccactctgtacacctggctccgccctctagatagcagtagcagaattagtaaaagtactaaaagtctctgaaatgcagaaataatggcataagctgtctcctctctctctccaccagggctgccaaacagggaggggccccctgtccggtggaaacgtgactcatgtgaccttatcaatcattagagatgactcacactccttaccctgccccttttgccttgtatccaataaatatcagcacagccaggcattcggggccactgctggtctccgcatcttggtggtagtggtcccccgggcccagttgtcttttcttctatttctctgtcttgtgtctttatttctacgatctctcgtctccgcacaacgggagaaagacccacagaccctgtagggctggcccctacactgaatgtctgtttatttatatgcataataatcaactcacatgttccaactgaacaaaccaaatatttctatccaattttcaataaaaatataaaaatctacatatttcatgtgtttatgtttgttatgtctctcacagcctgcaacaaatttaatttagctatcctctgaactacaagcttccctttgttgtaacgaacacttttcttttacttaagtatcgttattccagagttaatatagtatgcattcaaattacttcttatttagtattattttacctagtaccattatatatttaattttttctcatgaagccaggcacagtggtttgtgcctgtagtcccagctactcgggaggctgaagtgagaggatcccttgagcccaggagtttaaggtcgcagtgagctatgatggcaccgctgcattccagtctgggcgacaaagcaatacctcatttcaagaaacaaaatggaatcttttccttataagaatcttaaagaaggtgtacattatcttggctaactttctataggattaagtggaagttattgagacttggtctacagtcttctttttttcatgagtcaaaaagcatctctcactttagttacacctgtattaggagagttatgatcaattacagcagttgtagtttctgagaacttggataaatacaaacctgaattacacagaatttatgtaaatccagatattcaaaaatgagaaataatgtaatatatgaccaaagtaatatcaagacaacatacaattaaatcactcaacaattactgggaatatgtatcaaggcaagaattgtaaaattctacctggtacttctgaaatgaacaaggcaatgagaaataacagtttatcttgtctattactgagtatcaatgaaagcaataaggtgaacggaaaagtccatgcaaactccattttcagaataacgaggagacagatagaattcacagatccacatgtttctcactggctgacaaaactgtgttaagtcagggtgaagcatagcggaggaacagggaggaagtgcagagtgagaaaacataaagaagtcaggaagtgccagaagagtaatttcctgtgagtaaagcctcatactcggtgatttatcgatagagtttgaatacaagagctgtgaggtctgggcagttggagtggaggctgagcaggagataaatgtggtagaggcggtgtggttgggagatccttgaaaacagagaaatgccctagtatggcagagtacagaaatactacaaaaactcacttgtagaaagaacattctgcatataatcaggcatggaacggtcccatgcattccataataattaagaaaaagatattggcagagcattgcttaaaggcactgcaagaaaataggtgagaagaccagtaagttttatttatttattttattattttattatttgttttcgagatgaagaacaatcaaaggaaaatgatggacggaaattaacaatcattcttgggcggggggaaaaactccacccacaattcctaagtaaaaagggttacacacattctcggcataataagtctctctcaggccaaatgtgttcatgtgaacactatgaaggcattccagctgaggtcaggaaaataccaagtatgaccttccctatttaagttaaaatattggaagcttattccaaaatattggaataaatttgaaatacagtgattgaatggaaggacattaaattataactcattagacatgttattttactctatagacaaacacaacaaatcacctgaaataagctataaaagataaaccagtaagttagagaaataatctttttttttttttgagatggagtctccctctgttgcttaggccagagtgcagtggcgcagtcttggctcactgcaacctctgcttcctgagttctagtgagtctcctcctcagcctcccaagtagctgggattacaggcatgtgccaccatgcctggctaattttttttgtatttttagtagagatggggtttcaccatgttggacatgctggtcttgaactcctgacctcaggtgatctgcctgcctcaggttcccaagtgctgggattataggcttgagccattgcgcctggccagaagaatcttaatgtacaaaaatgaataggtttttaatacaacagactatcccaattccttgaaagaagaaaatacacccattaaaacagaaactatggtgcctagaattaaactgcacaaaaaactacatgacccatataatttttttatgttgaaataattttaaacatgcaaaattagcaaagattcatataaatcctcaaccagcctatcctgatgttagctatatatataattgtattatatgtataatagttgttatatataaaactgtatatatacatttattgtattataatcatatatatacatttattgtattatatataatatacaactgtatatgtaattgtaatataataattatatacataatagtatatgtaatacaagtatccaaccaggaaattgatgtcaacgtatcttaccattacctaatgtgcagaccttatttgaattttgtcaatatttctcttaacgtcctctttcttctccaagatcgaatcgaggatctcacattgcactcagttgttatgtccttagattcctccaggctgtgaccgtttcttattcttcccttgtcttttgtgattgtgacacttttgctgagcatggccaattattttacagaatgtttatcaatttggatttctttgatgttttctcacgattaggctgaggtcatgcatgtttgtcttctgtgttcagtcaatatgccccatcctttttcaaatatttcttcatgttctggcgtcagaatttgttccaatgttatcttatatattcctgccccagccctcgaagtaaccatttctccacagatacttcaaaatagtatttagaaaccaaggccgggcacagtggctcacgcctgtaatcccagcactttgggaggccgaggcgggctgatctcgaggtcaagagacggagaccatcctgaccaacatggtgaaactccgtctttactaaaaatacaaaaaattagccgagcgtggtggcatgcacctataattccagctactcgggaggctgaggcaagagaatcgcttgaacctgggaggcagaggttgcagtgagccgagattgctccattacactccagcctgggtgacagacggagacttcatctcaaaaaaaaaaaaaagtaatattgattaaaaatcaaattgcatgagaatgcatagcaggataccaagcaaatacaacttttaaatattacagaaaatgatatttaaaatacaaaccaaatacataaatcatgcaggcggattaagacgtttctggatagtggtaacagctgagagtggctggatgaattccagagaaatttcatatattgcttcaattttatttaaaatatactattacctatgtcttagatattttattttaaataatgaacaaggatattataaactctgcagaagtaagtgtaatcgtgtttttttcctgcccacattaaagatggcccagatgcttgcactgaccccattgactgcccacagccatcatggcgaccggaagtcctgagagcttacttccctcagttctcagaaagcccacctcctctgcgagcgttatttcaaaagaagttgagaaccagagaaaccgacctaaggggattctcccatttggcccgtcctaccctaaagtcaccacctgctgcttttctggagcgcttaccaggtgagtttcaggagccctagtgtacaggaaggagaaacggaggcttgttggtaggacaccgccaggctgctctgtgttctgttcctcttagtcagcaaggaaggagtacgacaaagtgagaagttcatatgagcgtgtcagaaggggaaatagggcccctcccttgttaaaaacaaaaccctctggaagctcggcatcctgtcataacttaaatttatgacttcagtgacttggcttggacagtcttaataatctctctcacactcaatttgttttaatttctgtaataataatttttataccaatgtttatgttgttaatactaataattttacactgtaactgtataactttaattattagaagtgttaacctaactaacaaacatatgaaagcttcctaagggaaacaatttttttttctttttgagatggagtctcgctctgtggctaggctggagtacagtggcatgatcttggctcactgcaacctctgcctcccaggttcaagcgattctcgtgcctcagtctcccaagtagctgggactacaggcgtgcaccaccacatccagctaattttttattttttagtagagacggggtttcaccatgttggccaggatggtctccgtctcttgacctcgagatcagcccgccttggcctcccaaagtgttgggattacaggcgtgagccactgcgcccagccggaaacaatgtttatttgggaatagagcattgcaattgggaatagacatgccgtattaaactatgtgtatattcagggagataaaggaagacagaaatggggaggattgcatattgttttaacagaattttccttggctacaaagatcagtaacaagggtgacattagtcctaggttggaccagcagttgctgggcagcattccttgcagaaatatata

SEQ ID NO: 841 - DNA, 6000 bp, Homo sapiens
gcggccccatagacagcgccgttgtcgccatctttgttaagggagagtgggcctgtctcatccattgaattcacaaaagaaaaggggcgtgagggaggaggtctttagctgcaaagacagagactctaacacgcgtaacaaaggcccagagatccgatccagacacagagcaaggcagagacccacagaggttggatgaggcaataagagagctgggaggagagggagagtggggaaagtgaaggatacttttttttcggacagttacagagtcagagagacccagagaaaagcagagatataaacaagagaccaaaacagtgggattgagaatgtgcaaggtaaggatacaagaaaaccctgaaaatgacagacacggagacagatggagacagacacttctggaatggaagccgcgaaggagaggctcattaattcagacttatttatctcaggctcaaaccagaatggaagcggcatgagataaacatctgcccagtgaatgaaccagtcacatggcaagacagagacagagagatggggacagtatctctaggtcaaaggtgagggagggagagaatattggaagcccaggggctgggaggaactgggacagaaagtgaagatgttgacagatgcaccgaggcaaagacatggtgaaattgaaagaaaggcaagtatatattaggagacttagaaacagaattgcatagagagaaagagatatgcattaggagacaaggacagagctcactagaaagtgacaaatgtaggctgtaggccaggcgtggtggcttacgcctgtaatcccagcactctgggaggccgaggcgggtggatcgccaggtcaggagtccgagaccagcctgaccaacatggagaaacccccgtctctctctctttttttttttttttttttgagatggagtctggctctgtcacccaggctggagtgcagcggcacgatctaggctcactgaaccgcctgcctggttcaagcgattctcctgcctcagcctcctgagtagctgggactagaggcacgtgccaccacgtccggctaattttttacatttttagtagagacagggtttcaccgtgttagccaggatagtctggatctcctgacctcgtgatccatccgcctcagcctcccaaagtgctgggattacaggcgtgagccacctcactggtccaaaacccccatctctactaaaaatacaaaaattagccaggtgtggtagcacgcacctgtaatcccagctactcaggaggctgaggcaggagatcgcttgaacccaagaggcggaggttacagtgagccgagatgatgccactgcactccagcctgggcaacagaccaagactctgtctcaaaaaaaaaaaaaaaaaaaaaaaaaagagagacaaatgtaggaagaagtttgcttattgccaaatcatgtacctagcatccaacccacagtagcaacagcaccagatagtatgtgccaaggaatgacacggagagaagggggaacagaaacccagtaagactgagactggggcacagcaactgagcttggggccctgggagaaggaaaggcagagacactgggcaaagaagctgagattcaaacatagagcctaagtcacacagacgagaggacagggaggaggaaaaggagaaaggaccctgcagctcacacacacttgctgtgtgactgctgggaagcccctgaattcttggcctcagctgtcctgtctgggaagtagggagaaagctattcacactgaaacaggaattaaaagaaattaaagaatgtgtaagcaaaaactcagttgtatgtaaaaaacccaattccccctgaggaagagaaagagattgagtcctttatttttttttattttttttttttttgagacggagtttcgctctgtcgcccaggctggagtgcagtggcgcgatctcgactcactgcaagctccgcctcccgggttcacgccattctcctgcctcagcctcccgtgtgtagctgggactacaggcgcgcgccaccatgcccggctaattttttttgtatttttagtagagacggggtttcaccgtgttagccaggatggtctcgatctcctgacctcgtgatccgcccatctcggcctcccaaagtgctgggattacaggcgtgagccactgcgcccggcccgagattgagtcctttaaaaattaactgcctgtttttctgtttgtggctagtgagccttatctaactccctttcccaggcatcgtgaagaccctgtttctctaactgtgcagctgcaaggtcactagacaggataaactcaagtcctaaaacatgtttttccttgaaaagtaagaaataatgtaatgcatgtctcaattgaataactgtctttgtttctcgctgctataatatgcttccccctgcacagatctccccctaccccacgaaatacttaaaatgtaacttgactctttgttcggtgctcagtctttttcgatgttaatctgactgggccagtgcacctaaataataaataataagtatcctcctcaacccctcagtttctctgattcctaaattatcccactggaacacctgcctggagagaaggtctgaaatcacttatggaagggctcccaggctgggcgcggtggctcatgcctgtaagctcaacactttgagagactgaggtgggagaatcccttgagctcaggagttcaagaccagcctgggcaacagagggagacctagtctctagaaaaaataaaaaaattggccgggtgcagtggctcatgcctgtaatcccagcactttgggaggccgaggccggcgtatcacctgaggtcgggagtttgagaccagcctgaccaacatggagaaacctcatctctatgaaaaatacaaaagtagctgggtgtggtggcgcatgcctgtaatcccagctacttgggaggttgaggcaggagaactgcttgaacccgggaggcggaggttgcagtgagccaagatcgtgccattgcactccagcctgggcaacaagagcgaaactccacctcaaaataaataaataaataaaaataaaaaaattagccagccatggtggaggctacttgggaagctgaggtgggaagatcactttagcccaggaggttgcagctgcagtaggctgtgattgtgccactgctttccagcctgggcaagagtgagaccctgttttttcttttttttttttgagacggagtctcactctgtcacccaggctggagtgcagcgcgatctcggctcactgcaacctctgcctcccgggttcaaatgattctcctgcctcagtctcccgagtagctgggattacaggtgcgcatcaccatgcctggctaatttttgtatttttagtagagatggggtttcaccatgttggccaggctgatctcgaactcctggcctcaggtgatccgcaggccttggcctcccagagtgctgggattacaagcttgagctaccacgcctggcctccaattttttttttttttttttaaagaaaagcttcagattttgtctttccacagtatgaggatcttggcttttagatggtcccttacctggtcctgctgctcctctgcttcaaggtgtccattcatctgctggtcctctgctctgttacatcaacgggaccctggccctgggtcttaagccatagtaggctggtaggagcaaggagtcaggtctcactgtcctggcctgaccttcagctctgtggaggagaggtaagtgaggagcagcattgacagccaactgcaggaggcccttccaggctcaatgtgcctgagaaccaagaggcaggggcctccctggcgggtggggggaagagtagataagtcattttaatcactgccccagccagtccatctggttgcacacaatatgtatgctataataggagtgaaggctaatttttattgagcacttattatgtgcaaaatattgacctcagcagttttattaactttcataatcctgaaaaacacccctgtgtgccaggcctgttgtcatcccctttttgtccataaggagagtaaggcccaaagaagttaagtgattttcccaagatcacagagaggttaaatgacttgcccaatcaccccattagtaactagcagagccaggatttgaatttggttatagccttgcaaggccccatctcaccatctttctttgccactacttctccctgggtctccatctcacccctctttctaggtctccttcctaccctttgggcctccattccccccacccccaagccacggagtctccattttgcctcccctatgaaactctgtctccctctttctaggtcagggaagggccatctaggggccgggggagaaggagaagcggaactcaaaggatgggaatacaggatgctatagattgaggtgcagcaagatcatctcgggttagaccttaagtaggacttcccaagcagcggctgcgcctacgaagtgcagcgcgagatcagggagcggtgaacctgataaggaaacgcccgaagcgtggggtcggaaatttccagatgccccgactagccctgccagccccgcctcctcacctccaacactgggcccgccgggtcctccgggagccactgagaggccgtcggcgtcgggccagagcgtcaccgcgcgacgcatcgtgctagctacacgcatctcgctcccagatccctttcttccggaaagctatcgagaacacggcctgggtagggccagagaggcccccgacgtgctggcccttccctcttggacgttgcgcttgttcctgcgctctatgctctctgccgttatcgcccggctagtcagtcgtccaactcaccacagagaagtccggatcgtggtagagcgccgcgtcgcacccatgtgacgtcacggcggcgccactcgcttgaggctttccccgcccaccccagcccgttctctctttccggacctggccgagcaggaggcgccatcatggtgagctcgctttgcggcgttcggggctggataatccgctgccatccgccgtggttttgggctaggggcacgctggagggcggcagggggtctgcggctgcccggagggagcaattcccgatactggggacctactctgggggccaggaaagcagggatgggtcagtcatagcctaccgcccccacttagtagatgaccaagtggaggtactcggaggctgatatgactgggtttacaaagccaggaagtggcagagccaggattccgacccaggtggctggacccgcagccactcttagttatttggctttgctgcctttatctggacctgtcactttctagtatgaaaagtcgggttcgatgggggccgcggcgggtgagaggatcgagagccgaataactggatttggggaccaggcaggtctctgagtctcaggccccttcccaccttgtgatggtttttgagcctttgccccagtgtctggctgttcgttgggtacacagtaatctcatctgacaagtttgtgaatttgggaagaaataattcacaggagatgctcatcacggggttttgcacacagtaagtgctgcataagtggagctattaaatagttcttgtaattgtcaacacagtctgaaaaacttaagttgctcagaaaggcagcagggcggtaggagcctggcgaggcggctcacgcttgttatcctagcactttgggaggccgaggcgggaggattccttgcccaggagatcaagaccagcctggccaatattgtgagaccctgtctccactttaaaaacgatgttttaaaaagacactatttggtaagggttgttggattgactgatgctgtaggagaggtggttctagtagtattgctaggttctgaataaggattcgttttcatcattactgccattggtttgatatttttggttatccctccgggtatgggaaccagttttgataacattgttgc

SEQ ID NO: 842 - DNA, 6000 bp, Homo sapiens
aggagtcaaggcaggccagcctccccgccccaccctcacccatcccccccatcgccggggctcacccacaccggctagtgccgggctcaatggcctcccttccagtgcctgctttttccgagaacgtaggctgtggctccccggcttctacttctgcggtgcttcccggcttctggcctcactcatcaggcctcgacctggaatccagggagcccggccccttgtgtaaacacaggagggcccccacaggcccctggaggaggtccgggggtgcggctcacacgctttctttacctgtgctctcccagggggtgaacgcccctctagactcaggcttcccggtccccggggggttgagattgcctcacctgttcccaggcagtctctccctccccacagccctgccagcctgcaccctgcacttcccggtccacgccccacccgccatcccagcaccagggaggggcacaggatcctttaagaggggcgggcgtggctgacccaaggaagccggtgtgggaacacctgccacctggctgttgggaaggaggcagggagcttccggggcagtgggggcaggaagagggctggtcttcactggcatgacgtccctgtccccaaaccaaatgcattctcacccgcaggaaccaattctccaacccatcccccaataacacacacagagcactgtcagcaaaaatctttttaataagagagtaggatccagggttagtttttgtagcctcggctggcccgtcggcctctggcacgctcgaacttccggcccttggagcggacgtagggtctgtggggagaggagggagtgagaggggggccctcttaaaggaggccattgtggagtggcacaggaacaccacaagcctgtcacattcagccccaggagagtcaatgctgctggaaaagcttggcagagtgggaagccaaggagccaggaggggctatggaagcacctgccccaccacctggagggtcccagcctgggctggcaaaggccggtgaactgcatgctccccaggagatgcctgctcaggccctggaaaacacagctccaagcagtgttgaagggaaaagcaggcaggatgaggcagctgagagttccagaaggcctggggctggctggtacgagggataggagaagcagcccaagtgtggccaggcctggccctgcaggctgagtctggggagagggcagggctgggggcctgatactcacttggtgtggctgtgcggggttcctggggccttgccgaaatgccggtacacctctcggcccttgcgaggacctagggaaggggaaggagaaccgggtgagacagggatctggcgcccagcttctggcctcccagatccaggagggtgaaggctgccagtagccacacagctcagtccaaacccgtcgaccacgtatcactcaccggagagcaggacagtgccacagcccttaggggagtccagggccagctggtcgaaagtgaggatcttgccccctgccctgaggatgcggctgcgggcccggctggtcacgcgcagtgcacatacctggtggagaggacaaggctggcgggtcagacccctgcgtggtcacccaggggctgccaggactcaccctccactgccttggcgcagcagagccctggtaaccaacactatcgtttactacccggagcaccctgggctgacagcagcagttctcaacacttccggaactttcaccaccacatccctggtgttatgctagaaactacagcaaggaagctgggccaaaaaaagacctgtgcagaggtgacaaaggagtctagacttgagcccaggctgtctggctctaggggccagcactaacagtttacaacttgccccagaagaagcttgcccaggggaccccaccatcaaccatgccagagacgacccacaccaatcctcaaagccactcagacaggcaggatgcttgcctcaccagcggtggcaagactgaggatggaccagcacagcacagcacagcacagcacagcacagcacagtacagcaagggtctgatgggtctgcccagcccccgccagctcaccttcagtttgggtacctcctgaacccgcacatcatcagttatggtccccacaaccacggccgtcttgttttcccggccaggaagcttcatcttccggatcttagggtggggaggatgtacgtcgtaagttgttctggtgtttacattcagccccgcttgaggcatccccaggccagggcagctgtgccctctaacgggaccccccactcacaccacaccccttaaaccccacaggcctctcctcaggtccagctggggaaagctccagataaaaaaaaaaatgcagactgttcaatagggcctccctcagcagagcctttgacataaaactcagttatgacttggggcaatctcctgaagccaccaggacacctccacctcacaaagagaaggagaggaggaccaggagacttgcccactgcccatggacactcagttccaaccaacagtccaagctctacgctcgcgactggctgagacaaacccttgatgccctggttgctcccagagctccaagtcctgcctcccttccagacagacaagacccagcggctcccaggtctaccgtgctctctggaccagccactcaccatccgggaaagggacagaggcggccggttggtgcgactcataaacaacctcttcaacacaacctggttgaatgtggagttggttcttctggccagaaacctgtataactggagggacgggaagacagtgagaagctgggacagcctgctcccccgcagccttccagtgaaggggcaaacacatgatgatctggactaaaataatctttatccctttcccccaacccaccgacctagagggagaaagctggcccaggtccttcctggccaaggacctagaaaatcctggctccactcccgagctgtacacagcctagaggctgaaaatacaaatgcaggagaccctggaacagaaccagagacccgagactgctctgcaggcccctgggaggagcttggtgccagcactagaatggaggatctgcaagtcagacctggggtgacccttcccaaagacctcagggcccagcctcaccttgaccaacagcctcaggtagatatcctggctcttgggctccttgcgccgaacctttcggtccttgttatggcggatgtccactccctgtgggggtgaagaggcaaccatggacccaattacccccaaccatagccaattattacttatttctgaaactgagagctgggacacaagcccaggtctgaacacaccagctcaaatcccaggcccaccaccaggagacctgtgggctgccactgatccctctgtaaaaaggggctgtttacaaagccttcagcccatggcacacagaaccctgaaacatcgtaacacagcaatcatattaacttaatacaaaaaggtcaattctttacaacttgtattttgcaacaatgttatcaaaactggttcccatacccggagggataaccaaaaatatcaaaccaatggcagtaatgatgaaaacgaatccttattcagaacctagcaatactactagaaccacctctcctacagcatcagtcaatccaacaacccttaccaaatagtgtctttttaaaacatcgtttttaaagtggagacagggtctcacaatattggccaggctggtcttgatctcctgggcaaggaatcctcccgcctcggcctcccaaagtgctaggataacaagcgtgagccgcctcgccaggctcctaccgccctgctgcctttctgagcaacttaagtttttcagactgtgttgacaattacaagaactatttaatagctccacttatgcagcacttactgtgtgcaaaaccccgtgatgagcatctcctgtgaattatttcttcccaaattcacaaacttgtcagatgagattactgtgtacccaacgaacagccagacactggggcaaaggctcaaaaaccatcacaaggtgggaaggggcctgagactcagagacctgcctggtccccaaatccagttattcggctctcgatcctctcacccgccgcggcccccatcgaacccgacttttcatactagaaagtgacaggtccagataaaggcagcaaagccaaataactaagagtggctgcgggtccagccacctgggtcggaatcctggctctgccacttcctggctttgtaaacccagtcatatcagcctccgagtacctccacttggtcatctactaagtgggggcggtaggctatgactgacccatccctgctttcctggcccccagagtaggtccccagtatcgggaattgctccctccgggcagccgcagaccccctgccgccctccagcgtgcccctagcccaaaaccacggcggatggcagcggattatccagccccgaacgccgcaaagcgagctcaccatgatggcgcctcctgctcggccaggtccggaaagagagaacgggctggggtgggcggggaaagcctcaagcgagtggcgccgccgtgacgtcacatgggtgcgacgcggcgctctaccacgatccggacttctctgtggtgagttggacgactgactagccgggcgataacggcagagagcatagagcgcaggaacaagcgcaacgtccaagagggaagggccagcacgtcgggggcctctctggccctacccaggccgtgttctcgatagctttccggaagaaagggatctgggagcgagatgcgtgtagctagcacgatgcgtcgcgcggtgacgctctggcccgacgccgacggcctctcagtggctcccggaggacccggcgggcccagtgttggaggtgaggaggcggggctggcagggctagtcggggcatctggaaatttccgaccccacgcttcgggcgtttccttatcaggttcaccgctccctgatctcgcgctgcacttcgtaggcgcagccgctgcttgggaagtcctacttaaggtctaacccgagatgatcttgctgcacctcaatctatagcatcctgtattcccatcctttgagttccgcttctccttctcccccggcccctagatggcccttccctgacctagaaagagggagacagagtttcataggggaggcaaaatggagactccgtggcttgggggtggggggaatggaggcccaaagggtaggaaggagacctagaaagaggggtgagatggagacccagggagaagtagtggcaaagaaagatggtgagatggggccttgcaaggctataaccaaattcaaatcctggctctgctagttactaatggggtgattgggcaagtcatttaacctctctgtgatcttgggaaaatcacttaacttctttgggccttactctccttatggacaaaaaggggatgacaacaggcctggcacacaggggtgtttttcaggattatgaaagttaataaaactgctgaggtcaatattttgcacataataagtgctcaataaaaattagccttcactcctattatagcatacatattgtgtgcaaccagatggactggctggggcagtgattaaaatgacttatctactcttccccccacccgccagggaggcccctgcctcttggttctcaggcacattgagcctggaagggcctcctgcagttggctgtcaatgctgctcctcacttacctctcctccacagagctgaaggtcaggccaggacagtgagacctgactccttgctcctaccagcctactatggcttaagacccagggccagggtcccgttgatgtaacagagcagaggaccagcagatgaatggacaccttgaagcagaggagcagcaggaccaggtaagggaccatctaaaagccaagatcctcatactgtggaaagacaaaatctgaagcttttctttaaaaaaaaaaaaaaaaaattggag

SEQ ID NO: 843 - DNA, 6000 bp, Homo sapiens
gaagaaagggatctgggagcgagatgcgtgtagctagcacgatgcgtcgcgcggtgacgctctggcccgacgccgacggcctctcagtggctcccggaggacccggcgggcccagtgttggaggtgaggaggcggggctggcagggctagtcggggcatctggaaatttccgaccccacgcttcgggcgtttccttatcaggttcaccgctccctgatctcgcgctgcacttcgtaggcgcagccgctgcttgggaagtcctacttaaggtctaacccgagatgatcttgctgcacctcaatctatagcatcctgtattcccatcctttgagttccgcttctccttctcccccggcccctagatggcccttccctgacctagaaagagggagacagagtttcataggggaggcaaaatggagactccgtggcttgggggtggggggaatggaggcccaaagggtaggaaggagacctagaaagaggggtgagatggagacccagggagaagtagtggcaaagaaagatggtgagatggggccttgcaaggctataaccaaattcaaatcctggctctgctagttactaatggggtgattgggcaagtcatttaacctctctgtgatcttgggaaaatcacttaacttctttgggccttactctccttatggacaaaaaggggatgacaacaggcctggcacacaggggtgtttttcaggattatgaaagttaataaaactgctgaggtcaatattttgcacataataagtgctcaataaaaattagccttcactcctattatagcatacatattgtgtgcaaccagatggactggctggggcagtgattaaaatgacttatctactcttccccccacccgccagggaggcccctgcctcttggttctcaggcacattgagcctggaagggcctcctgcagttggctgtcaatgctgctcctcacttacctctcctccacagagctgaaggtcaggccaggacagtgagacctgactccttgctcctaccagcctactatggcttaagacccagggccagggtcccgttgatgtaacagagcagaggaccagcagatgaatggacaccttgaagcagaggagcagcaggaccaggtaagggaccatctaaaagccaagatcctcatactgtggaaagacaaaatctgaagcttttctttaaaaaaaaaaaaaaaaaattggaggccaggcgtggtagctcaagcttgtaatcccagcactctgggaggccaaggcctgcggatcacctgaggccaggagttcgagatcagcctggccaacatggtgaaaccccatctctactaaaaatacaaaaattagccaggcatggtgatgcgcacctgtaatcccagctactcgggagactgaggcaggagaatcatttgaacccgggaggcagaggttgcagtgagccgagatcgcgctgcactccagcctgggtgacagagtgagactccgtctcaaaaaaaaaaaagaaaaaacagggtctcactcttgcccaggctggaaagcagtggcacaatcacagcctactgcagctgcaacctcctgggctaaagtgatcttcccacctcagcttcccaagtagcctccaccatggctggctaatttttttatttttatttatttatttattttgaggtggagtttcgctcttgttgcccaggctggagtgcaatggcacgatcttggctcactgcaacctccgcctcccgggttcaagcagttctcctgcctcaacctcccaagtagctgggattacaggcatgcgccaccacacccagctacttttgtatttttcatagagatgaggtttctccatgttggtcaggctggtctcaaactcccgacctcaggtgatacgccggcctcggcctcccaaagtgctgggattacaggcatgagccactgcacccggccaatttttttattttttctagagactaggtctccctctgttgcccaggctggtcttgaactcctgagctcaagggattctcccacctcagtctctcaaagtgttgagcttacaggcatgagccaccgcgcccagcctgggagcccttccataagtgatttcagaccttctctccaggcaggtgttccagtgggataatttaggaatcagagaaactgaggggttgaggaggatacttattatttattatttaggtgcactggcccagtcagattaacatcgaaaaagactgagcaccgaacaaagagtcaagttacattttaagtatttcgtggggtagggggagatctgtgcagggggaagcatattatagcagcgagaaacaaagacagttattcaattgagacatgcattacattatttcttacttttcaaggaaaaacatgttttaggacttgagtttatcctgtctagtgaccttgcagctgcacagttagagaaacagggtcttcacgatgcctgggaaagggagttagataaggctcactagccacaaacagaaaaacaggcagttaatttttaaaggactcaatctcgggccgggcgcagtggctcacgcctgtaatcccagcactttgggaggccgagatgggcggatcacgaggtcaggagatcgagaccatcctggctaacacggtgaaaccccgtctctactaaaaatacaaaaaaaattagccgggcatggtggcgcgcgcctgtagtcccagctacacacgggaggctgaggcaggagaatggcgtgaacccgggaggcggagcttgcagtgagtcgagatcgcgccactgcactccagcctgggcgacagagcgaaactccgtctcaaaaaaaaaaaaaataaaaaaaaataaaggactcaatctctttctcttcctcagggggaattgggttttttacatacaactgagtttttgcttacacattctttaatttcttttaattcctgtttcagtgtgaatagctttctccctacttcccagacaggacagctgaggccaagaattcaggggcttcccagcagtcacacagcaagtgtgtgtgagctgcagggtcctttctccttttcctcctccctgtcctctcgtctgtgtgacttaggctctatgtttgaatctcagcttctttgcccagtgtctctgcctttccttctcccagggccccaagctcagttgctgtgccccagtctcagtcttactgggtttctgttcccccttctctccgtgtcattccttggcacatactatctggtgctgttgctactgtgggttggatgctaggtacatgatttggcaataagcaaacttcttcctacatttgtctctcttttttttttttttttttttttttttgagacagagtcttggtctgttgcccaggctggagtgcagtggcatcatctcggctcactgtaacctccgcctcttgggttcaagcgatctcctgcctcagcctcctgagtagctgggattacaggtgcgtgctaccacacctggctaatttttgtatttttagtagagatgggggttttggaccagtgaggtggctcacgcctgtaatcccagcactttgggaggctgaggcggatggatcacgaggtcaggagatccagactatcctggctaacacggtgaaaccctgtctctactaaaaatgtaaaaaattagccggacgtggtggcacgtgcctctagtcccagctactcaggaggctgaggcaggagaatcgcttgaaccaggcaggcggttcagtgagcctagatcgtgccgctgcactccagcctgggtgacagagccagactccatctcaaaaaaaaaaaaaaaaaaagagagagagacgggggtttctccatgttggtcaggctggtctcggactcctgacctggcgatccacccgcctcggcctcccagagtgctgggattacaggcgtaagccaccacgcctggcctacagcctacatttgtcactttctagtgagctctgtccttgtctcctaatgcatatctctttctctctatgcaattctgtttctaagtctcctaatatatacttgcctttctttcaatttcaccatgtctttgcctcggtgcatctgtcaacatcttcactttctgtcccagttcctcccagcccctgggcttccaatattctctccctccctcacctttgacctagagatactgtccccatctctctgtctctgtcttgccatgtgactggttcattcactgggcagatgtttatctcatgccgcttccattctggtttgagcctgagataaataagtctgaattaatgagcctctccttcgcggcttccattccagaagtgtctgtctccatctgtctccgtgtctgtcattttcagggttttcttgtatccttaccttgcacattctcaatcccactgttttggtctcttgtttatatctctgcttttctctgggtctctctgactctgtaactgtccgaaaaaaaagtatccttcactttccccactctccctctcctcccagctctcttattgcctcatccaacctctgtgggtctctgccttgctctgtgtctggatcggatctctgggcctttgttacgcgtgttagagtctctgtctttgcagctaaagacctcctccctcacgccccttttcttttgtgaattcaatggatgagacaggcccactctcccttaacaaagatggcgacaacggcgctgtctatggggccgcgacgtcgtctccgctgcgcgtcggccctcacccacgatggcggccagtctcccgaagcgcgaggccccgcccagctctcggcctctcccgcggccggtccctgcaccaagctcgcgagctgactggctccaccccccgcgccctcgtattggtgcggcccaggccggctgcacggccattggctgagcggatgcacaccctccccccacccctaggtctgatgggggctgttggtgctgacttgcgggaccgcctggaggaggacccggcgtgtgaggagggtgcgggggtcggggcagggaccggagtctaggggactgagggaccaagaggaacagagactcaggcccgggactggggcaccggggtgggagatggaaatggaaaacctgggccaggactgaacccagccaggcctgggactgggttctggaaataagagtgcggatggcggtttgggggcccagggccagacacgcaggcctatggattggggaccaatggatggagacccaggtccaggtctcggggacccagggacagagacccaggcccaagactggaggacatctagggctctgtgcttgaacctgatttgaggttcccataatggggccagggcaggtttgggggtgaagcagacgtcctggacccgagagagccgctggggataggggggcagatgtagttcctaagggtgagtccacaggcggtggggggtggggggctgtcctggcgctctgggcctggggaatgtgaggggcaggactggcaggtggctgggcggggcagtggggaacaaaggtgagcgaaaggaggaggcagaatccgggcagagggcagggagagggcctgtggggaagggacctcagtcctgctcccacccgctccctggagagcaggcggccagacacccaggtcagtgctcagggaccagctcttggcccctgccccttgcaggcgctcgcatgtggctcctctcggaccccgtagtccctgtcatatcccttctctccagctgtctccatgcctgcctcgtacccctcctatttgctctcccttccactctgtcttgcctttctcgttggggtgaaaaagtcttactctcttaagtatctttcatcgcctgagtttcacctcattgaccctgtttgtctcctctcagtgtttctctggctctcagaccctatctctattgcgtttgtgattgttttgctgttttacccactgcaccgtatggggggtgggggtgtcggggaggt

SEQ ID NO: 844 - DNA, 6000 bp, Homo sapiens
ccacctgtgtcctccacaggggccccccgaagcctggggactcccagccccagagctccgaggcggaggaggtgctgacaggtctggtaactactgactgtttcccagtcttctccacgccaccctttcccagaaccacaggcttccagaatgttgtagggaaactgcaaaatccgcgcctccaccagcctctcccagcgccaggtcaatttcacacacagggaaactgaagcctgcctcagaggggcagcgttttacctccttagtggcagttttgaggtgaactggggtctccctaggattccaggttgtgacctttctctaaattgtggaatgtggccaggcgtggtggcttgagtctgtagtcccagctactcaggaggctgaggcaggagaatgccatgaacttgggaggcggagcttgcagtgagccaagatcgtgccactgcactccagcctgggcgacagagggagattccatctcaaaaaaaaaaaaaaaaaaattttgtttgggaccaggcatggtggcttatgcttgtaatcccagcactttgggaggccaggacacgactattgcttgaggttgggagttcaagaccagtctggccaacatggtgaaaccccatctctattaaaaatacaaaaattagctgggcacagtggcaggtgcttgtaatcccacctactcagaaggctgaggcaggagaatcacttgaacccaggaggcagacattgcagtgagccaggattgtgccactgtactccagcctggccaacagagtgagattctgtctcaaaaaaaaaaaattgtttggaacatcctccaagatgcaagactgtcggttcctcagagttgcacaggaaggacggcagagtgcagttgcccagaggtgaagtcccatctctgccatttgctggctgtgtgaccgggcacaaatcattaacttctctgagcctgtatttcaacatctgttactgttaagtaatagtagttgaattatttttatttttattttattattattattgttttttaagacggagtttcgctcttgttgcccaggctggagtgcaatggttcaatctcagcccaccacaacctccacctcctgggttcaagtgattgccctgcctcagcctcccaagtaactgggattacagacatgcgccaccacacccgggtaattctgtatttttagtagagaaggggtttcaccatgttgaccaagctggtctggaactcctcacctcaggtgagccgcccatctcggcctcccaaagtgccgggattacaggtgtgagccaccatgcctggccttatttttacttttgagacagagtctcactcttgtcgcccaggtggcaggggagtggtgcactctctgctcactgcaacctcggcctcctgggttcaagtgattctcctgcctcagcctactgagtagctgggattacaggcgtgcagcactatgcccggttaattttggtatttttggtagagatgaggtttcaccatgttggccaggctgctctggaactcctgacctcaagtcatccacctgcctcagcctcccagagtgctgggattagaggtgtggggcacagtgcctggcctgtagtagttgaatatttattattaatctacaagttgcgcattacgcaagccctagatatagggtcccccaaacttctagaacaagggcttccccacaatcctggcaggcaagcctcccctggggttcccaacttctttccccactgaagtttttacccccttctctaatcccagcctccctctttctgtctccaggtgctccgagagatgctccctctcccctcatgctccctccccatcctcctccttttcctcctccccagtgtgccaattgagtcccaacccccaccctcaacattgcccccttttctggcccctgagtgggaccttctctccccccgagtagtcctgtctaggggtgcccctgctgggccccctctgctcttcctgctggaggctggggcctttcgggagtcagcaggtgccccggccaaccgcagccggcgtggggtgagcgaaactgcaccagcgagtcgtcggggtgagctggctgtgtgcgatgcagtcagtggctgggtgacagaccgccggaccgctgtggacttgcgtgggcgcgaggtggaggtgttgggcgaggtgcctgcagctggcggcagtcccctccgccagtacttctttgaaacccgctgcaaggctgataacgctgaggaaggtggcccgggggcaggtggagggggctgccggggagtggacaggaggcactgggtatctgagtgcaaggccaagcagtcctatgtgcgggcattgaccgctgatgcccagggccgtgtgggctggcgatggattcgaattgacactgcctgcgtctgcacactcctcagccggactggccgggcctgagacccatgcccaggaaaataacagagctggatgctgagagacctcagggatggcccagctgatctaaggaccccagtttgggaactcatcaaataatcacaaaatcacaattctctgattttgagctcaatctctgcaggatgggtgaaaccacatggggttttggaggttgaataggagttctcctggagcaacttgagggtaataatgatgatgatataataataatagccactatttactgagtgtttactgtttcttatccctaatacataactcctcagatcaactctcatggatttgatcattggtggcccttggtgttaagttgctgactactcagtctcagaggacaccaccttgctggggagtgggaggggacatttcacgatgtgggtggaggaggagagaaactagaacaggcaagcagatggccaggggaccttgagaacgtggcccacagaaggcctttaagtatctgggagatggggttcaaatgggaaatcttacttggtaagagggggcaaaggttgacttagaatattctgttttgaggtaataagctaccgatcacagaggagtacaagcaaggttgaatgagaagtgatcaggatgctggagagttcagccctcggcagggagctgaagtcaggtttctagccctcttccctgtcccaacctttactctacattgggaaagaaacagaccttaaaattttccagcttgatggccaggtgcgatggctcattcctgtaatcccagcactttgggaggccgaggtgggtgaatcacctgaggtcaggagttcgagactagcctggccaacatggtgaaaacccgactctactaaaattatataaagaaattagctggtcgtggtggcggatgcctgtaatccaagctactctgaagggtgaggtaggagaattgcttgaactcaggaggcagaggttgcagtaagccaagactgtaccattgcactccagccttggcaaaaagagcgaaactccatttcaaaaaaaagaaaaaaattttgtccagcttgagtggggcatgagtttctgactaactcatcggccccctggctaggatcagggggtcactgtccattgagagctgttgagtagggccagcaaaatccaacagaaaggccccagaagcctgaatgggggaggaggggtaagtgggatcctgggcatggctgcagaaagtagcctcagttttccttgtctgcagaatgggctggtaggatgagataatgggggttgagcagtcagaggccttgaccaaaagctttttttttttttttttttttttttttttttttgagatggagtctcgctctgtcacccaggctggagtgcagtggtgtgatctgagctcactgcagccttcacctcccgggttgaagtgattcttctgccttagttgggattacaggtgtgcgccaccacgcccggctactttttgtattttttggtagagacagggtttcgccatgttggccgggctggtctcaaactcctgacctcaagtgatccgcatgcctcggcctcccaaagtgctgggattacgggcatgagccactgcgcccggtgatcaaaagctgtttatagtgaagaagtgacaagggaagccagggacagaccacaggccttcacaatagcccttcacatgttacccatcgccccaccaactctctctctctctctcaggtccagctttgagcaaaggacataggcaacttctccccgcatctatacagaccaggcccctgggcagggtggggcgtggctgcctcagtttctacgtctccttgttttccatctgtgactttggtcgtttttgccaccttcatctctgtctctaacttccagtgtctgtcgcctctgggtagtactaatagctccctttccatcgtggtctctttcttcctccctgtctctcccctttcttgttgtatttattcctcactcatcaaagcccatctttttcgctatggtccggtgcacttctctctagatccctttctctttccccacccagcctacccaggtggaagttttcaaccaaatcaaaggcaggcaggacagctgacaccagcgctgactccttcagcacgtgcgggaagggttggggagccccggggacatctggaaatcgttaccccgaggtgggcaggcctggcagagggaggaagcagccaggaggttctggaccctggagcaaaggggggtgtttctcatggatgtcctgaggtgctgggggcagtgcaggggtctctgtctgtatctctgacacccccaggtctctgtccttctttctgtgtctctgtctcccccaccccctgggtctctgaaatcctgaacttctccatccccttctgtccgcctctttctgactctccatcccccactccgtgtttctctgtgcccctcttggagtccctgtctctctgtctctgggtctcttaatcactccatccatccatgtgcctgcaggcctttcattggctggattggggtgggcgggttctgtcacctggggcaacagcaacaaaccagctcctgcttggctacagggagggggtggaaccatggccagtggcaccctggctgtgcgctgtggccccccgtggtctttcatctctgcaaccgagatgcctgaatcctggcccaactggcatctcaccagcagctacgttacccatggcattatcccacccgtacccttccccccgcccacggtgcaggtgggcagaccctaggctgaagccctgcggggcctggggacccagaaagatgggggctgagaaaaggggattgggagcttggactcctctctgaaggaggagggtcctggagtcctgggtctgagagaggaggcgccagggaatttggatgccagggactgcagaggaaagggctgggggccgactggaagaggtcagagtttggggtggggggtgatagggactcctgagtctttctagctgatgtgcggcgccttctctccagtccacggtcgcggaccctctacctccgactgcaaagcaggattctcgcatctgggctttcgacgaggtcctcagcagatgggagacaacctctggctcggcctacgtgcccaagacccatggcgggccctgcgcccagcccagagccccagagcctgcagaccccacgcggactgtggggatcaaggattcaggagaaaaggtaagatttggggagcgccggagtctgcgggggactgcatttgagtcccctgctccttcacatgagtctctgggttgcctttccgcagctcagacaccgcagctgaaccctcctactgaccacaaagtaccagagcagcgagacgagggcgcagtacacttgctctcccggcccggacgcgcgcgcccccaaatacgtcgggccccagcccctcacaactctcggaccaccaccgcggggggccttcccaggtgtctgggtggaagccggcgctggcgagaccagcggagctccgggagcctggggcggggccagaaggaaatcac

SEQ ID NO: 845 - DNA, 6000 bp, Homo sapiens
tctgtcacccaggctggagtgcagtggcgcaatcttggctcactgcaacctccacctcctgggctcaagcgattctcctgcctcagccttctgagtagctgggattacagaagcgcaccaccacacctgtccgatttttgtatttttagtagagatggggtttcaccatgttggccaggctggtctcgaactcctgacctcaagtcatccacccaactcggcctcccaaagtgctgggattacaggcgtgagccaccacacccggcctcaacccttcattgaaaccttgtcccagcctctttccacctgaccatccaaagaaaatacagatccagcttctgatcccagtgccccaccattccgcaactcctgtccttgccaaggagtgggacagatgcccatcaccttctggttaatgacttctgcctcctcctccagcagggccaccagcctccgcagtatggcttccttctctgtcgatgggggaccctgtaattctggaggcagaagagaatttggctgggggcagaaccctgactatcctcccaccgccatccttctctggggctcctctgtgcctcacctgggctgggcggagatttcagctgctcttggaccagctgttccagccgctgggccaccaaagcatagaagtctggagtagctgggcctggggtgaaaagagttaatgacaggtttccaggacattggaaacttacggattctctccttcccccaactaccttggcaggtggcaatgattcccattttatttattatttatttatgtattgattttgggaaacggagtctcgcaattctcctgcctcagcctcatgagtagctgggactacaggcgcacgccgccatacctggctaattttttgtattttagtagaaatggggtttcaccgtgttgcccaggctgacctcaggcaatccacccacctcagcctcccaaagtgctaggattacaggcgtgagcaaccaagcctggccatgattcccattttataatggggtaaactgaggcccagtgagaaaacttggttaaaaatgccaaaacccttgtacttttcactttatgagatcctcagactggacttagaatgtcagagctggggccaggcgcagtggctcacgcctgtaatcccatcactttgggaggctgaggcaggcagatcacctgaggttgggagttcgagagcagcctgaccaacatggagaaaccccatctctactaaaaatacaaaaaaaattagccgggcatggtggcgcatgcctataatcccagctacttgggaggctgaggcaggagaattacttgaacccgggaggtagaggttgtggtgagccgagatcgggccattgcactccagcctgggcaacaagggcgaaactccgtctcaaaaaaaaaaaaaaaaaaaagaatgtcagagctgacagggtgcggtggctcacgtctgcaatctcaacattttgggaggccgacgtgggagggtcacttgaggccaggagtttgaggccagcctggccaacgtggcgaaaccccgtgtctactaaaagtataaaaatcagctagtatgctggcgtgcacctgtaatcccagtcactcgggaggctgaggcacgagaatcgcttgaacccaggaggtggggattgcagtgagtcgagattgcacccctgcactccagcctgggtgacagagcaacaatctgtctccaaaagactgtcagagctcaactagaccttgaagatgatctcatccaaggaaggcaaacacaagacattactgttagtatccccttccctcactcactacagacatcaccaattgatcacagcacttcctctcccaagctgtgaaccccttttcaagctagcactcccagcagccattactagtctgtccaggttcacacctatgaggaaacttgtgggtcaccttgatcaagtccagtgacctcctccccaattcctactctgctattggaaaaacaggggagcagggaagagaaagcattttccccagagtcacgcaactaaaacagccagggagatgtgattgaaaaccagcccttctgcccctctatcaggggtattcctggctacaaaagtcctaggggcagggaagtagttatggaaggaaagagacaacaaccagattgaccaaatgctctctgaaagccaacccacagaattgacagaaatctaactggggaggggagaggacaggacggttctgtcctgaaggctggtgctagagactccacacagccaccccctagctgagtgatcttaaactagcaccttatcccgtgttctgccggcttcatagatgatcatggaaatctcttaccaggctctaaaccatagcaggggcggatgggcagagagcaaggccgaggggactcagagggggctgctcctcgccccagggagcagggaagacatcttcgaaggcggctcaggaagtctgttggctcttcttgggcagggcttctggagaggaggacttcagagactgaccccaccagagatcccctgcaagcagtctctttccccaactccctccctcccccgctgaggacctctctccaaaaccccaaagacagagaatagagccagatataaagagaggagacagactgagaccaggagcaagagttaggagggagcctcaaatgctggcccctgggggagaagggccactcctcttacctaggtggagttggaacaggagacccggcagcctcaccacgcctaaggaaggcagctaggaccctcagcgtgtcttcccggagccccagctcttcagagcctgccatggaggcacctgtgagagagagggttagggactggactccaagggtttagcaagaagtggaggcttggggaccaggacttgtgagtcccaaggaaggtgctgagggcctggactcctgggtcctttggagagtgtgggtctgggggcctagactcttgagtcctcagacgaaaaagcgatcaggaaaaagactcttcgatccaaggaaaggtggtggggctgggtgcccagattcgtgggtctaaaggaggagggagctggggtcctggacttctgagtcttagagaaaaaggaactggagccccagacccttaggtctcccaggaagaagaggcttagcgccccaactcctggattctataagaggcatatgccaaactcctgaaacccttaaagcatcgggaactaccaatcccaagaggtttcagggcaaatcttcccctaggtccgcgcttcttcgccgcgcagcctgctgtgaggtgtagttccaaatctccgacccctgctggaatctagaggaccctggacccttggatatcagagaagcgggactggggtgcccaccactggatcccggccccctcctcttccctcctcaccccacccctcgtcaacaccccgctgacctggtccggggccccaccgccgcctcctccactcaacttgcggtctcctccactgaactcgtacaaactttattagttcaactttcccgcgcctgcgcactgggccgggtcgataaccggcccagcgtagaaagggcggaacgctgggtgcacgctcaatttgcatgtgacgctcccagcatgcctctggccggaaacccaaaaaagggcataggggcgggaacagcccagcgggccgtcccatcggcttttgggtctgttacccaaagaatgataaagttggttttatttcaagaagtcgatcaaaaagaaagccccagcgctctagagctcagctgacgggaaagggggtgcgcagcctcgagtttgagagctacccggagctccaagacaggggtgggttccagctgcccgcacgccccgaccttccatcgtaggtaacgcggaagagcccgggagagcgttggtggcgtccgagagcgaggagcgggaaagaggatgggtctgcacggagagtggaaaggcaggctgtgtactctggggaaagtggagcaaggaaggagctacagtggccgacgctggaggtcggctgcagaaaaactagaaaaagtagggaggaaagaggaaaagaggaggcgtctacactgagggggttctagagagggaggggtggactccgtagatgggggtagttcagtctcgaaacctggggcgtgctctgtcctggaggagggaggcgggcagtcggaggggaattgaatggaagttctgtgttggaaatgttttgggagatcttctgtagggggactgtggaagggggtctacattggggtaagtgcaggaggtagaggcttacacgtgaatcgattctgcactgaaataactagggaaagaggatgctaccctgaaagtggggatacttactttcgatgatgtgggggagggaggaggtctatactggcggaattgagggagtggagggtctgcactgaagacgctggggaaggatgtgccatggatatgggaaggaaccctagctgattagagagcctctcgggaggatgggaggatgggaagaggaggtttcctgtttgtacccccgaaaatatgggtgaaggacctgtgccgtggcccgtgagaaggaggtctgggtgcggaaactccaggccaggtgggtccgggggaggccggtcgcgcccaggaaatgccctatacgcgcaggccggaccatgggaaccccaaagccacggatcctgccctggctggtgtcgcagctggacctggggcaactggagggcgtggcctgggtgaacaagagccgcacgcgcttccgcatcccttggaagcacggcctacggcaggatgcacagcaggaggatttcggaatcttccaggtgcgtgcgacgacctgggacgctggaaacccggagctgcgcgctgggcggaaaggactcctagtgggcccggctgagaaggcggaggtggcgcgcgaggggcgggctcgtgccaacgctggtgggtggggctagaacgggaggggcggggctagccggatccgctgactgatggtggggcgcaagcagggttggagctgcagggttacgggaataaaaccgggaaagccggttagtacgcaaaggaaatgcatcctgggggtttggggctttctagaggccggggctcttggttgtaggatagatactgggggatggttcttgaaacatcagaggtgaggcctggagccccaaatctgaggttcctaactaccgaattagtatatgccagaggtggtaaacagtgtgaggggcggggttatcacagagggtgtcgcggggcaggtggtgcacgggattagacaccaagttggacttggaagcctggcttagaaagaaaaggtttttgggccgggggcggtggttcacacctgtaatcctagcactttgcaaggccaaggcgggaggatcgcttgagcccaggagtttgaggccagcttgggcaacataggctccatctctttaaaaacaaaagcgaaacaaaacaaaaaccaaagaggtttcaaaggcttttgaagaggccgagcacagtagctcatgcctgtaatcccagcactttgggaggccgaggaggacggatcacctgaggtcaggagttcaagaccagcctggccaacatggtgaaaccccatctctactaaaaatacaaaaattagccaggtgtagtggtgcccacctgtaatcccagctactcaggaggctgagacaggagaatcgcttgaaccggggaggcggaagttgcagtgagctgagattgcaccattgcattccagcctgggtgacaggagtgaaactccatctcaaaaagaaaaaaagccttttgaaaactagaggtgggggatggaggtaggtgggacggggggatttggggatggaccttgcagagttagaacttgccagggaaagagggtggtgttaggactcgggagacagggttagggccccaggagcaggatctaagtcgtcctcccccaccatcctgacaccactgttg

SEQ ID NO: 846 - DNA, 6000 bp, Homo sapiens
cctgggagccacagccatggcctcacaatggcagctaaaacttgagtccaccagcttctacatggtttagagcaggggtccccaacccccctacggcttgttagggaccaggttgcacagcaggatgtgagcagcgggtgggggaatattactgcctgagctctgccttctgtgagatcagcggcagcattagattctcagaggagcacaaactctatcgaactgcgcacgtgagggatcggctgctccttaagagaatctaatgcctgatgatctgcagtggagcagtttcatcccgaaaccacacctccctgtccgtggaaatattatcttccatgagactggtccctggtgccaaatagtttgggggccactggtttagagagttcaaaacaggttctgcaggtgaggccatgggaaggagctcccggggatgaaaaactggttattgcagagatcttggaagttgcagttttttagagggccctctgggagttggagttcctgggagcaacctcttccctctgtaaggccacccctttcagccccagggactcaggtctgcaggcaccttgaccatcacgagcctcttggtccacggctggtcctggggccatgactcccccacacagaaccagagggcatagcgtggtgagcgtccgcttccttccgtgaaggtaatcagatctgggggcccaggagcctagtcagggatgagaagaggaccctctacccacccttccccgtaaacttgaatgataacccccaccacctcccctgacctaaggccctctgctgcctcgaccaggggactgcttgtttggggaaagtcccctccttccctccctccctccctcccatcagggtggggttgttggaaggccacacccccaagcccccaagcctcagcattcataacaggcccagagtagggggcccatgctcccaaggatgctcagtgaatctggagaagctggttggcattcagtcctgtctgaggctgcattgtccaattgcagccattagtcatgtaaggttatttcagtttaaattgtaaccaattaaaacgaatcacgtcctggttgcactcgcctcacctgagtgcttggcccctgtggctagtggctgctgcaccggacagtgcaggtgactgtcatttccatcatggcagaaagtgccactgcacagcgaaaccctaagggatgtagctttcctgctattggtctgttcaccatcattagttacgatgatgatgacagtggcagctaattccctgagcaggctctgtgtactgggcctgtgtctcaccccagcgctggcaggcaggtagagagaggagaccatccttggattccacgggctcagggcaaagtcctttgcctcggttatacagcgggccaagggcagccagcgtctgaattcagtcctaatcatgagttcttttttttttgttgttcgagatggagtcttactctgtcaccaggctagagtgcagtggtgcgatctcagctcactgcaatctccgcctcctgggttcaagcaattctcctgcctcagcctcccgagtagctgggattacaggcacgtgccaccacgcccgactatttttttgtatctttagtagagatggggtttcactatgttgaccaggctggtctcgaactcctgaacttgtcatctgcccacctcagcctcccaaagtgctgggactacaggcgtgagccaccgtgcccggccaatcctgagttgttaaccactgtgcaggctgctttgtactggccaggtcgaagcccctgtctcactcacctacaatgaagggccccaggtcaaacacgcctccttccttgtccttggggacctcgccatcaggcccatgcccgctgttggggagcagctcctcgctcactgcccagtatgtgtggcagtgccccagccgctgggcccagagccactgcccggcccgccagagagccagtcccccacccaggcagctcagcacatgcctcacgtagctcatcactcccctgtctgtcagggacatgccagggtctggcagtgtgactggccatccaggcagcgtcctgtctcccacttcggaccccaccagccgcaggccctccgggcaggagatggtctgctggaagacttggcggccccggtagaaggctgtcacctcgaactcccactctgagcagcggcagcagcggcatgaaggggagaggggttgagaatcaggggctgccgcccagacctcagccctcccagcctgcagctgacactcaccttcccccggcaccaacagccgcttcagtgggttctcagagggccccaggtttgggaagggagtgggattgtccaagctggggctccgcaggggctgagggcagggctcaggggctacagccaggcttgggggtcccggatctgggagtggggccaacaccatgttacccagtaactcatccagaatgtcttcctggagggaaacaaaaaaagagaatcaggcatttccatatccttttctggagacttcatatggaccaggtctgttctcagcaacgcagggaggtcaggcttgagctctgccttcaaggggcttccagcctggggacagagccagccatggcatcaacagccaaacaaacactaatgaacgccaggtgctaccattccaacccaaggatctggctctatgcaggtaagacctgggcaaagcaggctgggtagaatttcagaggggatgctcccccagcttgggcctcagcaggatcaaggtgagggagtttttcagttcccaagaggctgacagccccctgcgaatcgaaatccatgaaatcccgggaaggtgtgctcgggccttgaatgctgggtgaagacttggaattttctcctgaggagaccggggcagggacagacagggtcagcactggctcaggtgaggggcaggctggaggcaggggagtggggggatcgtctagagggagaggacaaggcccatggagacaggtcggagactgaggggcatgaaagttgggcacattctcacctgggtatcagaagtactgcctccaccattggtgtccggagaggtgtctggctgggaaaagtccccaactcctgttgagaaaagtggtgaggggagtaggagtgccaggaacccttggggccccagcctcccacacgaaccccaagctggcagacctgagttcacaaactcgtagattttatgtgggtcgtgagggtccttgctccggtcctctgctaaacgcaacccttctttgcggttgagggcagagcggaaattcctcttccaggttggcaggtctggcttatccctcccgggaacatatgcaccagtggcctcggcccaggcctggggcaacagtggtgtcaggatggtgggggaggacgacttagatcctgctcctggggccctaaccctgtctcccgagtcctaacaccaccctctttccctggcaagttctaactctgcaaggtccatccccaaatccccccgtcccacctacctccatcccccacctctagttttcaaaaggctttttttctttttgagatggagtttcactcctgtcacccaggctggaatgcaatggtgcaatctcagctcactgcaacttccgcctccccggttcaagcgattctcctgtctcagcctcctgagtagctgggattacaggtgggcaccactacacctggctaatttttgtatttttagtagagatggggtttcaccatgttggccaggctggtcttgaactcctgacctcaggtgatccgtcctcctcggcctcccaaagtgctgggattacaggcatgagctactgtgctcggcctcttcaaaagcctttgaaacctctttggtttttgttttgtttcgcttttgtttttaaagagatggagcctatgttgcccaagctggcctcaaactcctgggctcaagcgatcctcccgccttggccttgcaaagtgctaggattacaggtgtgaaccaccgcccccggcccaaaaaccttttctttctaagccaggcttccaagtccaacttggtgtctaatcccgtgcaccacctgccccgcgacaccctctgtgataaccccgcccctcacactgtttaccacctctggcatatactaattcggtagttaggaacctcagatttggggctccaggcctcacctctgatgtttcaagaaccatcccccagtatctatcctacaaccaagagccccggcctctagaaagccccaaacccccaggatgcatttcctttgcgtactaaccggctttcccggttttattcccgtaaccctgcagctccaaccctgcttgcgccccaccatcagtcagcggatccggctagccccgcccctcccgttctagccccacccaccagcgttggcacgagcccgcccctcgcgcgccacctccgccttctcagccgggcccactaggagtcctttccgcccagcgcgcagctccgggtttccagcgtcccaggtcgtcgcacgcacctggaagattccgaaatcctcctgctgtgcatcctgccgtaggccgtgcttccaagggatgcggaagcgcgtgcggctcttgttcacccaggccacgccctccagttgccccaggtccagctgcgacaccagccagggcaggatccgtggctttggggttcccatggtccggcctgcgcgtatagggcatttcctgggcgcgaccggcctcccccggacccacctggcctggagtttccgcacccagacctccttctcacgggccacggcacaggtccttcacccatattttcgggggtacaaacaggaaacctcctcttcccatcctcccatcctcccgagaggctctctaatcagctagggttccttcccatatccatggcacatccttccccagcgtcttcagtgcagaccctccactccctcaattccgccagtatagacctcctccctcccccacatcatcgaaagtaagtatccccactttcagggtagcatcctctttccctagttatttcagtgcagaatcgattcacgtgtaagcctctacctcctgcacttaccccaatgtagacccccttccacagtccccctacagaagatctcccaaaacatttccaacacagaacttccattcaattcccctccgactgcccgcctccctcctccaggacagagcacgccccaggtttcgagactgaactacccccatctacggagtccacccctccctctctagaaccccctcagtgtagacgcctcctcttttcctctttcctccctactttttctagtttttctgcagccgacctccagcgtcggccactgtagctccttccttgctccactttccccagagtacacagcctgcctttccactctccgtgcagacccatcctctttcccgctcctcgctctcggacgccaccaacgctctcccgggctcttccgcgttacctacgatggaaggtcggggcgtgcgggcagctggaacccacccctgtcttggagctccgggtagctctcaaactcgaggctgcgcaccccctttcccgtcagctgagctctagagcgctggggctttctttttgatcgacttcttgaaataaaaccaactttatcattctttgggtaacagacccaaaagccgatgggacggcccgctgggctgttcccgcccctatgcccttttttgggtttccggccagaggcatgctgggagcgtcacatgcaaattgagcgtgcacccagcgttccgccctttctacgctgggccggttatcgacccggcccagtgcgcaggcgcgggaaagttgaactaataaagtttgtacgagttcagtggaggagaccgcaagttgagtggaggaggcggcggtggggccccggaccaggtcagcggggtgttgacgaggggtggggtgaggagggaagaggagggggccgggatccagtggtgggcacccca

SEQ ID NO: 847 - DNA, 6000 bp, Homo sapiens
gttctaggccacccctcatccatattagccaatcaagccagactccagggtctctgccaaactacccccgggatagtggcctggaacgtgagtccctaagccatgccaggcccttgcctcaacagccaatcagggccaatctctactgtaactgagttaatctagccatgcccctggtgacctttcccaggggccaacctagtgtctacaacaatcttgccctctaccattcaattaatattaaaggacgatgtaccttgtccaagctccgaagccaatcagattccaggacacagccacaagccacacctcctctggtagtacattttcccctacattctaagccaggtcccttctatgctcagtaagattttagccactccccccacccccacattcattcacttacttccccagcttggccagtctcttgtggataatgtttctgatggccacaccctctgcatttaggccatgcccctctaaacaatcaattaaaacaactaatttacggtacagtactaccctaaccatacccctgtcattcaactattcttttttttttttttttttaaagacagagtctcactctgtcacccaggctggagtgcagtggcgcaatcttggctcactgcaacctccacctcctgggctcaagcgattctcctgcctcagccttctgagtagctgggattacagaagcgcaccaccacacctgtccgatttttgtatttttagtagagatggggtttcaccatgttggccaggctggtctcgaactcctgacctcaagtcatccacccaactcggcctcccaaagtgctgggattacaggcgtgagccaccacacccggcctcaacccttcattgaaaccttgtcccagcctctttccacctgaccatccaaagaaaatacagatccagcttctgatcccagtgccccaccattccgcaactcctgtccttgccaaggagtgggacagatgcccatcaccttctggttaatgacttctgcctcctcctccagcagggccaccagcctccgcagtatggcttccttctctgtcgatgggggaccctgtaattctggaggcagaagagaatttggctgggggcagaaccctgactatcctcccaccgccatccttctctggggctcctctgtgcctcacctgggctgggcggagatttcagctgctcttggaccagctgttccagccgctgggccaccaaagcatagaagtctggagtagctgggcctggggtgaaaagagttaatgacaggtttccaggacattggaaacttacggattctctccttcccccaactaccttggcaggtggcaatgattcccattttatttattatttatttatgtattgattttgggaaacggagtctcgcaattctcctgcctcagcctcatgagtagctgggactacaggcgcacgccgccatacctggctaattttttgtattttagtagaaatggggtttcaccgtgttgcccaggctgacctcaggcaatccacccacctcagcctcccaaagtgctaggattacaggcgtgagcaaccaagcctggccatgattcccattttataatggggtaaactgaggcccagtgagaaaacttggttaaaaatgccaaaacccttgtacttttcactttatgagatcctcagactggacttagaatgtcagagctggggccaggcgcagtggctcacgcctgtaatcccatcactttgggaggctgaggcaggcagatcacctgaggttgggagttcgagagcagcctgaccaacatggagaaaccccatctctactaaaaatacaaaaaaaattagccgggcatggtggcgcatgcctataatcccagctacttgggaggctgaggcaggagaattacttgaacccgggaggtagaggttgtggtgagccgagatcgggccattgcactccagcctgggcaacaagggcgaaactccgtctcaaaaaaaaaaaaaaaaaaaagaatgtcagagctgacagggtgcggtggctcacgtctgcaatctcaacattttgggaggccgacgtgggagggtcacttgaggccaggagtttgaggccagcctggccaacgtggcgaaaccccgtgtctactaaaagtataaaaatcagctagtatgctggcgtgcacctgtaatcccagtcactcgggaggctgaggcacgagaatcgcttgaacccaggaggtggggattgcagtgagtcgagattgcacccctgcactccagcctgggtgacagagcaacaatctgtctccaaaagactgtcagagctcaactagaccttgaagatgatctcatccaaggaaggcaaacacaagacattactgttagtatccccttccctcactcactacagacatcaccaattgatcacagcacttcctctcccaagctgtgaaccccttttcaagctagcactcccagcagccattactagtctgtccaggttcacacctatgaggaaacttgtgggtcaccttgatcaagtccagtgacctcctccccaattcctactctgctattggaaaaacaggggagcagggaagagaaagcattttccccagagtcacgcaactaaaacagccagggagatgtgattgaaaaccagcccttctgcccctctatcaggggtattcctggctacaaaagtcctaggggcagggaagtagttatggaaggaaagagacaacaaccagattgaccaaatgctctctgaaagccaacccacagaattgacagaaatctaactggggaggggagaggacaggacggttctgtcctgaaggctggtgctagagactccacacagccaccccctagctgagtgatcttaaactagcaccttatcccgtgttctgccggcttcatagatgatcatggaaatctcttaccaggctctaaaccatagcaggggcggatgggcagagagcaaggccgaggggactcagagggggctgctcctcgccccagggagcagggaagacatcttcgaaggcggctcaggaagtctgttggctcttcttgggcagggcttctggagaggaggacttcagagactgaccccaccagagatcccctgcaagcagtctctttccccaactccctccctcccccgctgaggacctctctccaaaaccccaaagacagagaatagagccagatataaagagaggagacagactgagaccaggagcaagagttaggagggagcctcaaatgctggcccctgggggagaagggccactcctcttacctaggtggagttggaacaggagacccggcagcctcaccacgcctaaggaaggcagctaggaccctcagcgtgtcttcccggagccccagctcttcagagcctgccatggaggcacctgtgagagagagggttagggactggactccaagggtttagcaagaagtggaggcttggggaccaggacttgtgagtcccaaggaaggtgctgagggcctggactcctgggtcctttggagagtgtgggtctgggggcctagactcttgagtcctcagacgaaaaagcgatcaggaaaaagactcttcgatccaaggaaaggtggtggggctgggtgcccagattcgtgggtctaaaggaggagggagctggggtcctggacttctgagtcttagagaaaaaggaactggagccccagacccttaggtctcccaggaagaagaggcttagcgccccaactcctggattctataagaggcatatgccaaactcctgaaacccttaaagcatcgggaactaccaatcccaagaggtttcagggcaaatcttcccctaggtccgcgcttcttcgccgcgcagcctgctgtgaggtgtagttccaaatctccgacccctgctggaatctagaggaccctggacccttggatatcagagaagcgggactggggtgcccaccactggatcccggccccctcctcttccctcctcaccccacccctcgtcaacaccccgctgacctggtccggggccccaccgccgcctcctccactcaacttgcggtctcctccactgaactcgtacaaactttattagttcaactttcccgcgcctgcgcactgggccgggtcgataaccggcccagcgtagaaagggcggaacgctgggtgcacgctcaatttgcatgtgacgctcccagcatgcctctggccggaaacccaaaaaagggcataggggcgggaacagcccagcgggccgtcccatcggcttttgggtctgttacccaaagaatgataaagttggttttatttcaagaagtcgatcaaaaagaaagccccagcgctctagagctcagctgacgggaaagggggtgcgcagcctcgagtttgagagctacccggagctccaagacaggggtgggttccagctgcccgcacgccccgaccttccatcgtaggtaacgcggaagagcccgggagagcgttggtggcgtccgagagcgaggagcgggaaagaggatgggtctgcacggagagtggaaaggcaggctgtgtactctggggaaagtggagcaaggaaggagctacagtggccgacgctggaggtcggctgcagaaaaactagaaaaagtagggaggaaagaggaaaagaggaggcgtctacactgagggggttctagagagggaggggtggactccgtagatgggggtagttcagtctcgaaacctggggcgtgctctgtcctggaggagggaggcgggcagtcggaggggaattgaatggaagttctgtgttggaaatgttttgggagatcttctgtagggggactgtggaagggggtctacattggggtaagtgcaggaggtagaggcttacacgtgaatcgattctgcactgaaataactagggaaagaggatgctaccctgaaagtggggatacttactttcgatgatgtgggggagggaggaggtctatactggcggaattgagggagtggagggtctgcactgaagacgctggggaaggatgtgccatggatatgggaaggaaccctagctgattagagagcctctcgggaggatgggaggatgggaagaggaggtttcctgtttgtacccccgaaaatatgggtgaaggacctgtgccgtggcccgtgagaaggaggtctgggtgcggaaactccaggccaggtgggtccgggggaggccggtcgcgcccaggaaatgccctatacgcgcaggccggaccatgggaaccccaaagccacggatcctgccctggctggtgtcgcagctggacctggggcaactggagggcgtggcctgggtgaacaagagccgcacgcgcttccgcatcccttggaagcacggcctacggcaggatgcacagcaggaggatttcggaatcttccaggtgcgtgcgacgacctgggacgctggaaacccggagctgcgcgctgggcggaaaggactcctagtgggcccggctgagaaggcggaggtggcgcgcgaggggcgggctcgtgccaacgctggtgggtggggctagaacgggaggggcggggctagccggatccgctgactgatggtggggcgcaagcagggttggagctgcagggttacgggaataaaaccgggaaagccggttagtacgcaaaggaaatgcatcctgggggtttggggctttctagaggccggggctcttggttgtaggatagatactgggggatggttcttgaaacatcagaggtgaggcctggagccccaaatctgaggttcctaactaccgaattagtatatgccagaggtggtaaacagtgtgaggggcggggttatcacagagggtgtcgcggggcaggtggtgcacgggattagacaccaagttggacttggaagcctggcttagaaagaaaaggtttttgggccgggggcggtggttcacacctgtaatcctagcactttgcaaggccaaggcggg

SEQ ID NO: 848 - DNA, 6000 bp, Homo sapiens
ctcccggggatgaaaaactggttattgcagagatcttggaagttgcagttttttagagggccctctgggagttggagttcctgggagcaacctcttccctctgtaaggccacccctttcagccccagggactcaggtctgcaggcaccttgaccatcacgagcctcttggtccacggctggtcctggggccatgactcccccacacagaaccagagggcatagcgtggtgagcgtccgcttccttccgtgaaggtaatcagatctgggggcccaggagcctagtcagggatgagaagaggaccctctacccacccttccccgtaaacttgaatgataacccccaccacctcccctgacctaaggccctctgctgcctcgaccaggggactgcttgtttggggaaagtcccctccttccctccctccctccctcccatcagggtggggttgttggaaggccacacccccaagcccccaagcctcagcattcataacaggcccagagtagggggcccatgctcccaaggatgctcagtgaatctggagaagctggttggcattcagtcctgtctgaggctgcattgtccaattgcagccattagtcatgtaaggttatttcagtttaaattgtaaccaattaaaacgaatcacgtcctggttgcactcgcctcacctgagtgcttggcccctgtggctagtggctgctgcaccggacagtgcaggtgactgtcatttccatcatggcagaaagtgccactgcacagcgaaaccctaagggatgtagctttcctgctattggtctgttcaccatcattagttacgatgatgatgacagtggcagctaattccctgagcaggctctgtgtactgggcctgtgtctcaccccagcgctggcaggcaggtagagagaggagaccatccttggattccacgggctcagggcaaagtcctttgcctcggttatacagcgggccaagggcagccagcgtctgaattcagtcctaatcatgagttcttttttttttgttgttcgagatggagtcttactctgtcaccaggctagagtgcagtggtgcgatctcagctcactgcaatctccgcctcctgggttcaagcaattctcctgcctcagcctcccgagtagctgggattacaggcacgtgccaccacgcccgactatttttttgtatctttagtagagatggggtttcactatgttgaccaggctggtctcgaactcctgaacttgtcatctgcccacctcagcctcccaaagtgctgggactacaggcgtgagccaccgtgcccggccaatcctgagttgttaaccactgtgcaggctgctttgtactggccaggtcgaagcccctgtctcactcacctacaatgaagggccccaggtcaaacacgcctccttccttgtccttggggacctcgccatcaggcccatgcccgctgttggggagcagctcctcgctcactgcccagtatgtgtggcagtgccccagccgctgggcccagagccactgcccggcccgccagagagccagtcccccacccaggcagctcagcacatgcctcacgtagctcatcactcccctgtctgtcagggacatgccagggtctggcagtgtgactggccatccaggcagcgtcctgtctcccacttcggaccccaccagccgcaggccctccgggcaggagatggtctgctggaagacttggcggccccggtagaaggctgtcacctcgaactcccactctgagcagcggcagcagcggcatgaaggggagaggggttgagaatcaggggctgccgcccagacctcagccctcccagcctgcagctgacactcaccttcccccggcaccaacagccgcttcagtgggttctcagagggccccaggtttgggaagggagtgggattgtccaagctggggctccgcaggggctgagggcagggctcaggggctacagccaggcttgggggtcccggatctgggagtggggccaacaccatgttacccagtaactcatccagaatgtcttcctggagggaaacaaaaaaagagaatcaggcatttccatatccttttctggagacttcatatggaccaggtctgttctcagcaacgcagggaggtcaggcttgagctctgccttcaaggggcttccagcctggggacagagccagccatggcatcaacagccaaacaaacactaatgaacgccaggtgctaccattccaacccaaggatctggctctatgcaggtaagacctgggcaaagcaggctgggtagaatttcagaggggatgctcccccagcttgggcctcagcaggatcaaggtgagggagtttttcagttcccaagaggctgacagccccctgcgaatcgaaatccatgaaatcccgggaaggtgtgctcgggccttgaatgctgggtgaagacttggaattttctcctgaggagaccggggcagggacagacagggtcagcactggctcaggtgaggggcaggctggaggcaggggagtggggggatcgtctagagggagaggacaaggcccatggagacaggtcggagactgaggggcatgaaagttgggcacattctcacctgggtatcagaagtactgcctccaccattggtgtccggagaggtgtctggctgggaaaagtccccaactcctgttgagaaaagtggtgaggggagtaggagtgccaggaacccttggggccccagcctcccacacgaaccccaagctggcagacctgagttcacaaactcgtagattttatgtgggtcgtgagggtccttgctccggtcctctgctaaacgcaacccttctttgcggttgagggcagagcggaaattcctcttccaggttggcaggtctggcttatccctcccgggaacatatgcaccagtggcctcggcccaggcctggggcaacagtggtgtcaggatggtgggggaggacgacttagatcctgctcctggggccctaaccctgtctcccgagtcctaacaccaccctctttccctggcaagttctaactctgcaaggtccatccccaaatccccccgtcccacctacctccatcccccacctctagttttcaaaaggctttttttctttttgagatggagtttcactcctgtcacccaggctggaatgcaatggtgcaatctcagctcactgcaacttccgcctccccggttcaagcgattctcctgtctcagcctcctgagtagctgggattacaggtgggcaccactacacctggctaatttttgtatttttagtagagatggggtttcaccatgttggccaggctggtcttgaactcctgacctcaggtgatccgtcctcctcggcctcccaaagtgctgggattacaggcatgagctactgtgctcggcctcttcaaaagcctttgaaacctctttggtttttgttttgtttcgcttttgtttttaaagagatggagcctatgttgcccaagctggcctcaaactcctgggctcaagcgatcctcccgccttggccttgcaaagtgctaggattacaggtgtgaaccaccgcccccggcccaaaaaccttttctttctaagccaggcttccaagtccaacttggtgtctaatcccgtgcaccacctgccccgcgacaccctctgtgataaccccgcccctcacactgtttaccacctctggcatatactaattcggtagttaggaacctcagatttggggctccaggcctcacctctgatgtttcaagaaccatcccccagtatctatcctacaaccaagagccccggcctctagaaagccccaaacccccaggatgcatttcctttgcgtactaaccggctttcccggttttattcccgtaaccctgcagctccaaccctgcttgcgccccaccatcagtcagcggatccggctagccccgcccctcccgttctagccccacccaccagcgttggcacgagcccgcccctcgcgcgccacctccgccttctcagccgggcccactaggagtcctttccgcccagcgcgcagctccgggtttccagcgtcccaggtcgtcgcacgcacctggaagattccgaaatcctcctgctgtgcatcctgccgtaggccgtgcttccaagggatgcggaagcgcgtgcggctcttgttcacccaggccacgccctccagttgccccaggtccagctgcgacaccagccagggcaggatccgtggctttggggttcccatggtccggcctgcgcgtatagggcatttcctgggcgcgaccggcctcccccggacccacctggcctggagtttccgcacccagacctccttctcacgggccacggcacaggtccttcacccatattttcgggggtacaaacaggaaacctcctcttcccatcctcccatcctcccgagaggctctctaatcagctagggttccttcccatatccatggcacatccttccccagcgtcttcagtgcagaccctccactccctcaattccgccagtatagacctcctccctcccccacatcatcgaaagtaagtatccccactttcagggtagcatcctctttccctagttatttcagtgcagaatcgattcacgtgtaagcctctacctcctgcacttaccccaatgtagacccccttccacagtccccctacagaagatctcccaaaacatttccaacacagaacttccattcaattcccctccgactgcccgcctccctcctccaggacagagcacgccccaggtttcgagactgaactacccccatctacggagtccacccctccctctctagaaccccctcagtgtagacgcctcctcttttcctctttcctccctactttttctagtttttctgcagccgacctccagcgtcggccactgtagctccttccttgctccactttccccagagtacacagcctgcctttccactctccgtgcagacccatcctctttcccgctcctcgctctcggacgccaccaacgctctcccgggctcttccgcgttacctacgatggaaggtcggggcgtgcgggcagctggaacccacccctgtcttggagctccgggtagctctcaaactcgaggctgcgcaccccctttcccgtcagctgagctctagagcgctggggctttctttttgatcgacttcttgaaataaaaccaactttatcattctttgggtaacagacccaaaagccgatgggacggcccgctgggctgttcccgcccctatgcccttttttgggtttccggccagaggcatgctgggagcgtcacatgcaaattgagcgtgcacccagcgttccgccctttctacgctgggccggttatcgacccggcccagtgcgcaggcgcgggaaagttgaactaataaagtttgtacgagttcagtggaggagaccgcaagttgagtggaggaggcggcggtggggccccggaccaggtcagcggggtgttgacgaggggtggggtgaggagggaagaggagggggccgggatccagtggtgggcaccccagtcccgcttctctgatatccaagggtccagggtcctctagattccagcaggggtcggagatttggaactacacctcacagcaggctgcgcggcgaagaagcgcggacctaggggaagatttgccctgaaacctcttgggattggtagttcccgatgctttaagggtttcaggagtttggcatatgcctcttatagaatccaggagttggggcgctaagcctcttcttcctgggagacctaagggtctggggctccagttcctttttctctaagactcagaagtccaggaccccagctccctcctcctttagacccacgaatctgggcacccagccccaccacctttccttggatcgaagagtctttttcctgatcgctttttcgtctgaggactcaagagtctaggcccccagacccacactct

SEQ ID NO: 849 - DNA, 6000 bp, Homo sapiens
gtttcacgctcacagtattagcgtacccagtcgttgacgccaggcatagtgtctgcactcatcgctgcagtcctggcatacagcaagggctcaacagaacgaacgcagtggagctgggagaatacctgaggtctgagaggaacctaagaagtccccgcccctcctctatcacatgacagttaggtaaagtgaggcccggagagagaggcttcagcggctcacccagcccccgtgggcctggatccagggcgtgaagctgtgcacgtgctccacgctgagtccggccagggtgccccccagcccggccacgcgccggctcagctccatggctagggccaggcgggccaggggctccggggaaggaggcgggggcccggggcatgctcggcttgggcgagagctgtcatcccggctacagaacagctccaccaggcgggcgaaagagtcggaggacaggcggaccagcttgctgcgcagggcggggtccgaggccagctgtagggtggaagaggcagggtccgcgtcagcagcgcccccggggccagccaatagagggccgggaggcgtggcttcccggttcaggatcgttctagatgctaaggttctaggccacccctcatccatattagccaatcaagccagactccagggtctctgccaaactacccccgggatagtggcctggaacgtgagtccctaagccatgccaggcccttgcctcaacagccaatcagggccaatctctactgtaactgagttaatctagccatgcccctggtgacctttcccaggggccaacctagtgtctacaacaatcttgccctctaccattcaattaatattaaaggacgatgtaccttgtccaagctccgaagccaatcagattccaggacacagccacaagccacacctcctctggtagtacattttcccctacattctaagccaggtcccttctatgctcagtaagattttagccactccccccacccccacattcattcacttacttccccagcttggccagtctcttgtggataatgtttctgatggccacaccctctgcatttaggccatgcccctctaaacaatcaattaaaacaactaatttacggtacagtactaccctaaccatacccctgtcattcaactattcttttttttttttttttttaaagacagagtctcactctgtcacccaggctggagtgcagtggcgcaatcttggctcactgcaacctccacctcctgggctcaagcgattctcctgcctcagccttctgagtagctgggattacagaagcgcaccaccacacctgtccgatttttgtatttttagtagagatggggtttcaccatgttggccaggctggtctcgaactcctgacctcaagtcatccacccaactcggcctcccaaagtgctgggattacaggcgtgagccaccacacccggcctcaacccttcattgaaaccttgtcccagcctctttccacctgaccatccaaagaaaatacagatccagcttctgatcccagtgccccaccattccgcaactcctgtccttgccaaggagtgggacagatgcccatcaccttctggttaatgacttctgcctcctcctccagcagggccaccagcctccgcagtatggcttccttctctgtcgatgggggaccctgtaattctggaggcagaagagaatttggctgggggcagaaccctgactatcctcccaccgccatccttctctggggctcctctgtgcctcacctgggctgggcggagatttcagctgctcttggaccagctgttccagccgctgggccaccaaagcatagaagtctggagtagctgggcctggggtgaaaagagttaatgacaggtttccaggacattggaaacttacggattctctccttcccccaactaccttggcaggtggcaatgattcccattttatttattatttatttatgtattgattttgggaaacggagtctcgcaattctcctgcctcagcctcatgagtagctgggactacaggcgcacgccgccatacctggctaattttttgtattttagtagaaatggggtttcaccgtgttgcccaggctgacctcaggcaatccacccacctcagcctcccaaagtgctaggattacaggcgtgagcaaccaagcctggccatgattcccattttataatggggtaaactgaggcccagtgagaaaacttggttaaaaatgccaaaacccttgtacttttcactttatgagatcctcagactggacttagaatgtcagagctggggccaggcgcagtggctcacgcctgtaatcccatcactttgggaggctgaggcaggcagatcacctgaggttgggagttcgagagcagcctgaccaacatggagaaaccccatctctactaaaaatacaaaaaaaattagccgggcatggtggcgcatgcctataatcccagctacttgggaggctgaggcaggagaattacttgaacccgggaggtagaggttgtggtgagccgagatcgggccattgcactccagcctgggcaacaagggcgaaactccgtctcaaaaaaaaaaaaaaaaaaaagaatgtcagagctgacagggtgcggtggctcacgtctgcaatctcaacattttgggaggccgacgtgggagggtcacttgaggccaggagtttgaggccagcctggccaacgtggcgaaaccccgtgtctactaaaagtataaaaatcagctagtatgctggcgtgcacctgtaatcccagtcactcgggaggctgaggcacgagaatcgcttgaacccaggaggtggggattgcagtgagtcgagattgcacccctgcactccagcctgggtgacagagcaacaatctgtctccaaaagactgtcagagctcaactagaccttgaagatgatctcatccaaggaaggcaaacacaagacattactgttagtatccccttccctcactcactacagacatcaccaattgatcacagcacttcctctcccaagctgtgaaccccttttcaagctagcactcccagcagccattactagtctgtccaggttcacacctatgaggaaacttgtgggtcaccttgatcaagtccagtgacctcctccccaattcctactctgctattggaaaaacaggggagcagggaagagaaagcattttccccagagtcacgcaactaaaacagccagggagatgtgattgaaaaccagcccttctgcccctctatcaggggtattcctggctacaaaagtcctaggggcagggaagtagttatggaaggaaagagacaacaaccagattgaccaaatgctctctgaaagccaacccacagaattgacagaaatctaactggggaggggagaggacaggacggttctgtcctgaaggctggtgctagagactccacacagccaccccctagctgagtgatcttaaactagcaccttatcccgtgttctgccggcttcatagatgatcatggaaatctcttaccaggctctaaaccatagcaggggcggatgggcagagagcaaggccgaggggactcagagggggctgctcctcgccccagggagcagggaagacatcttcgaaggcggctcaggaagtctgttggctcttcttgggcagggcttctggagaggaggacttcagagactgaccccaccagagatcccctgcaagcagtctctttccccaactccctccctcccccgctgaggacctctctccaaaaccccaaagacagagaatagagccagatataaagagaggagacagactgagaccaggagcaagagttaggagggagcctcaaatgctggcccctgggggagaagggccactcctcttacctaggtggagttggaacaggagacccggcagcctcaccacgcctaaggaaggcagctaggaccctcagcgtgtcttcccggagccccagctcttcagagcctgccatggaggcacctgtgagagagagggttagggactggactccaagggtttagcaagaagtggaggcttggggaccaggacttgtgagtcccaaggaaggtgctgagggcctggactcctgggtcctttggagagtgtgggtctgggggcctagactcttgagtcctcagacgaaaaagcgatcaggaaaaagactcttcgatccaaggaaaggtggtggggctgggtgcccagattcgtgggtctaaaggaggagggagctggggtcctggacttctgagtcttagagaaaaaggaactggagccccagacccttaggtctcccaggaagaagaggcttagcgccccaactcctggattctataagaggcatatgccaaactcctgaaacccttaaagcatcgggaactaccaatcccaagaggtttcagggcaaatcttcccctaggtccgcgcttcttcgccgcgcagcctgctgtgaggtgtagttccaaatctccgacccctgctggaatctagaggaccctggacccttggatatcagagaagcgggactggggtgcccaccactggatcccggccccctcctcttccctcctcaccccacccctcgtcaacaccccgctgacctggtccggggccccaccgccgcctcctccactcaacttgcggtctcctccactgaactcgtacaaactttattagttcaactttcccgcgcctgcgcactgggccgggtcgataaccggcccagcgtagaaagggcggaacgctgggtgcacgctcaatttgcatgtgacgctcccagcatgcctctggccggaaacccaaaaaagggcataggggcgggaacagcccagcgggccgtcccatcggcttttgggtctgttacccaaagaatgataaagttggttttatttcaagaagtcgatcaaaaagaaagccccagcgctctagagctcagctgacgggaaagggggtgcgcagcctcgagtttgagagctacccggagctccaagacaggggtgggttccagctgcccgcacgccccgaccttccatcgtaggtaacgcggaagagcccgggagagcgttggtggcgtccgagagcgaggagcgggaaagaggatgggtctgcacggagagtggaaaggcaggctgtgtactctggggaaagtggagcaaggaaggagctacagtggccgacgctggaggtcggctgcagaaaaactagaaaaagtagggaggaaagaggaaaagaggaggcgtctacactgagggggttctagagagggaggggtggactccgtagatgggggtagttcagtctcgaaacctggggcgtgctctgtcctggaggagggaggcgggcagtcggaggggaattgaatggaagttctgtgttggaaatgttttgggagatcttctgtagggggactgtggaagggggtctacattggggtaagtgcaggaggtagaggcttacacgtgaatcgattctgcactgaaataactagggaaagaggatgctaccctgaaagtggggatacttactttcgatgatgtgggggagggaggaggtctatactggcggaattgagggagtggagggtctgcactgaagacgctggggaaggatgtgccatggatatgggaaggaaccctagctgattagagagcctctcgggaggatgggaggatgggaagaggaggtttcctgtttgtacccccgaaaatatgggtgaaggacctgtgccgtggcccgtgagaaggaggtctgggtgcggaaactccaggccaggtgggtccgggggaggccggtcgcgcccaggaaatgccctatacgcgcaggccggaccatgggaaccccaaagccacggatcctgccctggctggtgtcgcagctggacctggggcaactggagggcgtggcctgggtgaacaagagccgcacgcgcttccgcatcccttggaagcacggcctacg

SEQ ID NO: 850 - DNA, 6000 bp, Homo sapiens
gggtggggttgttggaaggccacacccccaagcccccaagcctcagcattcataacaggcccagagtagggggcccatgctcccaaggatgctcagtgaatctggagaagctggttggcattcagtcctgtctgaggctgcattgtccaattgcagccattagtcatgtaaggttatttcagtttaaattgtaaccaattaaaacgaatcacgtcctggttgcactcgcctcacctgagtgcttggcccctgtggctagtggctgctgcaccggacagtgcaggtgactgtcatttccatcatggcagaaagtgccactgcacagcgaaaccctaagggatgtagctttcctgctattggtctgttcaccatcattagttacgatgatgatgacagtggcagctaattccctgagcaggctctgtgtactgggcctgtgtctcaccccagcgctggcaggcaggtagagagaggagaccatccttggattccacgggctcagggcaaagtcctttgcctcggttatacagcgggccaagggcagccagcgtctgaattcagtcctaatcatgagttcttttttttttgttgttcgagatggagtcttactctgtcaccaggctagagtgcagtggtgcgatctcagctcactgcaatctccgcctcctgggttcaagcaattctcctgcctcagcctcccgagtagctgggattacaggcacgtgccaccacgcccgactatttttttgtatctttagtagagatggggtttcactatgttgaccaggctggtctcgaactcctgaacttgtcatctgcccacctcagcctcccaaagtgctgggactacaggcgtgagccaccgtgcccggccaatcctgagttgttaaccactgtgcaggctgctttgtactggccaggtcgaagcccctgtctcactcacctacaatgaagggccccaggtcaaacacgcctccttccttgtccttggggacctcgccatcaggcccatgcccgctgttggggagcagctcctcgctcactgcccagtatgtgtggcagtgccccagccgctgggcccagagccactgcccggcccgccagagagccagtcccccacccaggcagctcagcacatgcctcacgtagctcatcactcccctgtctgtcagggacatgccagggtctggcagtgtgactggccatccaggcagcgtcctgtctcccacttcggaccccaccagccgcaggccctccgggcaggagatggtctgctggaagacttggcggccccggtagaaggctgtcacctcgaactcccactctgagcagcggcagcagcggcatgaaggggagaggggttgagaatcaggggctgccgcccagacctcagccctcccagcctgcagctgacactcaccttcccccggcaccaacagccgcttcagtgggttctcagagggccccaggtttgggaagggagtgggattgtccaagctggggctccgcaggggctgagggcagggctcaggggctacagccaggcttgggggtcccggatctgggagtggggccaacaccatgttacccagtaactcatccagaatgtcttcctggagggaaacaaaaaaagagaatcaggcatttccatatccttttctggagacttcatatggaccaggtctgttctcagcaacgcagggaggtcaggcttgagctctgccttcaaggggcttccagcctggggacagagccagccatggcatcaacagccaaacaaacactaatgaacgccaggtgctaccattccaacccaaggatctggctctatgcaggtaagacctgggcaaagcaggctgggtagaatttcagaggggatgctcccccagcttgggcctcagcaggatcaaggtgagggagtttttcagttcccaagaggctgacagccccctgcgaatcgaaatccatgaaatcccgggaaggtgtgctcgggccttgaatgctgggtgaagacttggaattttctcctgaggagaccggggcagggacagacagggtcagcactggctcaggtgaggggcaggctggaggcaggggagtggggggatcgtctagagggagaggacaaggcccatggagacaggtcggagactgaggggcatgaaagttgggcacattctcacctgggtatcagaagtactgcctccaccattggtgtccggagaggtgtctggctgggaaaagtccccaactcctgttgagaaaagtggtgaggggagtaggagtgccaggaacccttggggccccagcctcccacacgaaccccaagctggcagacctgagttcacaaactcgtagattttatgtgggtcgtgagggtccttgctccggtcctctgctaaacgcaacccttctttgcggttgagggcagagcggaaattcctcttccaggttggcaggtctggcttatccctcccgggaacatatgcaccagtggcctcggcccaggcctggggcaacagtggtgtcaggatggtgggggaggacgacttagatcctgctcctggggccctaaccctgtctcccgagtcctaacaccaccctctttccctggcaagttctaactctgcaaggtccatccccaaatccccccgtcccacctacctccatcccccacctctagttttcaaaaggctttttttctttttgagatggagtttcactcctgtcacccaggctggaatgcaatggtgcaatctcagctcactgcaacttccgcctccccggttcaagcgattctcctgtctcagcctcctgagtagctgggattacaggtgggcaccactacacctggctaatttttgtatttttagtagagatggggtttcaccatgttggccaggctggtcttgaactcctgacctcaggtgatccgtcctcctcggcctcccaaagtgctgggattacaggcatgagctactgtgctcggcctcttcaaaagcctttgaaacctctttggtttttgttttgtttcgcttttgtttttaaagagatggagcctatgttgcccaagctggcctcaaactcctgggctcaagcgatcctcccgccttggccttgcaaagtgctaggattacaggtgtgaaccaccgcccccggcccaaaaaccttttctttctaagccaggcttccaagtccaacttggtgtctaatcccgtgcaccacctgccccgcgacaccctctgtgataaccccgcccctcacactgtttaccacctctggcatatactaattcggtagttaggaacctcagatttggggctccaggcctcacctctgatgtttcaagaaccatcccccagtatctatcctacaaccaagagccccggcctctagaaagccccaaacccccaggatgcatttcctttgcgtactaaccggctttcccggttttattcccgtaaccctgcagctccaaccctgcttgcgccccaccatcagtcagcggatccggctagccccgcccctcccgttctagccccacccaccagcgttggcacgagcccgcccctcgcgcgccacctccgccttctcagccgggcccactaggagtcctttccgcccagcgcgcagctccgggtttccagcgtcccaggtcgtcgcacgcacctggaagattccgaaatcctcctgctgtgcatcctgccgtaggccgtgcttccaagggatgcggaagcgcgtgcggctcttgttcacccaggccacgccctccagttgccccaggtccagctgcgacaccagccagggcaggatccgtggctttggggttcccatggtccggcctgcgcgtatagggcatttcctgggcgcgaccggcctcccccggacccacctggcctggagtttccgcacccagacctccttctcacgggccacggcacaggtccttcacccatattttcgggggtacaaacaggaaacctcctcttcccatcctcccatcctcccgagaggctctctaatcagctagggttccttcccatatccatggcacatccttccccagcgtcttcagtgcagaccctccactccctcaattccgccagtatagacctcctccctcccccacatcatcgaaagtaagtatccccactttcagggtagcatcctctttccctagttatttcagtgcagaatcgattcacgtgtaagcctctacctcctgcacttaccccaatgtagacccccttccacagtccccctacagaagatctcccaaaacatttccaacacagaacttccattcaattcccctccgactgcccgcctccctcctccaggacagagcacgccccaggtttcgagactgaactacccccatctacggagtccacccctccctctctagaaccccctcagtgtagacgcctcctcttttcctctttcctccctactttttctagtttttctgcagccgacctccagcgtcggccactgtagctccttccttgctccactttccccagagtacacagcctgcctttccactctccgtgcagacccatcctctttcccgctcctcgctctcggacgccaccaacgctctcccgggctcttccgcgttacctacgatggaaggtcggggcgtgcgggcagctggaacccacccctgtcttggagctccgggtagctctcaaactcgaggctgcgcaccccctttcccgtcagctgagctctagagcgctggggctttctttttgatcgacttcttgaaataaaaccaactttatcattctttgggtaacagacccaaaagccgatgggacggcccgctgggctgttcccgcccctatgcccttttttgggtttccggccagaggcatgctgggagcgtcacatgcaaattgagcgtgcacccagcgttccgccctttctacgctgggccggttatcgacccggcccagtgcgcaggcgcgggaaagttgaactaataaagtttgtacgagttcagtggaggagaccgcaagttgagtggaggaggcggcggtggggccccggaccaggtcagcggggtgttgacgaggggtggggtgaggagggaagaggagggggccgggatccagtggtgggcaccccagtcccgcttctctgatatccaagggtccagggtcctctagattccagcaggggtcggagatttggaactacacctcacagcaggctgcgcggcgaagaagcgcggacctaggggaagatttgccctgaaacctcttgggattggtagttcccgatgctttaagggtttcaggagtttggcatatgcctcttatagaatccaggagttggggcgctaagcctcttcttcctgggagacctaagggtctggggctccagttcctttttctctaagactcagaagtccaggaccccagctccctcctcctttagacccacgaatctgggcacccagccccaccacctttccttggatcgaagagtctttttcctgatcgctttttcgtctgaggactcaagagtctaggcccccagacccacactctccaaaggacccaggagtccaggccctcagcaccttccttgggactcacaagtcctggtccccaagcctccacttcttgctaaacccttggagtccagtccctaaccctctctctcacaggtgcctccatggcaggctctgaagagctggggctccgggaagacacgctgagggtcctagctgccttccttaggcgtggtgaggctgccgggtctcctgttccaactccacctaggtaagaggagtggcccttctcccccaggggccagcatttgaggctccctcctaactcttgctcctggtctcagtctgtctcctctctttatatctggctctattctctgtctttggggttttggagagaggtcctcagcgggggagggagggagttggggaaagagactgcttgcaggggatctctggtggggtcagtctctgaa

SEQ ID NO: 851 - DNA, 6000 bp, Homo sapiens
tgaaagtttccataataaaacacttctgagaaagggggacctgcctttcacagcctcccagctgctctgaccccaatatcaggaacttggcatctctgatctaacaagggcaccactaacaaggacaaagccaccatcattcaccttgattccgcacatgcccaacgatgacttctgtcctgggctaaccataaaggccatgggtgctgagagagccccccagaggcagccatgcagtgagtgcccccacccggggccctgggatgttctggaaacaggaaggagggttccatgggaagggggaccctgtcctggggtcaggccaaagattgggggactcactaattctgtcctccgatccctgagtcccttccccaatctgggcctggaccccctgactcccacccaggtcccaggtcatcccctgggcaggccctgcccacccaagccttggtgaaagttttgtgtttgttttgttttgttttgtttttgagacagagtctcgctctgtagcccaggctggagtggaatggcgcggtctcggctcaccgcaacctctgcctcccaggctcgagcgattctcccgcctcaggatcctgagtagctgggattacagatgcccgccaccacgcccggctaatttttttgtatttttagtagagacagggtttcaccatgttggccaggctggtctcgaactcctgatctcgtgatctgcccgcccacctcggcctcccaaagtgctgtgatgacaggagtgagccaccgcgtctggccaatgaaacttttaatactgaccacttagggtctttggacagactcagagaagagaatgcgtatatacgtaaggcaggggcccggtccccagcacatctgtgcagccctcatcagcatcagctgccctgatgggccacgaggcccccagtggggccagggccaggtgtctggctgctgtatagacatgacctaaacctcatcgaaaccatcattgtggttctagaagtcaaccaaataaggtaggatttgccccaccaaagaccattatctgggaggattaaccttattttccagaaactccatcaaaaaaccagaatacccccaaaccagctgaagtcaacagatacttgactgggcctttcctcccctccgctccctccacctgcccctcccctccctcctgtctcccactcacctatccaaactgcttttccctaattccaccctcatccctaaacctaatttaacctgaacaccaatctccttagtattatcagaaatgattctggaggctgggcatggtggctcacacttgtaatcccagcactttgggaggcccaggtgggtggatcacctgaggtcaggacttcaagaccagcctgtccaacatggagaaaccccgtctctactaaaaatataaaaattagctgagcgtggtggtgcgcgcacctgtaatcccagctactggggaggctgaggcaggagaatcacttgaacccaggaggcagaggccacagtgaactgagatcacaccactgtactccagcctgggcgacagagcattctggaaaggcatcaatcctgaaccagctgacttgcgccctctgctcttcactgggggcacctggcctgtctgatgtattgcttcaaactaacattaattgggatttttttttctttaattacaaaagtaatacatgctgaatgaagatgatgtgaaatgcacaaaaaagctcaaaggggccgggcatagtggctcatgcttgtaatcccagcactctgggaggccaaggcaggtagatcacctgagcccaggagtttgagaccaggctgggcaacatagcaaggccccgtcgctatgaaaaagtacaaaaatttagctgtgcatggtggtgtgcacctgtggtcccagctactcgagagactgaggctggaggatcgcttaagcccaggagttcaagaccagcctgggcagcataacaaaatcccatctctacaaacagcacagaaattagccaggtgtggccgggcgaggtggctcacgcctgtaatcccaggactttgggaggccgaggcgggcagatcacaaagtcaggagattgagaccatcctggctaacacggtgaaatctcatctctactaaaaatacaaaaattagccggacgtggtggcaggtgcctgtagtcccagctactctggaggctgaggcaggagaatggcgtgaacccaggaggtggagcttgcagtgagccaagatagcgccactacactccagcctgggtgacagagtgagactccgtctcaattaaaaaaaacaaaaaaaacaaaaaacaggtgtggtagtgcactcctgtagtcccagctactagggaggctgaggtgggaggattgcttgagcccgggaggttgaggctgcagtgagccgagattgtgccactgtgctctagcctgagtgacacagcaagaccccatctctcaaaacaacaacaacaaccacccagaagtcccccaaggtgagctgcacatatgcctggggccagaggagttttgtgcaacaaccctctgtgataaggacaaggggattggtgcagggccccacccactctggggacccaaaaactcctgggacatgccctgggagccagttggctgtgggcctccacacctttccatggttgtttccactgttatgcggctgtaggactgaacaagctattgggcaggggccggggacctggggcccacccgacctggtgaggaatgccagcactgccattccccactgtgggacccaggtcgaggcacaggcgaataaggccccaatcccgccgcgttcatacttgacatgtcgctgtgaatgaaactctgagacctaggccaagccttttcccctctctgtgccccagggtcctcctgtcccaccctctcgccatctccaagcctcagtttcctcaactatcaaatgcaggcattgttgttggttttttgtttgtttgtttgtttgtttttgagacggagtctcactctgtcccccaggctggagtgcagcggtgcaatctcggctcactgcaacctctgcctcccgggttcaagcgattctcctgcctcagtgtcccgagtagttgggattacaggtgtgcaccaccacgcctggctaattttttatatttttggtagagacagggtttcatcattttggccaggttggtcttgaactcctgacctcaagtgatccgcccacctcagcctcccaaagtgctgggattacaggcgtaagccactgtgcctggcctcaaatgcaggcattgtgaggcttacgatgggtgcaaagccctgagcaccaggcggcctccaaggcaggtgatcgccatgggaacatttttgtcactatttttttcttttttagagaaagggtttcgccatcttggccaggctggtctcgagcccctgggctcaagcaatcctcccacctcggcctcccaaagtgctaggattacagcagtgagcctccgcacccggccctcattactattttttatttttattttttattttttgagatggagtctggctctgtcacccaggctagagtgcagtggcacgatctcagctcactgcaacctccacctcttgggttcaagcaattctcctgtcccagcctcctgagtagttgggactacaggcgtatgccaccatgcccggctaatttttatatttttagtagagacgaggttttgccatgttggccaggctggtcttgaactcctgacatcaggtgatccgcctgcctcgacctcccaaagtgctgggattataggcgtgagccacccctggccctcgtcactatttttgctgacccaagctctttcggtccctgaactctccagctctttgatcatttccctttgccacggcctcccgcccctgcgtcacatgccttgttactcacattcaccccccagcccctcccggccataaccgcatccctctttgatttactgcgggagtttcccatcttccttcttgttaatgccctccaacccccacccaacccttgctgcagagaatctgcctccctctggttttcctcctcacggagcccctggctccctctcccccaccccaaggaaagtccctgctattgtttctccacccccacccactccaaggtgccgccccactccctgccctgagcactgaggtggttcttaaagcagggatgggtgaagcctgggcgcttccctctgccgggtggtcactcatagaacccctgagtgcccctgcggccacagcagctggcatttccaaaggagcagcttccagtactaccccaggttccggccacagaacttaacctggattcactcacttgatcctaaaacactgtgacgtctgtagacgtcatttgacagctgtagacgagagccacagaggggagggcgggctcagagcccacgtcctgaccccgggaccacggctgccagccccactgctacacccatgtaacggagggggagactgaggctctgggtggcaagtggagagggaagtggaaccatggggggccctgcaggacatggcgacacctgacggagagggacttggaggggaaagttggcctggcccagggacctgtagcccctctgtccccgtgggaatcaaggaggcagagagagtgcaggggaggatagaaacaagtggcctggtgatcagggacgggggcaaaccgaaggggattccccgttgttggcacggttacctgagcatctatttctggcctccaaaccaccccagaactatctggggcaaaaggaagtgaatagactgattaacttcctccaaccccctttctccaacctcaactagactctgagcattggaccagagcagctccaggaaaccagtttcatttccctcggccagtttcccaaaaggaggggtgggcggggctctgccagtttaaggggagagaaagggccacagcagagacagtggagggcagtggagaggaccgcgctgtcctgctgtcaccaagagctggaggtagtgacacggccagtggtggggggacagagagacaggacccacagaaatagggactgagaagcagtcaggagctggggagatgaggaagagggaaaagaggccgggcgcgggggctcatgcctggaatcccagcactttgggaggccgaggtgggtggatcacctaaggtcaggagttcgagaccagcctggccaacatggcgaaaccccgtctctactaaaaatacaaaaattagccaggtttggttatgggtgtctgtaatcccagttacttgggaggctgaagtgggaggattcttgaacctgggaggcggaggttgcagtgagccaagatcttaccactgcactccagcctggatggcagagaaagactgttaaaaaaaaaagaaagaaaggaaagaaagagggaaaagaagagaaagagacaggaacccgagagagctgtggcagaggtggagaccggtgaggagggaggcagggacggtccaggggactctgaaggaatggggttaggggacacaggtccagagagcaggacagtgactgggggagggccggctctagcagctgggcagcccatgggagacagagtcaggctacagtggtcacaggcctcagtcacaacagccctcccttctcctccaccccagacaccatctcccaccgagagtcatggccccattgggtgagtaagcaggggaggggctctggaacaagtgagtagaacccctctcccccgacctgccacaaccccgttgaccctgtcctcctcctcccagccctgcacctcctcgtcctcgtccccatcctcctcagcctggtggcctcccaggactggaaggctgaacgcagccaagaccccttcgagaaatgcatgcaggatcctgactatgagcagctgctcaaggtggtgacctgggggctcaatcggaccctgaagccccagagggtgattgtg

SEQ ID NO: 852 - DNA, 6000 bp, Homo sapiens
aactacagatggtcacagccacccagccctgagcacaggcccaggcataccctcctcctttccctggaaatgcaacactccctcagtttgggttcctccctgcttcctccaccgccaccagcaccatcagcttctttggtaaggaaactctcccctttggcaaatgtggtaattccgggatcagagctcgtaatagtttgcatttgtgagaaacttcccaagttctagtatttgtggctttttgttttttgttttttgcctcaaactcctgggcttaagcaatcctcctgccttggcctccgaaagtactgggattacaggtgtgagccatcatgcctggcctgtcactgttaacctggacagaccctgtggttttggtgcaaatttaacactttgctcaaattgtgatgctgtcctctctgagttccagttcgggcctcaggctcttggcctggaccttctcccagtcttctctaagccacctggcctccagcctctacccctacggttcatcccccacacccataaagtccgcctgtggctccctcaatataacgcccgaaccgttagcatggtatgtatgggtctgccagattctcccgcctgtcacgtggcccacagtccccaagaccaccctgcggctcagtgatgagctaagactcacagagctcagcaaagctttctactcacagtcacggtcacggtttattatggagaaatgatacagactgaaaacagcaaaggggagagatgcaaaagccccaagggagaccaggcacgagcttccagctctcctctgcaggtagagagagtcccgcggacagtgctcagttctccctgcaacagcgtgtggtaacgcttacggagcagtggcggcccgggttgtggggaggacatggcgcacccgtgtggctgaactgaggtctgctgactccagcccctccagaggtcgtgctgatactgtatgacccaaagcccccactctaggtcacagcgtcaacatggactctctagagtggcctggggccccaggtaaacaaaggcgctcttatctggcagcacatttcaagaacatagagattctcctggagctggtcaagggccattttctctctttggaatgtgcagatttgaacagcccaggcttgccaagtcactccttcacacataaacatctcccttcagaagcaccagatcacttagcacccagaggcatgtctgctgtgtgggcctccctgtcttcacacaggcctttcctcccgcgtggacggcgcctctcccccgccatcctttccctggctgatgctgcatctgcaacgctcagcttctccctggaacctgctcccacagcatgtggcccggccctgtgcctgccctgagccctggttgtagagctgacatttgactctggctgccttgagggcagggaccgtggcttaaccagccactctgggcttcactttcctcatttgtcaagtggatctgccccaaagtttgctttgaggaaacggtgagtaatggtaggtctcctttctttcttttttagatggggtctcactctgttgcccaggctggagtgagtggcacaatcacagctcactgcagcctccacctccctgggctccagtgatcctcccatctcagcctcccaggtagctgcgactacaggcgcctgccaccacggccaactcatttttgtgttttttgtgtagagacagcatctcgctatgttggccaggctgttctcgagttcctgggctcaagcgatccccccacctcagcctcccaaagtgctgggattacaggcgtgagccacctcacctggccatatctaaactgcgtggatcagggctggatcagtatgggttcaccattgtgaatagatccctggcacctgagtattggaaaccaatgtggcacttaataaatggtgaactgttggccgggcgcagtggctcatgcctgtaatcccaacactttgggaggccgaggcaagcggatcacctgaggtcaggagttcaagaccagcctggccaacatggagaaaccccatctctactaaaaatacaaaaattagccgggcgtggtggcatgcgcctgtaatcccagctacttggaagctgaggcgagagaatcgcttgaacccgggaagcggaggttgcagtgagccgagatcatgccattccactccagcctgggcaacagagcgagactcccgtctcaaaaaaaaaaaaaaaaaaaaggtgaactgttaagccagacaagtccccatagaagattgttttccttgtagttttttcatagttgcaaagagctttttataaatgctcttcttggaaattttagctacaacttattaatagcaaaagcttttttaagctgagttcttgagaactgagatgtgtaggtgtagctgctcagatgcctttagctgccagtaacaacacaccggcttgaggtggctcagcagtgaggacttttgttctgtcccacaacgggaggaatggatgtaggccgggccaggccccagcagtcctgggggctcaggcacttgccgtggcctcttgaagagacctttctcagaatcccccaggaaagctttatgaaaatgccagggccacagcatcccagccccggagagactggcttagtggagctaacagccttgtgtattttgaatgctcccagtcagtagtgatggacgcccattgagatctactggcttagacaaggcagagcgtgtgcagctggccctggggtcatctccccaggcttgcttggctgtgtggagaaggaggagcagacgaaacaaaacttaggggcctgtgaggaagcagaagggtgcagtggaaggggtgggggtagtgagataggttgcctcttactcaagctggaaggggatttcctgaggacagacaccaagcaatttaaaaactggcctggagagagggaagaggaaacagacctcgtgggtgtttctctgggtcaggcacttggcttctcagtcttgactttgattattcttttgtttttttgagacagggcctccctctttccatttccagcttttagagctgcttctgccttccttggctcctggctttctcacatcttcagattccaaagcgcatcactccagtctgctcgtgtcaccacaagctttcttcccttctccagtcagtcaaatccgtcttctaaggatactgctgatcatctttagggctcacgcctgtagtcctggcactttgagaggacaaagagggaggatcgcttgagcccaggagttgaagaccagggcaacagagtgagatcccatttccacaaaaaataaaaaagattatccacgcatggtggcatgcacctgtagtcctagctactctgggaggctgaggtgggaggatcacttgggtccaggaggttgaggctgcagtgagttgtgatcatgtcactgcattccagctagtatgacagaaaaaaaccctttcccaaaagaaaaagaaaccacccctattcagcactccctctcaccctttcctcaccaggtaacctttgaccttcctgctgatagatggcaccactgggagatttttcagttagacattaccaaaatcaagtcagtttgaactgaatggaaatactgtggcccatgggtcttctggggtgctctttatccctcccccacccccacccccacccatctctggtggggctcatggtctcccgtgatgtcccagtgtctgcagatggttgagaaggtgtccaagggaggcccaggtgcaatcctccacaccacacctacaggtgaaggaggcagctgccttccaagcctggagaaaaccccaggggaggctccgattgcctggctcaggtctcagtttatccttgagccaatcactgcagccaggggcatctgtgctctgagcacatgggtttcagaccctcccctgagttaggaggaggagttccagtgtcctctcctgctcttagagagtgcaggtgtgggcctggggggccttcagcaacccagaccctgccatccagcctgggttcccggccccatctctctctctgaggtccagagaggccctcagggtggcaagagctgatccgctcacaccctgctagagtcagccagggaacctcactgggtcccacgctgggagcaggtcctacagctgttcttgtgtgtcctagtcccgcttgtggcagtgcctcaaatctgatctcctcaggctgaggtgggtccaaggtcctgttctcccgcctcgtcctccacagagtgggagctttccactgggctgaacatggccacgcacgtccctagcaccccggctcctcgtacctgacccctggggcgtgcttttgtgcttctggatccttctcgatgtagcagagcctagtttaggttacacagcatgcatcattatcccatcccaccaccctccaaaccgactgtgcccagtcatgccactgagcttgcctttccaaaactgccatctgacaatgtcacttcctctgctttagaaatcttcccaaggctgcagacaccgacggatttgctttgggagccagagtagctgccgccaccagagtccggagccatgagcgggtttaattttggaggcactggggcccctacaggcgggttcacgtttggcactgcaaagacggcaacaaccacacctgctacagggttttctttctccacctctggcactggagggtttaattttggggctcccttccaaccagccacaagtaccccttccaccggcctgttctcacttgccacccagactccggccacacagacgacaggcttcacttttggaacagcgactcttgcttcggggggaactggattttctttggggatcggtgcttcaaagctcaacttgagcaacacagctgccaccccagccatggcaaaccccagcggctttgggctgggcagcagcaacctcactaatgccatatcgagcaccgtcacctccagccagggcacagcacccaccggctttgtgtttggcccctccaccacctctgtggctccagctaccacatctggaggcttctcattcactggtggaagcacggcccaaccctccggtttcaacattggctcagcagggaattcagcccagcccacggcacctgccacgttgcccttcactccggccacgccagcagccaccacagcaggtgccacacagccagctgctcccacacccacagccaccatcaccagcactgggcccagcctctttgcgtcaatagcaactgctccaacctcatctgccaccactggactctccctctgtacccctgtgaccacagcgggcgcccccactgctgggacacagggcttcagcttaaaggcacctggagcagcttccggcacctccacaacaacatccaccgctgccaccgccaccgccaccaccaccagcagcagcagcaccaccggctttgccttgaatttaaaaccactggcgccagccgggatccccagcaatacagcagctgccgtgaccgctccacctggccctggcgcagctgcaggggcggctgccagctccgccatgacctacgcgcagctggagagcctgatcaacaaatggagcctggagctagaggaccaggagcggcacttcctccagcaggccacccaggtcaacgcctgggaccgcacgctgatcgagaatggagaaaagatcaccagcctgcaccgcgaggtggagaaggtgaagctggaccagaagaggctggaccaggagctcgacttcatcctgtcccagcagaaggagctggaagacctgctgagcccactggaggagttggtcaaggagcagagcgggaccatctacctgcagcacgcggatgaggagcgtgagaaaacctacaagctggctgagaacatcgatgcacagctcaagcgcatggcccaggatctcaaggacatcatcgagcacctgaacacgtccggggcccccgccgaca

SEQ ID NO: 853 - DNA, 6000 bp, Homo sapiens
ttttcacaaccccccttacctctcgggacctcagtcttgactcctgctaacaagcctctgtgatctgaggccccttcttggcaccgagcctcagattctcagggtcctgcacgggtggctgatctccctccctctccacaccacccctactcttgctgtgcgggggttctcccttatccaaggctctgctaaccgggagcggttgccaggtgtgctggggtccccagagaatccccgaactccccgtccccgtcaaacagccagggctgatgcaacctgcctgcaaccaccgcctcactccccaagccaggcccctccgcaccgaaaaagagtccccagtagccccacccttgcttcaagccccagctcaggagttgaaggggagctcgaggctgggggaggccaggacatgagtcctgaaggggccacaggcctgggtcaggaatgtgcacacgaggggactcagggttcgaagatctggggagaagggtcgcaggcaaccactgatgaccggctatgaactagaacaggctgggaggggctggagagctaagggtgccaactggcacccactcaccctgagtccagctgctaagtctggctgggctgaagtgggtgggacccaatagctagagagaaaaggcggcaaaacggtggggaggggaagcagagtccctgcccagacacctctgcagccagcataaaccgcacatagccagcaatgcaattctcctactgaccaagctattaaaaattacccacaccgggccaggcgcggtggttcacgcctgtaataccagcactttgggaggctgaggcgggtggatcgcctgagttcgggagttcgagaccagcctgaccaacatggagaaaccccgtctctactaaaaatacaaaattagccatgtgtggtgacacatgcctgtaatcctagctactcgggaggctgaggcaggagaatctcttgaacccaggaggcagaggttgcggtgagccgagatggcaccattgcactccagcctgggcaacaagagtgaaactccgtctcaaaaaaccaaaaaaattaaaaaacaaaacaaaacaaaaaacccaggccgggcacagtggctcaggcttgtaatcctaacactttgggagggtgaggcaggaggatcgtttgagcccaggaatcaggaattcaagaccagcctgggcaacatagtaagaccctcccccccatctctactaaaaaaagccaaaaaaaaaaaaaaatagcatcctacctggccatcctctcaatatcccgcaatcccagtctgagacaaaaccaaatggaagcacattccataaaatacccaaccagcatttttccaaactgtcaaggtcatgaaggacaaggaaagtctaaaaccagtcacaggccagaggaggctgcggagccatgatgcctaaatataacgtggcatcctgaaggcatccggaaggagcagaaagggcattaagtaacaactaccaaaatcagcatcaagtgtggtcagaatcaagaatggcatttggtcaatggtaacatactgatgttgccttggttgtgacaaatgtggcaaagtaatgtaaaatgttaatggaaaaaaccaagtgaggggcatacagaaattctccgtattatctttgcaacttttctgttgagtcaatctacaattattccaaaataaaaaattttatttaaaaaataacccccttgggtacggtggctcacacctgtaatcccagcactttgggaggctgaggcaggcagatcacgaggtcatgagttcgagaccagcctgaccaacatggtgaaaccctgtatctactaaaaatataaaaattagccaggcatgatggtgcatgtctgtaatcccagctactctggagcctgaagcaggagaatggcttgaacctgggaggcggtggttgcagtgagctgtgacggtgccactgcactccagcctgggcaacagagcgagactctgtctcaaaaaaaaaaaaaaaaaaaaaagctaggtcttgcttaagactgggtgtggtggctcatgcctgtaaatcccagcattttgggaggccgaggtgggtggatcacctgaagtcaggagttcaagaccagcctggccaacatggcaaaaccccgtctctactaaaaatacaaaaattagccaggcgtggtggtgggcgcctgtaatcccagctacttggaaggctgaggcaggagaattgcttgaatctgggaagtggaggttgaagtgagccaagatcatgccactgcactccagcctgggcgacacagcaagactctgtctcaaaaaaaccaaaccaaaccaaaccaaacccagtccccatgtacaatctagaagatcttcgtaggaaaagattctaccggcggggcgggggagatagggcacgtctgtgcgtccttaccactggcagtctgcccaacagtctacccttaattccatctgcttttgttcaaaaatctatacagcaatggaatgagaacacatccaccttaattacagcaataacaataaccacttttatgcagcacctactgtgtcccaggcgttagtctaactgctcgacacggattaactcatttaatccttgtaacagccctaagaagtaggtacttttttttttttttttttgagacgaggtctcactctgtcacccaggctgcagtgtggtggcacaatctcggcttactgcaacctccgccccaccccagggttcaagtgatcctcctgccttagcctcatgagtagctgggaccacaggtgcaaaccaccacacccgactatttttttgtatttttggtagagacagggtttcaccatgttgcccaggctggtctcgaattcctgagatcaagcaatctgcccacctcagcctcccagggtggtgggactacaggcatgagccaccgtgcctggtccagaggtaggtattcttaatgccacttcgtaccacaggggaaactgaggcacagggaagggaaatggccagggtcacacagctagtaagaggggtgcagtcaagttttgaactcatataatctggctccagagtctatgccaggtatgtataaaatttggcttcctggggccacattgaagaattgtcttaggccacacataacatacactattgatagctgatgaacttaaaaaaaaatcgcaaaaaattcgcatgttttggtaaggtttacaaatttgtgttaggctgcattcaaagctgttctaggccgcatgcaggcccacgggtgggacaagctcagtctatgctcttagctgctactctgtatactgcctcagtgataacacagcccctataggcccaagaaaatatagggcaagtgctcaaaaactggcagagtggacagtaagtgctctaagggaaggtggtcagatcccaagaaggacttcctgcccgcaacaggtaaggaaggagaaagaagcttgtgtgtaccgctcagtatcaggattcctccaccttctctggaccttgattcagtctcctaactgccacagaagggatgaaggttgaactccagctgggatgtcctgatgtggatgggacaaggtgggtttctgcaacagagaaaagacggacatccacctcggctggtggaggagggcccagtgcatgagaaggggcaagatggctaccctgtgactaaacgaaaacggagatcttccatttttggcagggttgggagatagttcctatccagtggaagctgaaggacggtttgaaaggaagccaagggcaagggatggagaaaaggacgcagctggggcctcgatgtctgaatccctgccaggggatggggcctgggcacccatcatttggaatggaagatgaggatagctggaaacagacactttagagggatgagggagacagaagaatgacagcaggtgttggacagtccaacgtctgcggctcttacaagtggtaaggaagaaatgagactgggccccagagttcctattaataaaatatgctgaggccgggagcgatggctcacgcctgtaatcccagcactttgggaggccgaggcgggcggatcacgaggccaggaaattgagaccatcctggctaacacagtgaaaccccgtctctactaaaaatacaaaaaattagccgggcgtggtggcgggcgcctgtagtcccagctactcgggaggctgaggcaggagaatggcgtgaacctgggaggcggagtttgcagtgagccgagatcgcgccactgcactccagcctgggcgacagagacggagagactccgtctcaaaaaaaaaaaacagttgaacaggaatgtatgagttgagctctgtgcataaggcttgccagacatcgtcttatttgagtctcataaacccaccaggcgagttgatttttcttattttacagatagggaaatgaagtaagagaacttaagttatttgcccgaggccatcctggcaggtctgtatttgggagagtgctgtgactcatgctggactctaacccacgagggtttctcagagtcagcagctgggggatgaagaagtgaaaagtgactggcaggaaattctgcaagcaaggaaagggaaagagaaatgaactggtgcaggtctgcgggaagagaatgaggctggatcctcaaaatcacaggaggaagcaggcccagacctcagaggcagaaagagaaagaaaccagagcttagagtcaggaggaggaaaccagaccccggagccacaaggagagggctggatccccggctcagagggaagaggtcggatccccagctgagagggaggagggtcccggaccctaggagtgggaaggaaaggctcggatcccctgatccccaggaggaggggacccggctgcctcccggttggggccgcgcgagggcggggcgcggaaggatccgggagggccgtgctccgccacccagtatatatctgtccccagtccccggggccgcctcattccctgtcctcggatcacagtctcttctcactacagtgtcgccgcctctgcctgcgtagccccggccatggctctgtagcctcgacccctttgtgcccccggcccgtctccgcgctcaccacgcctgcgctctccgctcccaccttctttcttcagccgaggccgccgccgcctctccttgctgcagccatggagtgagtaaccgcttacctcttctccaactgcctttcccgccctttcgcagctcgtggccctctttagggagccctggggggtggggagtcgcgagcggggaatcacggtcgcgcaggcgcagaagtagtacggtgggccgaaggcgcgcggctgcgcatgcgcactgggcccggggccgggtgggagagttctagactcgatgtttgtcagcccgcgtgcagctgggcctgagcactccaggggagggtgtgttttttttttttctaaacgattcttcgtgcttggttgttcctgcgcagtagcccaccagtgccccgtagtgaaagagctgcggaccctgaatggccgcacatgcgcattgatccccaagagggcggaggtgtaaaggcaattggaccgctcgggcgacgtagcatgcgccttggccctcggcgcagagccgcgtgtggacgggtggcgttcgggtagccgttctccgcgtgccccctctaccctcctccaccctccctgccccacgttgctctggctcacagcccagcttccttccttttaaaccaggcacctgctgaggcggggactggcttagattgacagggcagaaggcgggacccagaggcaaccctctaagtgggtggggatagaaccactgtcgtcacgatgggtgggatttcggaagcacattgtgagaaggggcggggctaaaccaaccgttagttgaggggtggggtttcgatgtgacaaagaggcggggcctctggggaatcgggggaggggcggagctaaataaacaatgaggggcggggcttggaggg

SEQ ID NO: 854 - DNA, 6000 bp, Homo sapiens
gaccttggcagggttggtaaagagtggtggagttaaactctatgcaagggagaatttaactgtcttcttcaagtaatgcagatgtatatagagtcattttaagtcctgtcctcttattgtagattggtgttattttattttgtaactttgtaacaagtttacattcatggataaagatttatagaatatgccaatacaaacttcaaataaaattgagatatcttaacataacatagacgcagaatgaccttataattctctaggaactgctccatgacaaatcatatttaaagaatgcacaattgcctctatcttgagatggcagcagacataagattttgcttttatgccagaaataaattggaacctatcacagaaatcactgaacactatgtcttgctccaaactatgggaaatgaaacaccaatatgtgataaaatcatacaaggtagaaacctaatgttagtaatttcaaattatatacttatctctatattcataattgatacaagtaaaagtaatagcaataaagcatgatttctgaaacatgttaagtggaagccccttgtacaaatggaatctttaacgtgttaaattttgtgtattttacaaatcaaaattgtactgtggaaattaaaagttcctcttcaaaacttccctttttgttaataatattaagttctaagaatgatagtcccacttaaaagcttctttcaagtttccttcatgtttcatactattaacaaatcttttaccctactaataactctttgttgtgccccgggcagttggtaaacacagtaaagaaataagtaatcctatatccctgtactgtaaaccaagaggcctaacccatatgtttcctggcctgtccggacaggcctagacatgcccaggcatgtcccagcttgcagcccaggcttctttccttatttggaaatgttattgttttcctagtttcctacaaccaaccccatccctttctttgttccccattgtgcctttacctatttagtaaagttttaagtttttagccaatcggtatcagtctagattgtgcagtccagctccagccaacggagataggacgcagcagtaggggcccaatgcgttaggaataagaatccctgctttcctttgtttggggtgctctcatggcaatcaggcttataggcagcacccttctgcagaagtaaaattgccttgctgagaaatcttttgttcaagtactcattttctttgcgactcccagctttcatttccagcagtacactgtgggattcatatgagactatgcttaaaccagagaatacatcattagaaacttttgtgcccaagggctgctctctgaaacccagtttgtatgttaccacttccttaaatgctgattctttaactagaagatggaaaacaatctgtcagtatgaagagactatggatgttttcaggaggagacaatcagtttccactaagcattcatgcactaaggatgagagaaaacattcgtattccagcaactgccatttggagacaccctttctgcacaggattaggtgattcctcttgacctctcctatctctttgagaagcatggtggtcttgtagtgcactcttaataattctgaaaattgagtctataattctcctagggtggactgaacagtagattaattttggagctaaagtccttaagcacattacaagtcagttttcattatcacttggattaaacaccaacaatcaatgtcactgcggattacactaaattgcattatgtgacatcagggattggtgtagggtgtccaagggagagaatagagtcctgggttcttagtttgtttctggttgggccagtaaagtcccttcctcaaccctcttttctgcttatcactagagatggggtttcactgaattagccagggtggtcttgatctcctgaccttgtgatctgcccgcctcggcctcccaaagtgctgggattacaggcacgagccaccatgcccggtccattattttattttatttattttttgcgacagagtctcgctctatcgcccaggctggagtacagtggtgccacctcaattcactacagccttcgcctcccaggctcaacggattctcctgcctcagcctcccaagtaattgcgattccaggtcagtgccctcacacccagctaattttgtatttttggtagagataggatttcaccatattggccaggctggtctcaaacgcctggcctcaagtcatccacacacctcagccttccaaagtgctgggattatagccgtgagccaccgcaccctgcccccactattttaaagtggatcgcaagaaaatcttcctaacttttgcctcagtggaaggcattatctttgttatattgttcaaataatttatctatcttgtaacgcctatgaagacagtaccaccatctttcaaggctgttttttacacaaaatctttagagagtctggagcagaagctgataaaagacgtaggaaacataaggaatgcatggggaaaatatctctaaacacagtggacttctccctttagaatatgaaaataggccggatgcagtggctcatgcctgtaatcccaggactttgggaagccaaggcaggtggatcacctgaggtcaagagttcgagaccagcctgaccaacatggaaaaaccccatctcaactgaaaatacaaaattagccaggcatggtggcgcatgcctgtaatcccagctattcaggagagtaggtgggattattttgttttattttattttatttgtaaaatgaataagcagaagaatcacttgaacctcgggggcggtgtgggggaggttgtggtgagccgagaccacaccattgcactccagtctgggcaacaagagcaaaactttgtctatatatatatatatatatatatatatatatatatatatatatatgaaaataattgatactttgagaaaaaaggcccattaaagattctggacacaaagctttgttttgtagtgctgtgggattgctaacatgtccagtaggcaggaagaagggagagaatgaccacaaggcttcacagaaatgtgagctccagtggtgatgagagaaagagtagaaaccgtaatgaaacatgatggtttccatccagtaaaagtcatgaggcttaactgaacatagtatcaattgttagtgcaatgcaacaacttaattctgaatggatatctgatttaaattgtaaagatgactaatgaaatttttagaatagatcaaaggagaacaaaatgatttctcacacagcccgaaaagcattaatgtgaagtataaaaggagaaatgacaattcagtttataaaaaatttaagagctgatattaataaaaagataagaaagatagaacaaaaaccaaggaattacttgtttccagcatatatagtgtactcaaatcaataagaaaaagaaaggcaatacaactgaaaaaaatattatctatctatatgtatgcacacacatatatgcacacacacacacacacatatatccaaaatatataaggaactcatacaacttgataccaaaaacatgaataactcgtcctaaaatgggcaaaggacctaaatagacacatctcacaagaagaaatccaaatagtcaacagacatgaaaaagagacagcatctctaatcatcaggaaaatgtaaaataaaactgtaatgagctaccacttcacacttgataggatggctattatcaaaaagacaaagataagtgtcagtgaggatgtgggaaatccttacacattgttgatgggaatgtaaactggtatagccattgtggaaactactatggaggtatctcaaaaaacataaaaatagaactgccatttcatccaacaatcacatgtctgggtaaatatccaaaggaggcagggggcggtggttcacacctgtaatcccagcactttgggaggccgaggcgggcagatcacttgaggtcaggagttcgagaccagcctggccagcgtggagaaaccccatccctacccaaaatacaaaaattagctgggagtggtgcaggcacctgtaatcgcagctactggtgaggctgaggcaggagaattccttgaacccgggaggtggaggttgcagtgagctgagatcgtgccactgcactccagcctgggtgacagagcaagactctgcccccccaaaaatatatgtatgtataatatatatttatttaatatatatttataaaaatatattttataacatttggtataatttatataattttataatttatataattatatttatatgaaaaaatatatatttatacacacacatatatataaaatctccaaaggaatttaaaacacaatccccaaaatatatcttgaattcccatgttttttggagcattatacagaataaccaagatacggaaataacctcaatgtgcccgaacagataaatggataaagactttgtgagatacacatacaacacacacacactatatatacatatagtgccatgcaacctacacacgtgtgtgtgcgcgtgtgtataaaacacagtgcactaatactcagcctttaaaaaaaatgccacttgcaacaacgtagatggagctggacgatatcatgctaaaattatgcaaagtgaaacaagcacaaaaaagaacgagacacgggcgtggggcacgaggtgctcactgcgcaagcgcccactccaccgcgtggtttccagctggaggctgggagcgttcgtggcttcctcttttcttgctgacccttcggagctctgggaagtggctgcaccttggcggctccccagagcgcgcggtgctaatcgtgggtcgtcagcctgggtggctgggcccggcttagggcagggtttggcatttccaatggtagggggctcggaccgtccctccgcgggaccctcccgttgggacaaggccgatcgcctgggcggttggagccgctatcctggcgcgagacggtggacaagtcctatattcaagagaagataactttgaacagtttcgaaggatctaaaacgtatgtgtctgcagacatcaatgaggatgaagaattagtagaagagattaatagatcaaaaacgtttgctggctttgcaggtggtgggcctgcctgggcatcggcgcgttggaggagacgccctggggggccttagctgccctgaagcggtagacaggtggcaacgtgggggctcaggagttgacaaacacaagaaagcagcgccgaattgcaggtttatccgcagcttttattttgaagacagtgccacgaaacctgcaaatcctggtgtcccaaatagtcaataccaagttgaaaaccatctgggagaggaaaagcgttgtgctttagacaggccgtctgagactcgtgcagaccggcttttgagagctggacaggtggtggatagatcagactccatacacccgaggagccccgccatgcatagtgaagaagctagataacagtcgtttcacaactggccagcctctgcccacttgaccccgagagagctggccagtgctgggctgtactacacaggcactgatgaccaagtgcagtgcttctgttgtggcggaaaactgaaaaactgggaacctggtgatcgtgcctggtcagaacacaggagacattttcctaattgcttctttattttgggccacaacgttaatattcgaggtgaatctgatgttgcgagttctgataggaatttctcaaattcaacaagttctccaaggaatccatccatgacgggttatgaagcccggctcattacttttgggacatggatgtactccgttaacaaagagcagcttgcaagagctggattttatgctataggtcaagaggataaagtacagtgctttcactgtggaggagggctagccaactggaagcccaaggaagatccttgggaacagcatgctaaatggtatccaggttgcaaatat

SEQ ID NO: 855 - DNA, 6000 bp, Homo sapiens
cgggatttcaccatgttggccaggctagtctcgagctcctgacctcaagtgatccacccatctcagcctcccaaagtgctgggattacagccttaagccaccgcgctcaaccagaagtctgtttaaatccatccttctccccagccacccatgagttatgtgaccttggggttgctacttaacatttcagtctcaatttcctcaatagaacaaaagttagaagaattgtaacaaaagatagttttatttttatttttatttttattttttgagatggagtcttgctctgtcacctaggctggagtgcagtggtgtgatggtggctcactgcaagctccgcctcccggattcacgccattctcctgcctcagcctcccaagtagctgggactacaggcacccgccaccgtgcccagctaatttttttaatttttagtagagacggggtttcaccgtgttagccaggatggtctcgatctcctgacctcgtgatccgcttgcctcggcctcccaaagtgctgggattacaggcgtgagccaccatgcccagcacaaaagataatttcttaatcccatgcatttgagtcttaaaaaaatattctatataattccaaggtcaaagaagaaataacaaagggcatttttaaaaatgctagaactgagtggtggtgaaattgctgttgaaatgtgtttgttgcactgatggaaatttataaatgtaaatatttatattaaaatataaaataatgggccaggcatagtggctcacacctgtaatctcagtactttgggaggccaaggcgggagggccatggagcccaggagttcaagaccggcccggtgtacaaagtgagacccagtctctagttaaaaaagagggggagtgggccaggcacagtgtctcacgcctgtaattccagcactttgggaggccaaagcaggtggatcacccgaggtcaggagtccaagaccagcccggccaaggtggtgaaaccccgtgtctactaaaaatacaaaattagcttggtatggtggcgggagcctataatcccagctagggcaggagaatcacttgaacccgggaggcagaggttgcagtgagccaagatcatgccactgcactccagcctgggcaacaacagagagacttcatctctaaataaataaataaataaataaaagaaaatacaaattttttaaaaaaggtactgtggctgggcgtggtggttcacacctgtaatcccagcactttgggaagccgaggcaggtggatctcagatcaggagttcaagaagagcctggccagcatggtgaaaacctatctgtactaaaaattagcctggcatggtggcaggtgcctgtaggaggctgaggcaagagaattgcttgagccccggaggcagaggttgcagtgagccgagaccacaccactgcactccagcctgggcaacagagcgagagtctgtctcaaaaaggaaacaaaaaaaaaagtacctccaaattatggtagggtgtccatattaagaaggtagaaaaaggtcgggggaagtggatgcctgtaatcccagaactttgggaggctgaggcgggtggatcacctgaggtcaggagttcaagaacagcctggccaaaagggtatggtgaaaccccatctctactagaactacaaaattagccgggcgtggtggtacatgcctgtaatcccagctacacaggagtctgaggcaggagaatcacaggaaaccggcaggcagaggttgcagtgagctgagatcgcgccattgcactccagcctgggcgacaagagcaaaactccatctcaaaaaaaaaaaaaagaaaaaatgaaaaagaatttattgaaatgtgcagtctgaaaactgctcctgcacattttcattcatccttcctattccctccatccctcaattttttttttttttttgagacagagtttcgctcttgttgcccaggctggagtgcaatggcacgatctcagctcactgcaacctctgcctcccaggttccagccattttcctgcctcagcctccagaatagctggaattacaggcatctgccactacgcctggctaattttttgtgtatttttagtagagatgggatttcaccatgttggtcaggctgatctcgaactcctgacctcaggtgatccacccgcctcggcctcccaaagtgctgggattacaggcatgaatcaccacgcccggcccctcattttcttttctttctttctttcttttttgtttgtttgtttttgagacagagtcttgctctgtcacccaggctggagtgcagtggcgcgatctcagctcactgcaagctccgcctcccgggttcacgccattctcctgcctcagcctcccgagtagctgggactacaggcgcccgccaccacgcccggctaattttttgtatttttagtagagacggggtttcaccgtgttagccaggatggtctccatctcctgacctcgtgatccgcccgcctcggcctcccaaagtgctgggattacaggcgtgaggcaccacactgggccccctcactttcttattctttctaggataggcaactgagcgcggcagtgaagagctgggcttccggaagctgacagctgtttgtgatcttcaagacctcagacaggttttctaaatatgccttgccttcattttctcaaggaaagtgaaaaatgggtaggatcatggcaatcactactgtgtagcaatgtttagaggacttaataagtaaacacagggtcaagcatggtggctcacaccggaaatcccagcactttgggaggccgtggtgggaagattgcttaagcccatggggttgagaccagcctgggcaacatagtgagacctccatctctataaaaaatacaaaaatctagtcaggcgtgatggcgtatgcctgtagccttcagtaagctatgattgtgccactgcacaccagcctaggcgacagagtgagaccctgtctcaaaaagaaaaaacgaaaagaaatatagatgtacatatacatatgttggttctaaaacatgaaaaaggctgggcgcggtggttcgtgcctgcaacccaagcactttgggaggccgaggcgggcggatcacgaggtcaagagtttgagaccagcctggccaacatagtgaaaccccatctctactaaaaatacaaaaaaaaggctaggcgcagtggctcatgcctgtaatcctagcactttgggaggccgaggtgagcagattacctgaggttgggagttcaagaccaccctgtccaacatggtgaaaccccatctctactaaaaataagaaaattagccgggtacagtggcacgcgcctgtaatcccagctattcaggaggctgaggcaggagaatcgcttgaactctggaggcggaggttgcagtgagccaagattgcgccactgcactccagcccgggcgacagtgccagactcagtctcagaaaaaaaaaaagcaaaacaaacaaagaaacatgaaaaaaagctataaaacccaacttttttctttttttttttgagacggagtctcactctgtcgcccagggtggagtgcagtggtgcggtctcggctcactgcaacctccgcctcctgggttcaagcaattctctgcttcagcctcccaagtagctgggattacaggcacccgccaccacgcccgactaattttttgtatttttagttgagacggggtttcatcatcttggccaggctggtcttgaagtcctgacctcgtgatccacccgccttggcctcccaaagtgctggaattacaggcgtgagccaccgcgcccggccaaaacccaactttttagtcttatttatatggtgtttttttttttttttttttttttgagatggagccttgctctgtcgcccaggctggagtgcagtggcgcgatctcggctcactgcaagctccgcctcccgggttcacgccattctcctgcctcagcctcccgagtagctgggactacaggtgcccgccaccacgcccggctaattttttgtatttttagtagagacggggtttcaccgtgttagccaggatggtctcgatctcctgacctcgtgatccacctgcctcggcctcccaaagtgctgggattacaggcgtgagccactgtgcccggctatatgtttacaaaattaatactgccagccaggcacggtggctcacgcctgtaatcccagcactttaggaggctgaggctggcagatcacctgaggtcaggagtttgagaccagcctggccagcatggcaaaaccccgtctctattgaaaaaaatacaaaaattaaccaggcgttgtggcgcatgcttgtaatctcagctactcgggaggctgaggcaggggaatcacttgaagccggcaggcggaggctgcggggagccgagatcgtgccgttgcactccagcctggggaacagagcaagactccattaaaaataaaataataataatactgtgaatgtgaaactgatgaacttggtgcttttcatgcgtctcatagttgacgtgtcattgatatttcacttgaaatacggttggatttttattaataatatacctggggtgatgggagaaggtagccaatcacagctgaggcttctaagcggtgattctcagcctcggccgcaatcacaattatctgggactctcgaaagaactccagggtctgggcagtcccagtgtaaccaatcaagcagaatctctaggcgttcgtgctttgaaatgaggctccacataggtaagtttaacaggcagtcaagatggaggaccacaggtggagatcgggaagctcaggtgaaggaccgccccccaacaccccccgcccccaaaagacctctcagtaattccggtggatacaggaagtgctcagcaacgattacgccccgagggccaatcacagggctgcggccgagaaagaagccttaatagagctttctcaacctgcagccctcatctccgccggcgagtagggccaggtgttgggaggtgagtagctctccggcagctctgcaacttcatttctttatttctccattccacagttggtaaaatttctccttttatttcatatattttttttctgagacggagtctcgctctgtcgcccaggctggagtgcagtggcgcgatctctgctcactgcaagctccgcctcccgggttcacgccattctcctgcctcagcctcccgagtagctgggactacaggcgcccgccaccacgcccggctaattttttgtatttttagtaggtggctcacgcctgtaatcccagcactttaggaggctgaggctggcagatcacctgaggtcgggagtttgagaccagcctggccagcatggcaaaaccccgtctctattgaaaaaaatacaaaaattaaccaggcgttgtggcgcatgcttgtaatctcagctactcgggaggctgaggcaggggaatcacttgaagccggcaggcggaggctgcggggagccgagatcgtgccgttgcactccagcctggggaacagagcaagactccattaaaaataaaataataataatactgtgaatgtgaaactgatgaacttggtgcttttcatgcgtctcatagttgacgtgtcattgatatttcacttgaaatacggttggatttttattaataatatacctggggtgatgggagaaggtagccaatcacagctgaggcttctaagcggtgattctcagcctcggccgcaatcacagttatctgggactctcgaaagaactccagggtctgggcagtcccagtgtaaccaatcaagcagaatctctaggcgttcgtgctttgaaatgaggctccacataggtaagtttaacaggcagtcaagatggaggaccacaggtggagatccggaagctcaggtgaaggaccgccccccaacaccccccgcccccaaaagacctctcagtaattccggtggatacaggaa

SEQ ID NO: 856 - DNA, 6000 bp, Homo sapiens
agccaagatcatgccactgcactccagcctgggcaacaacagagagacttcatctctaaataaataaataaataaataaaagaaaatacaaattttttaaaaaaggtactgtggctgggcgtggtggttcacacctgtaatcccagcactttgggaagccgaggcaggtggatctcagatcaggagttcaagaagagcctggccagcatggtgaaaacctatctgtactaaaaattagcctggcatggtggcaggtgcctgtaggaggctgaggcaagagaattgcttgagccccggaggcagaggttgcagtgagccgagaccacaccactgcactccagcctgggcaacagagcgagagtctgtctcaaaaaggaaacaaaaaaaaaagtacctccaaattatggtagggtgtccatattaagaaggtagaaaaaggtcgggggaagtggatgcctgtaatcccagaactttgggaggctgaggcgggtggatcacctgaggtcaggagttcaagaacagcctggccaaaagggtatggtgaaaccccatctctactagaactacaaaattagccgggcgtggtggtacatgcctgtaatcccagctacacaggagtctgaggcaggagaatcacaggaaaccggcaggcagaggttgcagtgagctgagatcgcgccattgcactccagcctgggcgacaagagcaaaactccatctcaaaaaaaaaaaaaagaaaaaatgaaaaagaatttattgaaatgtgcagtctgaaaactgctcctgcacattttcattcatccttcctattccctccatccctcaattttttttttttttttgagacagagtttcgctcttgttgcccaggctggagtgcaatggcacgatctcagctcactgcaacctctgcctcccaggttccagccattttcctgcctcagcctccagaatagctggaattacaggcatctgccactacgcctggctaattttttgtgtatttttagtagagatgggatttcaccatgttggtcaggctgatctcgaactcctgacctcaggtgatccacccgcctcggcctcccaaagtgctgggattacaggcatgaatcaccacgcccggcccctcattttcttttctttctttctttcttttttgtttgtttgtttttgagacagagtcttgctctgtcacccaggctggagtgcagtggcgcgatctcagctcactgcaagctccgcctcccgggttcacgccattctcctgcctcagcctcccgagtagctgggactacaggcgcccgccaccacgcccggctaattttttgtatttttagtagagacggggtttcaccgtgttagccaggatggtctccatctcctgacctcgtgatccgcccgcctcggcctcccaaagtgctgggattacaggcgtgaggcaccacactgggccccctcactttcttattctttctaggataggcaactgagcgcggcagtgaagagctgggcttccggaagctgacagctgtttgtgatcttcaagacctcagacaggttttctaaatatgccttgccttcattttctcaaggaaagtgaaaaatgggtaggatcatggcaatcactactgtgtagcaatgtttagaggacttaataagtaaacacagggtcaagcatggtggctcacaccggaaatcccagcactttgggaggccgtggtgggaagattgcttaagcccatggggttgagaccagcctgggcaacatagtgagacctccatctctataaaaaatacaaaaatctagtcaggcgtgatggcgtatgcctgtagccttcagtaagctatgattgtgccactgcacaccagcctaggcgacagagtgagaccctgtctcaaaaagaaaaaacgaaaagaaatatagatgtacatatacatatgttggttctaaaacatgaaaaaggctgggcgcggtggttcgtgcctgcaacccaagcactttgggaggccgaggcgggcggatcacgaggtcaagagtttgagaccagcctggccaacatagtgaaaccccatctctactaaaaatacaaaaaaaaggctaggcgcagtggctcatgcctgtaatcctagcactttgggaggccgaggtgagcagattacctgaggttgggagttcaagaccaccctgtccaacatggtgaaaccccatctctactaaaaataagaaaattagccgggtacagtggcacgcgcctgtaatcccagctattcaggaggctgaggcaggagaatcgcttgaactctggaggcggaggttgcagtgagccaagattgcgccactgcactccagcccgggcgacagtgccagactcagtctcagaaaaaaaaaaagcaaaacaaacaaagaaacatgaaaaaaagctataaaacccaacttttttctttttttttttgagacggagtctcactctgtcgcccagggtggagtgcagtggtgcggtctcggctcactgcaacctccgcctcctgggttcaagcaattctctgcttcagcctcccaagtagctgggattacaggcacccgccaccacgcccgactaattttttgtatttttagttgagacggggtttcatcatcttggccaggctggtcttgaagtcctgacctcgtgatccacccgccttggcctcccaaagtgctggaattacaggcgtgagccaccgcgcccggccaaaacccaactttttagtcttatttatatggtgtttttttttttttttttttttttgagatggagccttgctctgtcgcccaggctggagtgcagtggcgcgatctcggctcactgcaagctccgcctcccgggttcacgccattctcctgcctcagcctcccgagtagctgggactacaggtgcccgccaccacgcccggctaattttttgtatttttagtagagacggggtttcaccgtgttagccaggatggtctcgatctcctgacctcgtgatccacctgcctcggcctcccaaagtgctgggattacaggcgtgagccactgtgcccggctatatgtttacaaaattaatactgccagccaggcacggtggctcacgcctgtaatcccagcactttaggaggctgaggctggcagatcacctgaggtcaggagtttgagaccagcctggccagcatggcaaaaccccgtctctattgaaaaaaatacaaaaattaaccaggcgttgtggcgcatgcttgtaatctcagctactcgggaggctgaggcaggggaatcacttgaagccggcaggcggaggctgcggggagccgagatcgtgccgttgcactccagcctggggaacagagcaagactccattaaaaataaaataataataatactgtgaatgtgaaactgatgaacttggtgcttttcatgcgtctcatagttgacgtgtcattgatatttcacttgaaatacggttggatttttattaataatatacctggggtgatgggagaaggtagccaatcacagctgaggcttctaagcggtgattctcagcctcggccgcaatcacaattatctgggactctcgaaagaactccagggtctgggcagtcccagtgtaaccaatcaagcagaatctctaggcgttcgtgctttgaaatgaggctccacataggtaagtttaacaggcagtcaagatggaggaccacaggtggagatcgggaagctcaggtgaaggaccgccccccaacaccccccgcccccaaaagacctctcagtaattccggtggatacaggaagtgctcagcaacgattacgccccgagggccaatcacagggctgcggccgagaaagaagccttaatagagctttctcaacctgcagccctcatctccgccggcgagtagggccaggtgttgggaggtgagtagctctccggcagctctgcaacttcatttctttatttctccattccacagttggtaaaatttctccttttatttcatatattttttttctgagacggagtctcgctctgtcgcccaggctggagtgcagtggcgcgatctctgctcactgcaagctccgcctcccgggttcacgccattctcctgcctcagcctcccgagtagctgggactacaggcgcccgccaccacgcccggctaattttttgtatttttagtaggtggctcacgcctgtaatcccagcactttaggaggctgaggctggcagatcacctgaggtcgggagtttgagaccagcctggccagcatggcaaaaccccgtctctattgaaaaaaatacaaaaattaaccaggcgttgtggcgcatgcttgtaatctcagctactcgggaggctgaggcaggggaatcacttgaagccggcaggcggaggctgcggggagccgagatcgtgccgttgcactccagcctggggaacagagcaagactccattaaaaataaaataataataatactgtgaatgtgaaactgatgaacttggtgcttttcatgcgtctcatagttgacgtgtcattgatatttcacttgaaatacggttggatttttattaataatatacctggggtgatgggagaaggtagccaatcacagctgaggcttctaagcggtgattctcagcctcggccgcaatcacagttatctgggactctcgaaagaactccagggtctgggcagtcccagtgtaaccaatcaagcagaatctctaggcgttcgtgctttgaaatgaggctccacataggtaagtttaacaggcagtcaagatggaggaccacaggtggagatccggaagctcaggtgaaggaccgccccccaacaccccccgcccccaaaagacctctcagtaattccggtggatacaggaagtgctcagcaacgattacgccccgagggccaatcacagggctgcggccgagagagaagccttattagagctttctcaacctgcagccctcatctccgccggcgagtagggccaggtgttgggaggtgagtagctctccggcagctctgcaacttcatttctttatttctccattccacagttggtaaaatttctccttttatttcatatattttttttctgagacggagtctcgctctgtcgcccaggctggagtgcggtggcgcgatctcggctcactgcaagctccgcctcccgggttcaggccattctcctgcctcagcctcccgagtagctgagactacaggcacctgccactatgcccagctaatttttttgtatttttagtagagacggggtttcaccatgttggccaggctggtctcagtccgcctcggcctcccaaggtgccgggattacaggcgtgagccaccgcgcccagccttttttttttttttttttttttttttcttctcttttttgagggtcttactctgtttcccaggctggagcgctgtggcaggatctcggctcactgaacccttgacctctcaggttcaagcagtcctcacgcctcagcctttgaagtagctgggaccgtgggagggtgccaccacatctgttctggctaataatattattattaccactgtttgcagagactcactagatgtagggtcttaatatgttgccgaagctggtctctaactcctgggctcaagcgatcttcctgcctcagactcccaaaattctgggattataggcaggtgccaccgcgcccggcctaaatcttttcttctgttagaaattaagtggttctgcctgtctcagtggctcacgcctgtaatcgcagcgctttgggaggccgaggcgggaggatcacctgaggtcgggagttcgagaccagcctgaccaacatgtagaaaccccatctctactaaaaatataaaattaggtgggcgtggtagcgcatacttgtaatcctagctactcaggaggctgaggcaggagaatcacttgaacccgggaagcggaggttgcggggagcctagatcatacca

SEQ ID NO: 857 - DNA, 6000 bp, Homo sapiens
tctgtcacccaggctggagtgcagtgtcacgatctcagctcactgcaacatctacctcccgggttcaagtgattctcatacctcagcctcctgagtagctgggattacaggcatgcaccaccatgcctggctaattgttttgtatttttcagtagagatagggtttcaccacgttgcccaggctggtctcaaactcctggcctcaggtgatccgcccacctcagcctcccaaagtgctgggattacaggcgtgagccaccacacccagccaggatgaatgattttagatactgtctagcaagccctgctcattttttcctatcaggactactctcagtagccctgagtccagcgacccacaaatctagagcatcagtggatggtgggggtacaccctcctgcctagcttctggaggcttctctctgtagcactgaggaagtctggaattttcagtcctccactagagctgggagtagcagagagagagagagccagtgtgtcaggcaggggtgaagaacatgcatccgaaggctgagatgtagactgccgacttggaacaagaggaggaggtagccatatcttagcaacctggtaaatgactgctaccttggggatgttagtatcataatctgggaaactgcccaaatactggaatacaaatgcaaggagtgcaaaaagtatgacgagactgagcgtggtggctcatgcctgtaatcccagcactttgggaggctgaagcgggcagattgctttacacgaggagtttgagaccagcctggccaacaaggcaaaaacctgtctctactaaaaattacaaaaattagtcaggcatggtggcacatgcctgtaatcccagctactcgggaggctgaggcaggagaatcgcttgaacctgggagatggagattgcagtgaactgagatcatgccactgcactccagcctgggtgacagagttagactctgtctcaaaaaaaaaaagcatgactaattcccctaaagaagtaactttatcattaactgactccttgtacatgattttcatttgtcataggcatctgaaacatgttccctcttccctatgccatgcctccgcaaataacacagttatcaaacctatttgaaattctttctgcttcttgccaaatatctctagttgtttcaaatgttaattttagaacaggatttcagactccttgagagtcaatctgtcctccagcatttagtttattctaccaaagcctcttttacatagagtatctgaattattagtccaattttaaggggtgaggatggggaattatatatatttgtatacttataaatatttgtatttatatacttacatataaatatatgtatttatataatattgtatataaatgtatttatataatatatgtaaatatatgtaacttatatttataaatgatatatttatatatgtatatgtaatatcatgtataatatatacttgttatatataaattataataatatacataatataaatatagatatggcagaggataataggcacaatgtacttctatttcctaaaggaggtagtcaagaagatttaaccctcctggccaggcactgtggcttacacctgtaatcccagcactttgggaggctgaggtgggcagatcacctgaggtcaagagttcgagaccagcctggccaacatggtgatatcccatctcgacaaaaatacaaaaattagccgggcgtggtgtcaaacatctgtaagcacagctgctcgggaggctgaagcaggagaatggcgtgaacccgggaggcagcggctgcagtgagccaagatcacgccattgcactccagcctgggcgacaagagtgaaactgtgtcaaaaaaaaaaaaaaaaaaagcccgtgcatagtggtgcgcacctgtaatcccagctacttgggagactgaggcaggagaatcgcttgaacccaggaggtggaggttgcagtgagctgagattgcagccactgctctccagcctgggtgacaaagtgagaatccgtctcaaaaaaaaaaaaaaaaaaaaattgacccctctttattaaggcatattaggaagctgcctgcctgatttggcccagtgacttccctgccactaaatatgtaagcagaagactaacagaattccagaataattatttttggagttatgagttacaggcctctaggaagaaaagtatcgtgactttttccttccctccgcattaaactgggagttaaaagcatgagtagctacatatgcttaaagtcacagaatagttagtgccatgtggtacttcacagatggcatctcagctgatattcacaacaaccctggggcaacttggggaaccatcattgcactgctaagaagctaaggtgacttgtattagtcacaggaaggaacccagacttgaactcaggtctacttggctccagagctctgggcatttccactttaccacactcctaggataataagcgttgggagagactgggaggaagaacataagggcaggggacgtaactgttggaacgtaggatgccgaagttactagttaattacctatttgaaatgccctgaaaacacctgactgcaaatccactcacaaaggaaactggtgaggcagcccagaagatgtacttgaatgaatatggatataattttgcttattttactatgaaatactactgtattagtctactgtggttgctgtaacaaaatatcataaactgggtggtttaaaacaacagaaatttattctttcacagttctgaggaccagtccaacatcagtatcatggggctgaaatcagggtgtcagcagggccacactcctgggagctttaggggagaatccatttatgcctcttccagctgcaggtggctgctggcatcttttggctcgtagccgtattactcgaatctctgcattcatggtcttactgacttctcctgtcagtttcaaatctccctctggctctctgtaataagggaccattattaagggcccacctggatcatccagaattctctccccatcttcagagccttaaatggaacatatctggaaagacacaatatttacagttcccagggattaggatttgggatatttgggtagccactattcagcctactacaaccatatttctacattttccctttttattctatattacatcatttattagtacaaaagtaataggtgtttgctatgaagaattagaatatacaggttgggcatggtggctcccgcctgtaatcccattactttaggaggacaacacaggtggatcactggagaccaagagctcaagaccagcttggccaacatagcaaaaccctgtctctactaaaaatacaaaaaattagccatggtggtggcccacacctgaaatcccagctacttgagaggctgaggcacaagaattgcttgagcctgggaggcagaggttgcagtgagccaagattgagccactgcactccactccagcctgggcaacagaacgagactctgtctcaaataaataaataaataaataaataaacaaataaaataaaaaataaataagttgataaataaaattagaatatacagataagccaaagacagaaatttaaaattgcttataattgtattccccagcaataagcatcattactattttggtggctgtctttgcagttttttctcttgaacatatgtttatatataggtttcattacaatttaaaaatctagctgatagtgtagccctcaatctcacttcagagaaacccacctcacaagttgggaaacactgacactgatgcccccttagaaaacccaggatgtagacatttatttgccgggaaactttggtatccctctatggcagataggctactgtcagaatgctctttttgaaataagaagttatgtaacacaaagacatgttcctggtagtttatgcaaagacagaggaaagagtatgcaagaatgtcatcctcaagggaagtgcagagagatttcttcagtcctcagctgagtataagctggcctcctggagtctgtgaacacaaacgtccaatgtgagtgtgcctgtgcaagcccctggctgtttatactccggagggtgtccccgtgcgtcatcggtggagtggaccaaaactggtgatctgtttgccctgtgtgaccttgcccagaaccctgctgactgagagaacacatctgctggaagtcctctgggattcaaggtacaggggtaagcatgaccttgaatgcagtagcaatgtgctttagccaactaagctggctcatttcatttaccgctctatctcccatggttaagcattaaaaatacatgttgtggctgggcatggtggctcacgcctgtaatcccagcactttgggaggctgaggctggcagattgcctgaggtcaggagttcgagaccagcctggccaacatggtgaaattctgtctctactaaaaatacaaaaattagccgggcatggtggtgcacgcctgtagtcttagctactgggaggactgaggcgggaggaacgcttgaacccgggaggcagaggttgcagtgagctgagattgtgccactgccctccagcttgggtgacagaacaagactctgtctcaaaaaaaagaaaaaagaaagaaaaagaaaaaaaatatatgttggatgttcagaagactttgtttcattttaaggtatagaataagtaactcaacagcaatgaattcatatgttgtgaacaaacaggaaacaaatgagtaattcctttcttgacggaatttctagctcttgcatcttttactctgaagttctacttcttccccggctactcctgcctacacccatcttccctttctgaactggtagtacttgtgtccaaaccactcttactgtgctttgaaaaaaaaaaaaggaactgctcagcagttcccctctctgtacactgtcctctcacagaacaagaaggtatctggtctacaagaactcgaggcctcactgaaacggaaagcaaatacaaagaaactttattttaaaaacatgtcttggtctcccaagaagagggcaattggattgctcagccaggtactgtgggtagagagaatgggatttttaaggtctggggcccaaatattaaaatctgggtttacattcatttaaagcttgtgtctgggatgtacaaaagccttaacattgacgagtgtgatttgcatgcctggctggatttgcctgccgagaaacctttaggggtggttaatcgggtctgctggggcttcatcaggttcaaggggtacatgtaccccttggactactgtgagatggaaaggactttggaaacactttttggcattacagaaaggaaactcactctttttttttttttttttttgagacagagtcttgctctgtcacccaggctggactgcagtggcgtgatctcggctcactgcaacctctgcctcctgggttcaagcaattctcctgcctcagcctcccaagtagctgggattacaggcacccggcaccgcgccccagctaatttttgtatttttagtagagacagggtttcaccatgttggccagactggtctcaactcctgacctcgtgatctgcccacctcagcctcccaaagtgctgggattacaggtgtgagccaacgtgcccggccaggaaactcactcttgttgctaagactgttgttagaatcacagatgatcaaagctgaaaggaacgaggtggactacttagtccatccaatctcccaagttactgatgagaaacctgatatttggagacagaagtgaaggaaatcaccctttacgggacacctatttcgtgatagggtctttatgtacattatctcagtagatccttgcagcctggctttgagaggtggaaaatgtggtagagaggagttaaatgtcctgccctacatcacactgctaattgtctacaaaactaggatagaacctggtcagc

SEQ ID NO: 858 - DNA, 6000 bp, Homo sapiens
aaactgttccatctcagttcatcaggcgttaagagtttcataaggagcatgcaacctagatcccttgcatgcacagttcacagtaaaattcacactcctctgagaatctaatgctgtcactgatctgacaggagatggagctcagggggtcatgcttgctcacagctgctcacctctactttgcggccaagttcctagcaggccatggacctgtaccagttagcacccggagcttgaggacccccgggtgtacaagtacatccaatgcttgctacattttcttcactgagctgtaaaggtaattatctcattcactgtatacttttgcacaattagattttttaacgctagaaaacagtatgttcacttttcaaacataaataggctaatccaggaccaccctcttaaaagtgtggtgaatgaattattattttattttattttattttattttattcttttgagacggagtctcgctcagttgcccaggctggagtgcagtggcgtgatcttggctcactacagcctctgcaacctctgcctcctgggttcaagctattttcatgcctcagcctcctgagtagctgggtttccagacatgcacccccatgcctggctaatttttcgatttttttttttttttagtagagatgggttttgccatgttggctaggctggtcttgaactcctggcctcagatgacccaccgtccttggccttccaaagtgctgggattacagacatgagccaccactcccagccagatgaataattttgctttgttttgtttgaaacagaatctcactctgtcacccaggctggagtgcagtgtcacgatctcagctcactgcaacatctacctcccgggttcaagtgattctcatacctcagcctcctgagtagctgggattacaggcatgcaccaccatgcctggctaattgttttgtatttttcagtagagatagggtttcaccacgttgcccaggctggtctcaaactcctggcctcaggtgatccgcccacctcagcctcccaaagtgctgggattacaggcgtgagccaccacacccagccaggatgaatgattttagatactgtctagcaagccctgctcattttttcctatcaggactactctcagtagccctgagtccagcgacccacaaatctagagcatcagtggatggtgggggtacaccctcctgcctagcttctggaggcttctctctgtagcactgaggaagtctggaattttcagtcctccactagagctgggagtagcagagagagagagagccagtgtgtcaggcaggggtgaagaacatgcatccgaaggctgagatgtagactgccgacttggaacaagaggaggaggtagccatatcttagcaacctggtaaatgactgctaccttggggatgttagtatcataatctgggaaactgcccaaatactggaatacaaatgcaaggagtgcaaaaagtatgacgagactgagcgtggtggctcatgcctgtaatcccagcactttgggaggctgaagcgggcagattgctttacacgaggagtttgagaccagcctggccaacaaggcaaaaacctgtctctactaaaaattacaaaaattagtcaggcatggtggcacatgcctgtaatcccagctactcgggaggctgaggcaggagaatcgcttgaacctgggagatggagattgcagtgaactgagatcatgccactgcactccagcctgggtgacagagttagactctgtctcaaaaaaaaaaagcatgactaattcccctaaagaagtaactttatcattaactgactccttgtacatgattttcatttgtcataggcatctgaaacatgttccctcttccctatgccatgcctccgcaaataacacagttatcaaacctatttgaaattctttctgcttcttgccaaatatctctagttgtttcaaatgttaattttagaacaggatttcagactccttgagagtcaatctgtcctccagcatttagtttattctaccaaagcctcttttacatagagtatctgaattattagtccaattttaaggggtgaggatggggaattatatatatttgtatacttataaatatttgtatttatatacttacatataaatatatgtatttatataatattgtatataaatgtatttatataatatatgtaaatatatgtaacttatatttataaatgatatatttatatatgtatatgtaatatcatgtataatatatacttgttatatataaattataataatatacataatataaatatagatatggcagaggataataggcacaatgtacttctatttcctaaaggaggtagtcaagaagatttaaccctcctggccaggcactgtggcttacacctgtaatcccagcactttgggaggctgaggtgggcagatcacctgaggtcaagagttcgagaccagcctggccaacatggtgatatcccatctcgacaaaaatacaaaaattagccgggcgtggtgtcaaacatctgtaagcacagctgctcgggaggctgaagcaggagaatggcgtgaacccgggaggcagcggctgcagtgagccaagatcacgccattgcactccagcctgggcgacaagagtgaaactgtgtcaaaaaaaaaaaaaaaaaaagcccgtgcatagtggtgcgcacctgtaatcccagctacttgggagactgaggcaggagaatcgcttgaacccaggaggtggaggttgcagtgagctgagattgcagccactgctctccagcctgggtgacaaagtgagaatccgtctcaaaaaaaaaaaaaaaaaaaaattgacccctctttattaaggcatattaggaagctgcctgcctgatttggcccagtgacttccctgccactaaatatgtaagcagaagactaacagaattccagaataattatttttggagttatgagttacaggcctctaggaagaaaagtatcgtgactttttccttccctccgcattaaactgggagttaaaagcatgagtagctacatatgcttaaagtcacagaatagttagtgccatgtggtacttcacagatggcatctcagctgatattcacaacaaccctggggcaacttggggaaccatcattgcactgctaagaagctaaggtgacttgtattagtcacaggaaggaacccagacttgaactcaggtctacttggctccagagctctgggcatttccactttaccacactcctaggataataagcgttgggagagactgggaggaagaacataagggcaggggacgtaactgttggaacgtaggatgccgaagttactagttaattacctatttgaaatgccctgaaaacacctgactgcaaatccactcacaaaggaaactggtgaggcagcccagaagatgtacttgaatgaatatggatataattttgcttattttactatgaaatactactgtattagtctactgtggttgctgtaacaaaatatcataaactgggtggtttaaaacaacagaaatttattctttcacagttctgaggaccagtccaacatcagtatcatggggctgaaatcagggtgtcagcagggccacactcctgggagctttaggggagaatccatttatgcctcttccagctgcaggtggctgctggcatcttttggctcgtagccgtattactcgaatctctgcattcatggtcttactgacttctcctgtcagtttcaaatctccctctggctctctgtaataagggaccattattaagggcccacctggatcatccagaattctctccccatcttcagagccttaaatggaacatatctggaaagacacaatatttacagttcccagggattaggatttgggatatttgggtagccactattcagcctactacaaccatatttctacattttccctttttattctatattacatcatttattagtacaaaagtaataggtgtttgctatgaagaattagaatatacaggttgggcatggtggctcccgcctgtaatcccattactttaggaggacaacacaggtggatcactggagaccaagagctcaagaccagcttggccaacatagcaaaaccctgtctctactaaaaatacaaaaaattagccatggtggtggcccacacctgaaatcccagctacttgagaggctgaggcacaagaattgcttgagcctgggaggcagaggttgcagtgagccaagattgagccactgcactccactccagcctgggcaacagaacgagactctgtctcaaataaataaataaataaataaataaacaaataaaataaaaaataaataagttgataaataaaattagaatatacagataagccaaagacagaaatttaaaattgcttataattgtattccccagcaataagcatcattactattttggtggctgtctttgcagttttttctcttgaacatatgtttatatataggtttcattacaatttaaaaatctagctgatagtgtagccctcaatctcacttcagagaaacccacctcacaagttgggaaacactgacactgatgcccccttagaaaacccaggatgtagacatttatttgccgggaaactttggtatccctctatggcagataggctactgtcagaatgctctttttgaaataagaagttatgtaacacaaagacatgttcctggtagtttatgcaaagacagaggaaagagtatgcaagaatgtcatcctcaagggaagtgcagagagatttcttcagtcctcagctgagtataagctggcctcctggagtctgtgaacacaaacgtccaatgtgagtgtgcctgtgcaagcccctggctgtttatactccggagggtgtccccgtgcgtcatcggtggagtggaccaaaactggtgatctgtttgccctgtgtgaccttgcccagaaccctgctgactgagagaacacatctgctggaagtcctctgggattcaaggtacaggggtaagcatgaccttgaatgcagtagcaatgtgctttagccaactaagctggctcatttcatttaccgctctatctcccatggttaagcattaaaaatacatgttgtggctgggcatggtggctcacgcctgtaatcccagcactttgggaggctgaggctggcagattgcctgaggtcaggagttcgagaccagcctggccaacatggtgaaattctgtctctactaaaaatacaaaaattagccgggcatggtggtgcacgcctgtagtcttagctactgggaggactgaggcgggaggaacgcttgaacccgggaggcagaggttgcagtgagctgagattgtgccactgccctccagcttgggtgacagaacaagactctgtctcaaaaaaaagaaaaaagaaagaaaaagaaaaaaaatatatgttggatgttcagaagactttgtttcattttaaggtatagaataagtaactcaacagcaatgaattcatatgttgtgaacaaacaggaaacaaatgagtaattcctttcttgacggaatttctagctcttgcatcttttactctgaagttctacttcttccccggctactcctgcctacacccatcttccctttctgaactggtagtacttgtgtccaaaccactcttactgtgctttgaaaaaaaaaaaaggaactgctcagcagttcccctctctgtacactgtcctctcacagaacaagaaggtatctggtctacaagaactcgaggcctcactgaaacggaaagcaaatacaaagaaactttattttaaaaacatgtcttggtctcccaagaagagggcaattggattgctcagccaggtactgtgggtagagagaatgggatttttaaggtctggggcccaaatattaaaatctgggtttacattcatttaaagcttgtgtctggga

SEQ ID NO: 859 - DNA, 6000 bp, Homo sapiens
ctaatttttgtgtttttagtagagacggggtgtctactaaaaatacaaaccactgaacccagctaagttttgtatttttagtagagacggggttttgccgtgttggccaggctggtcttgaactcctgacctcaggtgattcacctgcctcagcctcccagagtgcttgaattatgggtgtgagccaccgtgtctggcctctacttatatcctaaagattttttttttttttttgagacatagttttgctctgtcgcccaggctggagtgcagtggcgcaatctcgggtcactgcaagctccacctcccaggttcacaccattctcctgcctcagcctcctgagtagctgggactacaggcacctgccaccacgcccggctaatttttttgtatttttagtagagatggggtttcaccgtgttagccaggatggtctcaagctgctgacctcgtgatctgcctgtctcggcctcccaaagtgctgggattacaggcatgagcctccgtgcccgactatatcctaaagattttatttatttttattttggagacagagtctcctctgtcacccaggcttgcgtgcagtggggcgatcatggctcactgcaacctctgcctcctgggttcaagcgattctcccgcctcagcctcccgaggagctgggattacaggcatgtgccaccacacccagctaatttttgtatttttagtagagatgggatttcaccatattggtcaggctggtcttgaactcctgacctcaggtgatccgcctgccttagtctcccaaagttctgggattacagacgtgagccaccacgcccggcctatcctaaagattttaaaaactgttttaaaacgacaccccacttatatttagatttgattatttacagtctttcacctcaaggccctgaagttttgaacaagagggttaagttggaagtacaagttctcgaatcaaactgctggagctcaaaatccaggttatttctaccccagccccagaaaccgtgagacgatggagaagccatttcacctctctgtgtttcaatatttatttatttatttgagctggagtcctgctctgtcccccaggctggagtgcagtggcgcgatcttggctccttgcaacctccacctcccgggttcaagcgtttcttctgcctcagtctccccagtagctgggattacaggtgcctgccaccatttctggctaattattttgtattttcttcttttttttttcagacagagtcttgctctgtggccaggctggagtgcagtggtacaatgtcggctcactgcaacctctgcctcaagttcaagctattctcctgcctcagcctccagagtagctgggactacaggcacgtgccaccatgcccagctaattttttgtagttttggtagagacagggtttcaccatgttggccaggatagtcttgatctcttgacctcgtgatccgcctgccttggcctcccaaagtgctgagattacaggcgtgagccaccgtgcccggcctattttgtattttcagtagagacagagtttcaccattttgaccaggctggtctcaaacatctgaccttaagtaatccgcccgcctcaacctcccaaagtgctgtgattacaggcgtgagccaccgtgtctggccctgtttttcaatttttaccatttacaagtactttcagaagtacttagaacaaacctaaatgactagggcaagaaattttatcatctccgtttgacacttggtgaaacagtctcaaaatgtatgactagcccaagttcatagaggtgatcaatgatgctacagttatgaaaatcagatattcatccagactttactatgacaaagattctttggccaaactttagtcagacttctgaatcttctgctaggtccatccgtgcacttccttgtaaagtctagttttagcagaaaactgagctaagtcagtttagcaagaacccctcttcctccatatctgatcaggctcctcatcctccaccatctcccaggtgatgtctgatcactgtggcctgtcttcagcaagaatcctgttagattgatttggccagagtttcacttacccctgaggtttcctcttagtaattttctatctactgaccccctacattgttccttggtgaatcagattcctgaaccattgctcaagacaaatgtctgccaaagctggtaagaacagatgtggattcttaaggtatcagtatactctggctgggtttggtggcttgcacctgtaattccagctacttaggaggctgaggcaggaggatcgcttgagcccaggagtttgaggctgcagtgagctatgatcatgccactgactctggcctaggtgacacggtaagacgctgtctcttaaaataaggaaaaaaaacgccgggcgcggtggctcacgcctgtaatcccagcactttgggaggccgaggcgggtggatcacgagatcaggagatcgagaccatcctggctaacacagtgaaaccccatttctactaaaaatacaaaaaattagccgggcgtagtggctggtgcctataatcccagctactcgggaggctgaggcaggagaatagcgtgaacccgggaggcggagcctgcagtgatccgcgatcgcgccactgcactccagcctgggcgactgagcgggacttcgtctcaaaaaaaaaaggaaagaaaagtatattctctgaaactgtgttacagtcccaggcttcttttgaaaggtaccttctgggctggatgttctttctggctctctgtgaagcctctgtattctctctattggatcttgcttctcccatgggaaattctgtcacctgaaacccttcttctctgaaaccagaaatccctactgattataacctttgccaactttgtccaccactgccagatcctttcccttctcactccagccccacagtcacttgcactttaggctccctaccctccactgggggctctgaagggactgagaggaccctccaaatcaatcacttgaggctgaaaagagagaaaaaaatgagactgttttgaaacagggcaaataaaaaaaaaagtaaaaagaattttccacaaatattggtaaaaagctttagcccttactaagtaggtaaactcaacttgtcccattttcttttttttttttttttctgaggcagattgtcgctctgtcgcccaggctggagtgcagtggcacgatctctgctcactgcaacctccgccttcagggttcaagtgattctcctgcctctgcctccctagtagctgggactacaggtgcccgccaccaggcccggctcatttttttctatttttagtagagatgggctttcactatgttggccaggctagtcaaagtgctaggattacaggtatgagtcaccgcacccggccaagtattcctatttttatggcaatatagttatttgcataatttctataaaaatgtgttctcctgtaacaagacataattggaggcactggttgtattaaccaggttttgactggaatgtcatattttcaaacatgaccagatggcattaaggagctatggttgactttatggagccaataaagtcttcgtttgaaaaactggcctgattgttcccagacttacaggtgagtggcctgagtggccgggcgcgggggctcacacctgtaatcccagcactttgggaggccgaggcaggtggatcacgagatcaggagttcaataccaacctggccaagatggtgaaaccccatctctactaaaaatacaaaaaaaaaaaaaaaaaaaaattagccaggcgtggtggcaggtgcctgtaatcccagctattcaggaggctgaggccgagaattgcttgaatccaagaggcagaagttgtagtgagctgagatcacgccactgcactccagcctgggcgacggagtgagactccgtctcaataaacaaacaaaaacaaacaaaaaagccaaaaaaaaaaaaaaaaaagaaccacagatgagtaaggaatgtcactctctggcaggcccaggaacttcagtgtattttagggacccccaagaagagaggaatacagtcaaatctctaagtgtttcagatgtagcctgatggctaatagtttaagatgtagttcaggtaatccatgaagatttcctgaaggaagttcgcatgaatgtgagagggcaattaacttttataatttttattgagcacgtagtatatacttgtcagatgctcttctacacattttacaaatgattcttaatcctcacaacagatctttgattaggtttttaaggaaaactagttctttccaaaataacctaatgatcacaaaacatatagaacatacaactctgcatcttgactatggtgcgtaggtctacatgtgataaaatgacattgaactatacacacatcatacaactatcaaatccctccttttgagattgtactagaattatgtaatatgcaaccattgggggaaactgggtaaagagtaaattggatctctctgtactatctttgagtagtgtttaggtattttataaaaataatgtcctacagtttgggtttgtcaaatggttttctcatagttagataggggttatggcttttggagagaaagaccacagaggtctgtagtatattttcaactgtaatctatttcaaaataaaaagttttaaaaaaattctccaaggggggatgattagtaaattgattagtcctttctagacctccaacacaccccaccacacactcacacagacccacactcctattaattccggtaactcgggttgtttggaatgtggatagagaaactaagcttaactatgcgcttccagcacctcgtatctggtacttctgttcaacagaaagccttgggaatggggagggcaggcgtggtaaaaggtacaggtttgggaaggtcgctcggttccttccaatccaaacgagaggcttctgattgtttattctcacaccagagccgtgaccgagacccagaggtccgcttccggccacggccgaacagctgcaccgtgcgtaccgggaacggtcaaggcgcagctggaaccgctgcaaaaggcctccgggcgtaccggacaggtcgcaagggcgggggtccccacctagcggaaatgcacggaggccaacccctccccctgcccccgcgaggagcggggcggactcggcagccgccactccccaggctcacaggaagaaactgggacgctgcggacgcggaactggccagacccgcggcgcgtggcacgcgcgagccctcccgcgcatgctccacccgccggcctccagcccgcgccccgggccccgcctccctccctgcttctccccctctcccgtcagcctccctccgagtttggcccctccggccgggcgatcgacgttccgcgtgcgtgcgggcgcctgacttcacttccggctaacgcgctcggcttgccccctggccccggatggtgactggtggtggtgctgcacctcccgggactgtcactgagccgcttcccagtgtgattgtgctgagcgcaggccggaagatggcggctgcggctgcggcggcctcgggccccggctgctcctcggcggcgggggcgggggcggccggggtctcagagtggctggtgctgcgggacggctgcatgcactgcgacgccgacgggctgcacagcctgtcctaccaccctgcgctcaacgccatcctggccgtcactagccgcgggaccatcaaagtcatcgacggcacctcgggggccacactgcaggcctccgcgctcagtggtgagtcttccgcacgccgggcgggcgcgaagccggggaaagaagccgtccagccccggggctcggcctcgcgactcggggaagcgagatggcgagagggcagggctgggggttcgggcccagccgtgaagggaggcccggaagctgatggagggggaccttaggacttggcttt

SEQ ID NO: 860 - DNA, 6000 bp, Homo sapiens
ggctcactgcaacctctgcctcctgggttcaagcgattctcccgcctcagcctcccgaggagctgggattacaggcatgtgccaccacacccagctaatttttgtatttttagtagagatgggatttcaccatattggtcaggctggtcttgaactcctgacctcaggtgatccgcctgccttagtctcccaaagttctgggattacagacgtgagccaccacgcccggcctatcctaaagattttaaaaactgttttaaaacgacaccccacttatatttagatttgattatttacagtctttcacctcaaggccctgaagttttgaacaagagggttaagttggaagtacaagttctcgaatcaaactgctggagctcaaaatccaggttatttctaccccagccccagaaaccgtgagacgatggagaagccatttcacctctctgtgtttcaatatttatttatttatttgagctggagtcctgctctgtcccccaggctggagtgcagtggcgcgatcttggctccttgcaacctccacctcccgggttcaagcgtttcttctgcctcagtctccccagtagctgggattacaggtgcctgccaccatttctggctaattattttgtattttcttcttttttttttcagacagagtcttgctctgtggccaggctggagtgcagtggtacaatgtcggctcactgcaacctctgcctcaagttcaagctattctcctgcctcagcctccagagtagctgggactacaggcacgtgccaccatgcccagctaattttttgtagttttggtagagacagggtttcaccatgttggccaggatagtcttgatctcttgacctcgtgatccgcctgccttggcctcccaaagtgctgagattacaggcgtgagccaccgtgcccggcctattttgtattttcagtagagacagagtttcaccattttgaccaggctggtctcaaacatctgaccttaagtaatccgcccgcctcaacctcccaaagtgctgtgattacaggcgtgagccaccgtgtctggccctgtttttcaatttttaccatttacaagtactttcagaagtacttagaacaaacctaaatgactagggcaagaaattttatcatctccgtttgacacttggtgaaacagtctcaaaatgtatgactagcccaagttcatagaggtgatcaatgatgctacagttatgaaaatcagatattcatccagactttactatgacaaagattctttggccaaactttagtcagacttctgaatcttctgctaggtccatccgtgcacttccttgtaaagtctagttttagcagaaaactgagctaagtcagtttagcaagaacccctcttcctccatatctgatcaggctcctcatcctccaccatctcccaggtgatgtctgatcactgtggcctgtcttcagcaagaatcctgttagattgatttggccagagtttcacttacccctgaggtttcctcttagtaattttctatctactgaccccctacattgttccttggtgaatcagattcctgaaccattgctcaagacaaatgtctgccaaagctggtaagaacagatgtggattcttaaggtatcagtatactctggctgggtttggtggcttgcacctgtaattccagctacttaggaggctgaggcaggaggatcgcttgagcccaggagtttgaggctgcagtgagctatgatcatgccactgactctggcctaggtgacacggtaagacgctgtctcttaaaataaggaaaaaaaacgccgggcgcggtggctcacgcctgtaatcccagcactttgggaggccgaggcgggtggatcacgagatcaggagatcgagaccatcctggctaacacagtgaaaccccatttctactaaaaatacaaaaaattagccgggcgtagtggctggtgcctataatcccagctactcgggaggctgaggcaggagaatagcgtgaacccgggaggcggagcctgcagtgatccgcgatcgcgccactgcactccagcctgggcgactgagcgggacttcgtctcaaaaaaaaaaggaaagaaaagtatattctctgaaactgtgttacagtcccaggcttcttttgaaaggtaccttctgggctggatgttctttctggctctctgtgaagcctctgtattctctctattggatcttgcttctcccatgggaaattctgtcacctgaaacccttcttctctgaaaccagaaatccctactgattataacctttgccaactttgtccaccactgccagatcctttcccttctcactccagccccacagtcacttgcactttaggctccctaccctccactgggggctctgaagggactgagaggaccctccaaatcaatcacttgaggctgaaaagagagaaaaaaatgagactgttttgaaacagggcaaataaaaaaaaaagtaaaaagaattttccacaaatattggtaaaaagctttagcccttactaagtaggtaaactcaacttgtcccattttcttttttttttttttttctgaggcagattgtcgctctgtcgcccaggctggagtgcagtggcacgatctctgctcactgcaacctccgccttcagggttcaagtgattctcctgcctctgcctccctagtagctgggactacaggtgcccgccaccaggcccggctcatttttttctatttttagtagagatgggctttcactatgttggccaggctagtcaaagtgctaggattacaggtatgagtcaccgcacccggccaagtattcctatttttatggcaatatagttatttgcataatttctataaaaatgtgttctcctgtaacaagacataattggaggcactggttgtattaaccaggttttgactggaatgtcatattttcaaacatgaccagatggcattaaggagctatggttgactttatggagccaataaagtcttcgtttgaaaaactggcctgattgttcccagacttacaggtgagtggcctgagtggccgggcgcgggggctcacacctgtaatcccagcactttgggaggccgaggcaggtggatcacgagatcaggagttcaataccaacctggccaagatggtgaaaccccatctctactaaaaatacaaaaaaaaaaaaaaaaaaaaattagccaggcgtggtggcaggtgcctgtaatcccagctattcaggaggctgaggccgagaattgcttgaatccaagaggcagaagttgtagtgagctgagatcacgccactgcactccagcctgggcgacggagtgagactccgtctcaataaacaaacaaaaacaaacaaaaaagccaaaaaaaaaaaaaaaaaagaaccacagatgagtaaggaatgtcactctctggcaggcccaggaacttcagtgtattttagggacccccaagaagagaggaatacagtcaaatctctaagtgtttcagatgtagcctgatggctaatagtttaagatgtagttcaggtaatccatgaagatttcctgaaggaagttcgcatgaatgtgagagggcaattaacttttataatttttattgagcacgtagtatatacttgtcagatgctcttctacacattttacaaatgattcttaatcctcacaacagatctttgattaggtttttaaggaaaactagttctttccaaaataacctaatgatcacaaaacatatagaacatacaactctgcatcttgactatggtgcgtaggtctacatgtgataaaatgacattgaactatacacacatcatacaactatcaaatccctccttttgagattgtactagaattatgtaatatgcaaccattgggggaaactgggtaaagagtaaattggatctctctgtactatctttgagtagtgtttaggtattttataaaaataatgtcctacagtttgggtttgtcaaatggttttctcatagttagataggggttatggcttttggagagaaagaccacagaggtctgtagtatattttcaactgtaatctatttcaaaataaaaagttttaaaaaaattctccaaggggggatgattagtaaattgattagtcctttctagacctccaacacaccccaccacacactcacacagacccacactcctattaattccggtaactcgggttgtttggaatgtggatagagaaactaagcttaactatgcgcttccagcacctcgtatctggtacttctgttcaacagaaagccttgggaatggggagggcaggcgtggtaaaaggtacaggtttgggaaggtcgctcggttccttccaatccaaacgagaggcttctgattgtttattctcacaccagagccgtgaccgagacccagaggtccgcttccggccacggccgaacagctgcaccgtgcgtaccgggaacggtcaaggcgcagctggaaccgctgcaaaaggcctccgggcgtaccggacaggtcgcaagggcgggggtccccacctagcggaaatgcacggaggccaacccctccccctgcccccgcgaggagcggggcggactcggcagccgccactccccaggctcacaggaagaaactgggacgctgcggacgcggaactggccagacccgcggcgcgtggcacgcgcgagccctcccgcgcatgctccacccgccggcctccagcccgcgccccgggccccgcctccctccctgcttctccccctctcccgtcagcctccctccgagtttggcccctccggccgggcgatcgacgttccgcgtgcgtgcgggcgcctgacttcacttccggctaacgcgctcggcttgccccctggccccggatggtgactggtggtggtgctgcacctcccgggactgtcactgagccgcttcccagtgtgattgtgctgagcgcaggccggaagatggcggctgcggctgcggcggcctcgggccccggctgctcctcggcggcgggggcgggggcggccggggtctcagagtggctggtgctgcgggacggctgcatgcactgcgacgccgacgggctgcacagcctgtcctaccaccctgcgctcaacgccatcctggccgtcactagccgcgggaccatcaaagtcatcgacggcacctcgggggccacactgcaggcctccgcgctcagtggtgagtcttccgcacgccgggcgggcgcgaagccggggaaagaagccgtccagccccggggctcggcctcgcgactcggggaagcgagatggcgagagggcagggctgggggttcgggcccagccgtgaagggaggcccggaagctgatggagggggaccttaggacttggctttttcagcggctgcagttgggaggaaagaccggcgagtcagggagtggtgggaggggagttgcctttcgggcctggagcgtccggtctggcttggtcctccgcgagaggtgaggagaccttggagcttggcaccggaggaagcgaggcccgggtaggccctggagaggctgtcggtcctgcgtccggttagatgagagcgaaaggctggaagggttgaccccgggcggagaggctggtggccggaggcgaggggcggggagcgtctgagccggcaaccaagccctcccttgtgggagaggagccggcagtctgctgttctcaggtcccgcagtgcgggggacagaccgcgggctgtgcgcccagcgtgggggtgggggtggggtgggggtggggtgggtcgtggtgggggtggggagggaagtaggcgggccagctgcctgaactgcttggtcgacgactgtaggactctgcggacgccgaagacgactagacctggtccccttgctcggggcttccaacttctacgccccagtgacgagaaagtcaggacctgtggtgtatgaaatagattcctttgggtttgtaacttcaggctgtct

SEQ ID NO: 861 - DNA, 6000 bp, Homo sapiens
tacacatacttagtgtatacaattcggtaagtttagaacatcaactcctttttaaagcaactcttttggggagcagttgagcagaatagggatttaaataattttttcctttgaagattagaggatcattgtgtcattaattttataatctagtattgaaattaattccattttactaatattttgaaaaagcaattaatagcagagtttatctcttaataaaagatttatttccacagattaaacacatcacatatttaagcttaaaataatggagttactaaatgtcagagttttaaaataattaaaagagaagtgctgcttaccctacattgcatcaggagtaaagtgttatcagatatgttgctttagtccacaatagtgatgaatgaaccttttctcttcacggagggcttgtgaacaaaagctgaacaagcttcatatcaaagatggcaaatgttttcagtatatcctgaagggatgtatcttcgctgttagtaatctgtggtaaatttcactgtaactatttgatgtaaattgctagcctctgcaagtaagtcacactgtaaataggctctattttttagtttttttaggttttttatatgctgaatcacatatttcctccaaaatgctaatgtttatggttatttcttttgaattttctgtctgatgaacctttacactgttctttttcttttcagctgtttgaagatacttttccccattgaaatgttttagttccaaatgcagaaagtgattttattcctctccctactaccagttactactataaaaatgaaaaaaattgtttattggcataagttttgtaatgtcacacacccgcatctgtagctgttgatgacaattccaagatagtcttcaagctatgcataaatcagcaaacaggcccttttgaggattggaaggatagtgacttcacttgcctggttgtaagctgtaacactgattaaacatgcatttggtgcttgctgagtaaaggagctgcaagctgcacttggagacatggtgttgcataacagcgtgttgtgcctctgttctttgtcaggcaggcgcacattgaatcctgtaataacaatgaagtatgtgtaaaggagctaaatttgaagacatctaagggttttctgatgaagctcttcatggcaaaaatagaatgaaagaattcaagattgaagtagtttttatgttgttttgtgctttaacaggcaggtttttattaagggtttattatctttatccattcttgttgcttgctgaccaccggtacacattaatttacaataaaagcacatgtcttaaaaggagagcataaatcagctctacattagttttccaagttctcctcttggttgggggggtcttcaaaatctttaaaaaaaaaaaaaaaataaggccggcacagtggctcacacctgtaatcccagcactttgggaggccaaggccggtggatcacctgagttcaagggtttgcctggccaacatggtgaaaccctgtctctactgaaaatacaaaaaaattagccaggtgtagtggcgggtgcctgttatcccagctgcttggaaggctgaggcaggagaattgcctgaacccgggaggcggaggttgcagtgagccgagatcacgccactgcactccagcctgggcaacagggtgagacttcatctcaaaaaaataatgacaacaataataataaatccgatataaataacacatgtcaggttccagacataggcatagattgtcatatgcattaatatagaatttgacttaaagaaaagcatacttacgtaactaatggttgtcaagaaaaatacagaaatacaaaaaacttgatatttttagtttaaaatgaagaaatttgatatcttgagatattttttaaagtacagtaatgaaatttaaagttctttttaaaattttaaagatttttgtaaaataaacacacaattttatctctcacattttttggactattcccagtctcgtgtgccagtgcttattattaccttgttttgctagcttttgccttcatactccttgatatgaagagaatatcttcttctatttccataatgtaagattcccagttggcctctcctaatgctaactcaatagagtaaaatatataccagttaaataagagggaatagcatgtttcatttatttcagaggagctgtgttgttttctctatgcccttttgtttacatgtgaatataatgtaactatatattttttcttttttcttcttcagtcatagtcttctctgccacccgggctggagtgcagtggtgtgctcatagggcactgcagccttcaattcttaggctcaaacatcctcctgattagctgggactacaggcacctgccaccatgcccagctaagttttaaaattttttgtagaaataggttctcattatgttgcccaggctagtttcaaaactcctggccttaagcaatcctcttgtctcagcctcctgagtcactgggattgcatacataagccactgtgcccgacttttttttttttatgcaacatctcgtgctttataaattgacctgcaagtaggccgggggcggtggctcacacctgtaatcccagcactttgggaggccgaggcgggtggatcacgaggtcaggaggtcgagaccagcctggccaacatagtgaaaccccatctctactaaaaatacaaaaattagccgggcgtggtggcacgtgcctgtagtcccagctacttgggaggctgaggctggagagtaacttgtacccgggagacagaggttgcagtgagccgagaccatgccattgcactgcagcctgggtgacggagtgagactacatctcaaaaaaaaaaaaattgacctccaagtaacatacttttttttttttttcttttttctttttttgagatggagtctagctctgttgcccaggctggaggacagtggcacgatcttggctcactgcaacctccacttcccaagctcaagtgattctcctgcctcagcgacctgagtagctgggtctacaggcgtgtcagcacgcctggttaatttttgtatttttagtagaggctgggtttcaccatgttaaccaggcaggtctgcaacttctgacctcaaatgatctgcccacctcggcctcccaaatatctgggattacaggcatgagccactgtgcccgctcatgagtgatatactttctaattagtattcattaattatgaaatttgaaatcgttcgatttcattttattttgatttttttttagttgtaaattatattcaaggttttttttgaacctaaagttttttttaaagtttctgggattatcttttatgtttatatgaagaaataatgctttaatcatgtatatatatatatatatttatttatttatttctagattttgctgggggcagtgctcacgcctataatcccagcgctttgggaggctgaggcgggcggatcacgaggtcaggagttcgagaccagcctggccaacatggtgaaaccccgtctttactaaaaatacaaaaactagccaggcgtggtggtgggcccctgtaatcgcagctactcgggaggctgaggcaggagaattggttgaacccgggaggtgaaggttgcagtgagccgagatcatgccattgcactccagcctgagtgacagagtgagactccaacttaaaaaaaaataaaattattattatttctagattttaacaattggaattatcagttatatttgtgcttgcaaatttgtgggatctctttttccccttctcttccttattgaactttagcatgctagactgtcttcattattcatgtatggagaagaagattctcattttgtggttttggttgttcttaataccttcataataatttaatttttaaaacataaacatatcttgtattacttgtattcttttataattttatctaaattgctgttgagtatttttaggttcacagaaaattgagcagatagtacagagttcccatatatgcagttcctactcacagtttacttattcatattttgcattagtgtagtacatataattgatgaactaatagtggtatgttatttttaactaaatttatagttgaaattcgagttcgctctttatgttctacagttgtgtgggttttgacaaatgcgcaattttatgtattccaccatgacaggatcacacagaagagtttactgccctaagaaattctattaatcctgcatcccttcctaatccccagacctctggtaaccactgttctttgtactgtctccatagttgtgcctttttcagaatgtcatatagttgtaatcataagatctagccttttagattggcttctttcatttaataatatacatttaagttttgtccatgtgttttcatggcttggtggctgcttccttttttatcgctgaaaaatattccattgtatgaacatgtaagtgtttattcattcaccttttgaagaacatcttgattgcttcctttttttggcatttatgaatagatctgctataaacattcacatacagatttttattcccagttttgtttcactgatctatttgtttattctttcgtgagtaccacattgtcttaattgtcgcagcattatagtcaggtggtcaagtcatatagtgtcagtcctctgactttgttcttcaatgttgtgctggctatgctacgtattttgcctttccatagaaacttaatcatttgattgatagccacaaaataacttgctggggttttggttggaacaatgtgtcctctgttctgtttctctttgtatgttacatgaagagggttgagaacggtgaaatactatgtgcactactttgctaaatgagtttataaagcagtgcaaatggtaatctttgggtacctggctatatttttatcagtataaattctgatttttcaaatatttcgatgtagacagggaaatcattcaaaactgtggattccattccagcagatgtagctaaaatgggggggcaggagaaaactgtggaatagggaaggttttttctaaggcttcattattgtgccagtctcaagttgaaaagaggctacatgattgtacattcaagtcttatgttttcctatatttgaaaaataaaaacatttataaaatatatgcaatgtttactgggtgcttttcctcgtattagtgttttaaagcaattgaagaaaataaatatttcagtataaaaaggagcaaatgtatatgaataagtacttaagagaaaaaaattttagtgacagctttaatggttgataattcggtacccttcagttcacccatttaaagtatacaattcattgatttttattatagtcacaaatgtgtacaactgttaccaaagtgaatttgataatttttttttttcacctcataaagaaccctgtacccttggccaggcacatttgctcatgcctgtaatcccagcactttgggaggcccaggtgggcggatcacttgaggtcaggagttcgagaccagcctggccaacatggtgaaccttgtctctactaaaaataaaaaaatgagccgagtgtggtggtgggcgcctgtaatcccagctacttgggaggctaagacaggagaatcgcttgaacccgggaggcggaggttgcagtgagctgagactgtgccattgcactccagcctgggcaacaagagtgaaactctgtctcaaaaaacaaaaaacaaacaaaccctgtaccctttagttatcatcttccatcccctcatcttctctagcactaagcggctgataatctactttctatccttatatagagttgccttttctgaatattttatgtaaattggatcatataatatgtggtctttttaaattggctttttccatgcagcaaaatgttttcagggtttattgatgttgaatgtatcagtagttgataacttcttcgggctgaaca

SEQ ID NO: 862 - DNA, 6000 bp, Homo sapiens
aggcgggtcagtgctggggtgaggagggaagaaccagcgggccctctccgcgtcctctccctcctctccctcctgggctacaggcctgcggggagccgagcgcgcagccccgccggcctgaactctgggcccgccgcgtgggggcgctggcgtgcagacccggcggagccatggggcccgggacgcgcaacctctccaaagccccattgcaaaacaacccggcggtggagctccgcggctccctgaacccaaagccgcgagcccgtcccctcgccccgtggccctgcccgccgcgcccgcgcccctccgcacccaggcgaaggggcccaggaagggactccaggactaaggcgggaccgcgggcggggacgcagggccgggggtcgcagggaggctgccagcgcccgggcccggatacccgccccaaatcccgcctggtcccggcgccacccgggccgactcgcctctgtgccggcctccaggctggccccgagcccctgtgctcgttcttttcgtttgaacaagatccctcgtgagcccgcggcctctaaaccgtttgctcttgtgggccctccaggctgccgcgtgggtctcaaggtgaaggcctggagggcagaggggtggcggtgaccccgttgctccagctctcggggcctgtgactgccccagccacgtgcggcgcgggcgacgccgcggttcgcgcggttccaagagtgcgaccgcccggagcccagcgcctctcaaccttgcccgggctcggaacgtcgcggggcgtgttctccgacacagagaattcgtgtgagccgactggcctcgccctgacctgcccctcttaggacaacacggaaaaccgctggtgcagggtttgcgagtagctggttgcgtccgccgggacccgacagaccggcaggtacgaggggcaggtggggaggcaccggagcctcagcgcagccccgcccggcaccacctgcccgctttcaacgaaacacgtcgcccaggcccagagaactccgggactgtctggggaacgcgccaggcccatgtcggctggggcgctcggagctgggagagggcggagagcctccatccaggccggagcatcccagagcccgaggtgcggagcagcatggagcgcccgaggcgggcggcgccagggccagagtctacccaggggatttctgccgcctttataggctggaaaaataaagatcaaaaacaaaccgaaaaaaaaaagctctggtcccctgacttggcaccgagcacccgcccccttctctttttccctctgtcacaaacaaggtttctgatttgcccagaacaaaggcctacccatccgctggccttggaaatagccagagagcagctccttcttcctagattaccctattctttgcgaaacggccccatcccaaaaccagggaagccctcgggaggccagtgggctgacttcttcctttgcccagaagtgcacccgctgggcgcggtgtgccagccctgggctgcccaatgggcgccggacagtaggtgccttctggctctgtcctgggcgcttcctgcccaactccaggcacaaagaccccaaactgtccctgacaattcgtctgggacaaagctattccatcagcctgagatcactggggagcacccacccacccctgctgctgctttccagaaagtctcatcctcccagggacttcagggaagcttggaggtgaaaggaggtgtttcagtaaagctcaaatttccatggttccgaaaaggtttctccccctagccatggagtttctcccgtttttgctggataaaaagcaagcacaagcctcttgggaatgggtctttggacaggaaggaggacagggattccggagattggagtgaggtagaaccaaaagtttcggcaccccgtaggcctctcagcaattgctctgggcactgcaactagggggctgagattgtcattggctcaggctggctattaaatcctcatccagacacctcccaagtattctgttctgtggcaaagactatcggggaatgggccaggcagggaaggggctaaggagtgtgaggagaccctcattcagcatgtaacccagctactgctgctaccaagaggttctggcccagatgtgctggaaccagttttctacatacatgggggaggaggagaatgaggggcatattgacacacacccatacatcgggtaacggtgctccaggttttcagtgcttcctctgtaatgacttttcatatggcacacagtatgttatccacggtggcaggccccatgtctgttctgttctctctgtgctgcttagtgttgcctggaggctcctggcaggtctgattcatgggcttagggcccaggggctgcaaagagggcagcacttggaggaacagtgagtctgaagctccagaaaaatctgctttcactgaacataggcgggacccagtcctgggggaagtttaatcttaaagcttcatgggtcagaggagtggcacattcatggtgaaggctgtggctgaggttgcagagattgtatgctttttcagggttagtgttcttagacccaccccatcccagaaccagcaggaacttgagagattacccaggcttcaatctaatagtggaagagaatgaagagcagactggggactggcccagggtctcataccaggaagtgactgcctggtctcactcacccacaccagaccagggtgctcctctgcagccccagcctaagcacgctaagatgtaagatggccattgccagggctgggaccagccagccaggtgaatccttttaaccacgtagctgaaggagacgtgctgaaaagagtacgttgcacttttgttggaggtcagcaaattgggctttgaacctcatcacagtctgcggtaaattcttctccatgtctcccagggtccttagatccaactctggggcagcccctgtgcagcagtgcataggactctggatagggtggcctggacacagcagacctcctcccagcccacagatacagactctaaagatgccacctggatttctgcagaaagcttcccctttctgcacccgcactggcttgggacctactttgtcagccctgtggcctcattcaacatgccagggtaggcccctggaagctaaagtcttaagaggagtcccagggttccattctctcatgcctacaacactcccaaaggacttccggaatgctgcagcacagggaaaatttttgaaatcttgcagagaaggaaataaacacaaaggcataaatatatgccttaccatagacaccaagcaaaaccaaaagttgaacccagggctctagactcccattccgcgctcctagcacaaactccatagaaagcataaaagggtgggaaagaaggaactggcctagactcgggttccatagccctagactggctgagggcagagcccaggatttgtgctggcttgggtcaggcactgagtatggccctaggagctcctggcctgcagcagctgaggggggaagaggaggaaactgaaggaagtggaaaggacatgtccgggaaggagctaagccccgggcttttcaaaacgtagagcaagaacacacccatcctcagttctcccacctttgtgcgagcccttctcccacaggaccagcaccacatgtttccattggcaccctgacaaagaagcaaaaaacaggacccccttttaaagcacctcatcccggagctcagcgagccggttcccaggctggagtggccaggagccgagccgatccccagcggcgaagcgggaggactgggaatcttgcctccgttctcctccccgaccacccaccggggaagccccaccaccgtcctagagtccctgccgtcgcccctctcccccgccccggtgggcagactgcgggtctgcgccgtccggggttctgcgtcgcagctgccggccggagtcagcttccatagaggccacacggaactgcctggcgctcctcgggctgtgggacccgtggggttaagtctgagtccccgcccggcgaggagcagagagcgcagagttggggcggtacaggccgccaggcagccggcggggctaggagagggaggaaaggcgggatcctccgggaagtcgattctccggcgtccgcctgcggccactgccaaatcttccccatttctttcgtctactccctccccttttccctcgaggaccgctgagtccagagtttctaggatgggggtggggcgctgtcagcagaaaaagccaagtctttgggcggcacccgagcacgtccaaactctcccatcccactggcctgcgccggggtagaatgtgcccggtgaacagagagcctgggagggacgcggtgacctggggagaaggggaaccctgtagggtctgggcgaggctgcagagccctctcctagccaaagctgcccaaactttcttcccctggagtctccttccacccctctccctccccttcctcctggacacccccttaaacggtctccgccttcccttctctcctcttctctccccacctcgatccaccccttttcgtcttcgcccgctccccccgctctcctgtcctcctcctccctccctctttgggcatccgccccgtcaatctccgccgccgccggccccaacccggcccctctccgcctcccaggctctcagagcgccccaggctccagtagagccgccctcagttctgcgcggagcggggcgatctgtcagcggagccggccggggggagccgcccggcccgccgaggctcgggttaccagtgactgacagcgtctccatggcgaataatttgactccgactattgtctggcgctggcaggccccgggtcagataaccggaccaatcagggcgcgggccgccgcgcctcatgcccgcttagaataatattattaagaaagctgagagccagctagacgggagggagaacgagtgagaagcgagcgagggaacggcgggcgggcgcggagcatgcggagcggcgccccgggcggcccccgggcttgggcgagggcttgggccaggcgcgcgggccgttggggttcggagcttcgtgggacccgcggccggcgcggggacgtacggcagtgactcggggctcaccgggggccagtgccgggccagggggccagccccgcccgcgtctcggcccggacggcccggcgaggaagctcccatgcgggaccgcgcggcccggtgagggcgcgcgcgggcgggcggggacgcagccggcaccatgtccatgctgcccaccttcggcttcacgcaggagcaagtggcgtgcgtgtgcgaggtgctgcagcagggcggcaacatcgagcggctgggccgcttcctgtggtcgctgcccgcctgcgagcaccttcacaagaatgaaagcgtgctcaaggccaaggccgtggtggccttccaccgcggcaacttccgcgagctctacaagatcctggagagccaccagttctcgccgcacaaccacgccaagctgcagcagctgtggctcaaggcacactacatcgaggcggagaagctgcgcggccgacccctgggcgccgtgggcaaataccgcgtgcgccgcaaattcccgctgccgcgctccatctgggacggcgaggagaccagctactgcttcaaggaaaagagtcgcagcgtgctgcgcgagtggtacgcgcacaacccctacccttcaccccgcgagaagcgtgagctggcggaggccacgggcctcaccaccacacaggtcagcaactggttcaagaaccggcggcagcgcgaccgggcggccgaggccaaggaaaggtacgagtaagtagaccttcttcggcgccagctccccggggcccaagggaggggttcgcagggcttctgccggtcccccggagaggcctaaactgggcccccaggcccggccacagcccagcggcagcccggcctgacttggacgatgcttaggcctttctatgccg

SEQ ID NO: 863 - DNA, 6000 bp, Homo sapiens
accggcaaatccgcgcagcgcatcgcgcccagtctcggagactgcaaccaccgccaaggagtacgcgcggcaggaaacttctgcggcccaatttcttccccagctttggcatctccgaaggcacgtacccgccctcggcacaagctctctcgtcttccacttcgacctcgaggtggagaaagaggctggcaagggctgtgcgcgtcgctggtgtggggagggcagcaggctgcccctccccgcttctgcagcgagttttcccagccaggaaaagggagggagctgtttcaggaatttcagtgccttcacctagcgactgacacaagtcgtgtgtataggaaggcgtctggctgtttcgggactcaccagagagcatcgccaaccagaacggcccacccggggtgtcgagtcttggtagggaaatcagacacagctgcactcccggcccgcgggccttgtggcatataaccatttatatatttatgatttctaattttattataaaataaaagcagaaatatttcccgaagaacattcacatgagggcattacggggagacggcaagtcggcggctcggggggcgcgctcagccgggagcgctgtagtcacagtcccgggaggaagagcgcggtgtggcggggcctcgccaagagagaaggaggaggggcgtatgacgaggcggcgtttaggggcttctgtggcgctgccctttctctctcacttaagttactagacgaaaagctgacacctgcagctcccactgacccacatgggcgagggaaaaggcctcaggagatggcctaggttcaaagtccctgtattttctctcctcttccctctcccaccccctactccggtaaagcgagggccagaggtaggggcagatagaccaccagtcaggaggagaaagacaggggtacatacggagggaccaggacacagagtacaagagactggcaggagagaagagaggagaaacagagaaggagagagaaagggagagacagaaggagagaatgaacggtggcaagctagaaatctagaaggaaagcaatacaaggagagggagaaagacagaaagcagaaaaaagaaaagagaaggaagggaaaggaagaggaaagggggaaaaggcaagacaagagagggtaaaaggaagagacagagggagagagagaatgacagtggtgtataatttattcccttctgtggttcaagactcagtctccagccccaaaaggatcctaaaagtaacttgttgaaaataaatcccaaacaagaaccaacatagacagctatctgccctacccggctgttctacccgctcagcctgcgggtctttcagtacctggtggggccgcaggggcggggcgcccctggacaccgccactccacgtccccagtgtcaagtcacaaaaggcaagctcatcaaggcaaatgggttctaggagcccaggtccacgaggttggctgacatggggttgaggatggagtcctgcaggccatggtggtgttgcagtgggtccgctccacctccgcctggcaccggcactggcactgcgctggggcccggagggtggcccaggctgtgcagggacggcagcccagggggcggcgggctgaggagcagtgcggggctggatgatgagtggtctggcgtccccgatggagtcttctcatcctccgagctgcctaacaccgacttgccgctgccattcagcgggttgtggctgttagaattggagttctcgttgttctccctgcaagtgcgggagcaaagcagcggggtcagcagggacatcgagaccacccagcgccatctcagtcacagtcagagccagccaccagcctcgggagacagatcccgggcttgtggcctgcgggtgttttcggtttctaccatttcctcgacctggtctgggttctcctttctgcccgttctctccatctctcaacacccaatttctcttgcccctctgcccttatcgtccccacctctcatgctgtcaatctcatcaatatcttttctatatttcctctttccccccttccccaatatttcttttcaggaacagaggtgcaggagaacagggttccctgaagttgtggggtgagccgggaggaagagacgatgcctggattttcagatcactctaggctccacaagccaggtttgctgggtagatgtggggctagcaggttaaggaaccctggatcccaggtcaagggatttagggcctctcacaagacttcatttccctttgctttttctgcccgagggagacccctggctgggagacaggctcctggggctaagcgtcctttccctgtagctccaaactgggcagccctgtgagggctctccttgctgggcctagagacaagggtccaaggatggaggactccctttccgtggtggtacagtgaaaacgtcagctcggagaccagaagcttgggggataaagggcagcccctgggagaaggccgaggcttttccattgtaaccagccactccgggaatctgcagctctcatctggggcctggtctgagaacccaggttttcaggagtctgatcacatgccggtttgggtggagggggacccagcagagagaacccacctccttctatgcctttgactgacagctcctccccagatttggatatttaaaatcctgggtaggatctcttgtcaccagcttcgggagggtttttctttctgctttcctgggagggagcttcccacagggctggcagctgagacctcaccactgtggaaactccaacctcagggtctcagatacctggaagtatctgagcctgcagcactccccctaagatgtttctggttcagcaccctcacctctgaccctgatcattcaaactcagggtggaacacaccccatatcaccaaccccaggtgtcctgttttgctcttaccccgggctggattctgttcccataataagtttctctccaggtttgaggtcctgaggggttatagggcaggcagtggcaagggcctaatgatcaacctttaggctggttcaggaagtcctggtttacctgaggacatccaactcccagcccctctgtgcctctcagctcaccgcagacattccgacctacccatcagaggtagggcctaaggagagaggcatcaagggcctggagtgccagggaagggcggctatctctagcaaggcagaaaacagggcatgcgtctcttctctcccagaactgacacttcctccctttcacctctggatcctttctaaggagataaaggacccgctctcaactccatgtgacaacgaaaattcatggcctggcttttccccatccaggtcattctagggaagttccagccccagtcccgaccccatcacactttggcctggagctaaggctggggggaaatgccgggaagcaccaccagcaagaaatctgcaaatcccctttcatctgggctcaaacccctctgtcctgaggatgaccagacctactgtgcctgcctcacaggggatacaggcccacagttctgcgctgccccgaagctctctgcttctccacccttttcctctagcgaccgagtagttagttgacaacttcctgaattgctctgcccgctttagacaaatccctgctcgccgggtctccggcatagaaaggcctaagcatcgtccaagtcaggccgggctgccgctgggctgtggccgggcctgggggcccagtttaggcctctccgggggaccggcagaagccctgcgaacccctcccttgggccccggggagctggcgccgaagaaggtctacttactcgtacctttccttggcctcggccgcccggtcgcgctgccgccggttcttgaaccagttgctgacctgtgtggtggtgaggcccgtggcctccgccagctcacgcttctcgcggggtgaagggtaggggttgtgcgcgtaccactcgcgcagcacgctgcgactcttttccttgaagcagtagctggtctcctcgccgtcccagatggagcgcggcagcgggaatttgcggcgcacgcggtatttgcccacggcgcccaggggtcggccgcgcagcttctccgcctcgatgtagtgtgccttgagccacagctgctgcagcttggcgtggttgtgcggcgagaactggtggctctccaggatcttgtagagctcgcggaagttgccgcggtggaaggccaccacggccttggccttgagcacgctttcattcttgtgaaggtgctcgcaggcgggcagcgaccacaggaagcggcccagccgctcgatgttgccgccctgctgcagcacctcgcacacgcacgccacttgctcctgcgtgaagccgaaggtgggcagcatggacatggtgccggctgcgtccccgcccgcccgcgcgcgccctcaccgggccgcgcggtcccgcatgggagcttcctcgccgggccgtccgggccgagacgcgggcggggctggccccctggcccggcactggcccccggtgagccccgagtcactgccgtacgtccccgcgccggccgcgggtcccacgaagctccgaaccccaacggcccgcgcgcctggcccaagccctcgcccaagcccgggggccgcccggggcgccgctccgcatgctccgcgcccgcccgccgttccctcgctcgcttctcactcgttctccctcccgtctagctggctctcagctttcttaataatattattctaagcgggcatgaggcgcggcggcccgcgccctgattggtccggttatctgacccggggcctgccagcgccagacaatagtcggagtcaaattattcgccatggagacgctgtcagtcactggtaacccgagcctcggcgggccgggcggctccccccggccggctccgctgacagatcgccccgctccgcgcagaactgagggcggctctactggagcctggggcgctctgagagcctgggaggcggagaggggccgggttggggccggcggcggcggagattgacggggcggatgcccaaagagggagggaggaggaggacaggagagcggggggagcgggcgaagacgaaaaggggtggatcgaggtggggagagaagaggagagaagggaaggcggagaccgtttaagggggtgtccaggaggaaggggagggagaggggtggaaggagactccaggggaagaaagtttgggcagctttggctaggagagggctctgcagcctcgcccagaccctacagggttccccttctccccaggtcaccgcgtccctcccaggctctctgttcaccgggcacattctaccccggcgcaggccagtgggatgggagagtttggacgtgctcgggtgccgcccaaagacttggctttttctgctgacagcgccccacccccatcctagaaactctggactcagcggtcctcgagggaaaaggggagggagtagacgaaagaaatggggaagatttggcagtggccgcaggcggacgccggagaatcgacttcccggaggatcccgcctttcctccctctcctagccccgccggctgcctggcggcctgtaccgccccaactctgcgctctctgctcctcgccgggcggggactcagacttaaccccacgggtcccacagcccgaggagcgccaggcagttccgtgtggcctctatggaagctgactccggccggcagctgcgacgcagaaccccggacggcgcagacccgcagtctgcccaccggggcgggggagaggggcgacggcagggactctaggacggtggtggggcttccccggtgggtggtcggggaggagaacggaggcaagattcccagtcctcccgcttcgccgctggggatcggctcggctcctggccactccagcctgggaaccggctcgctgagctccgggatgaggtgctttaaaagggggtcctgttttttgcttctttgtcagggtgccaatggaaacatgtggtgctg

SEQ ID NO: 864 - DNA, 6000 bp, Homo sapiens
ctttttagccagcctggatccagaagtgagaatgacgctaatgggaagcagagctcccaaccaacctgccatagacttacagcatgcatgagaagaaagctttgttcttttaaggtgttgggatctggggagagcttattacagcagcatgacctagccaatcctgactaataaagggccattttgtgttgtcattttttgtttccctagtgctccaaatgacatgacatgacactactgactgttaaataaaggaccgactgaattgatctactcatctccccaggtagagtagggattatccatatagctatttatcctccctggagcacctgccctagtatcctatatatagcaagtacttagtaaagacccttggattgacatatgatcttaaaagtccaagacaggggccaggcacggtggctcacacttgtaatcccagcactttgggaggctgatgcaggaggaccactagagtccaggagttcaagaccagcttgagcaacatagtgagaccccatctctacaaaaacaatcaaaaaactttagctgggcatggtggcacatggctttagtcccagccactcaggaggctgaggtgggagaattgctcaagtctgggaggccaaggctgcagtgaactgtgattgtgtcactgtactccagcctggtcaacagagtgagactctgtcccttataaaaaaaaaatcccaagacacaacccaacatctgacccacagaagatgaagaatgttatgctattctccaaatggcatcctagtgagtagggctcacagtcacaggccctgaggaataggggcaccaggccatctccttctgcatccatcagcaagctcgatagggctgcctctgatccctccacctctttgcaggtattaagtgaagcttggcctgagtcactgcaacagaatatagagcagagatggggccagaattcggagctgagatggggccaaaataagaagacatggcagggcagacaaaagcccaccacaggagtataggtgtggggcaaagtttgaagtggggctcagggtcgggtgggggctaggctggggcaggaccagcggagctctagaaggtttctgtgtcattatactgctgcgcgttccatcccatggcccaggtggttggattctgttcagcggagcatgtgtggaatgtatgatagaccctgaccaggcagacctttgcagaagcccattaacattctataaatggcaacaaccagcacagcaacagggacatgaatattaacgcgctagtctacggttctggctcccccttccccgcttcctccagctgatctaaacagtatccacagacagtttcaattttgattatacagagtgtaaatcatcttcagacttggatcttctctttgtctaataccctgttttgaggtgagccttctggaggaaaattacagaagagaaaaatatttatccatcacaaaatcgcctttgtaaagtattaactctagttatgctgcttgcccgctggaatgtttggtgtctctccaggaaaaagttgagacccatctgcaggccctctgaggtcttaactatcaggttcctacttacttcatctcctgttactacctgccacaagtggggcacacctggccgcttacctgaagagtcatggctttcctacctgtacacattatactttttgcagccagtacccttcccttccctctttgctgctggaagaactcctgttggaaagcctagactcagctcaaaggattctgctggttgatgccttcccaggctccccaggcaaaggggtgatccttcttctgtgccactcccatccatagacctattgcaacactgatcgccctgtcctggccacatctgttgttctattcttttctcataagccttaattttgaaaggagaaaggctccattttggtcatctttgttaaattattgtatcattttcttccttctcacaaagattatgaaataactaggccatagttggaatccaaaggtcattttactcaatgtatatgctaaccactgtcttatcctttgggattggagacaggggctgagggaaggatgaagctggcaataatttcctattggaattttaccgtctaagccccctccttgggattttcttttcacatgaaacctggagcagggggttattttggacctggcatctccatgatgtccctggggaattcaacttttcatttggccaagtttgagagtaggaaggcgagagatttatttagaaataaggaggtaataagggcaggaaactagcagtgtttgcatgcagactaccagcattctccctttttatgtaaacattaatccaatacaaaacatgtattttgtttgacaaagtcttttattacccttgctccaaaagagttgctgtaatggaaaggagacaagcattggtcgcccttgagaattgcagtctggtgatttacacggagtaacagtctgctgagccagcatgctaggaaatggtgctggaagtttgtaggttgttttaagacagtcactgagatggtaacagaccctatttaatatatttgggggctgggcatggtggctcctgcctgtacaagacttacccaaagcaagtaatgagaacatatgaagcaccaattagtcaaggatccctaactccatgaaatccttgactttccagacttcccaacaggatcaggactagggtgagatgagtgacgcactcggctcaggtacaaaatttaacaggtgccaataaactcagtagtataaatattttagtgcaatatttaaaattatttaaaatgtggatattgtgtccattctggattctcacatttttatttttaaaaaattgtattaaatctttatcttgattacgtttattggtaccctttacattttgcctctgaaaagtatctcactcatctcactttggtgctggctctgcttcccaaatgcattttcagaagatcaagccatatttgccactgccttccatcacatgccctggaaagggggaaagaggcttcatgagaatagcagagtggaaggaagaagcaaaagggaaaaaagtaataatcaaagaaataaaaattaaacagcaatgagatacccctgcttgtgctttgtcaaacggacatattttaagatatcgtatctccagctgggggagtgacagggtaagacaaccattgaaatcctggctttttacatcggagctacctagatcatacggaagactgaatcttagcaccatctctacccagctgccctgttcaacagggcaggctgcgagaaattactgtattaggaagctccagagcggttgcaggcaaaggctttgcctgttcttaggagatggccctagaacttttcggatcatttttgggacgtgtttgctgcacttgatatcctgtttttccaggggactgcctccttcctcgcctttaagcctttttaggcttttaagccgcaggcaatgataacctttacccactgaggaaaaagtgatcgggaggcgcgttttaaattttggtttacactaaccagacccgccagatgaacactcagcttaccacaatacctacaaattcccagacttgacttggcagaagggcgagggcggaggttttctttccccatttgcataatccccagctccccggcagcggagccgacctcttcaccgccgccgtcttcgcgggtgtcccagctgggccgcgccccggggcccagcgctccggccctgccctcccaggttcccagtctcgggcgcggggcagtccctcgccggccgccggcccggtcccggctcccagccgaggaaatttttccccagcagcccagggctctcctcacgtgaccagccgcggcggtagcttccagcgagagtttaaaggttacggaggaaattagcaaggacacagccactcgccccccggagggcgcgccccattttcccgcagcccggacggcggctgtcagcgcgctgatcagtgccgaagtcccccaaaggggcaccgataaggaccagcgcaaacaggaacagtcactttgcaaaaaataagcagaccacaaaccaagccggggctctaccgagctttcacttgtcaacaagttctcgcagcctgcgaagtccaggacagatcccaaaggggagaatgtccccaaagaaaggcaagagagaagaacagagtttaaaacttcacccgagccatgcttgtccctcccccttccccctcccccaccgccgtggatcacagcgtcccgggacagagtgacagatgggccagaactccgcagactgctcctgcccgccgcggcccgagtgggggtgggcaagggaagggtcccgaggcctctagggcaacagggccccctccactcccccatccccggctctaaaagacagtgttggccgcagggtccccgagagatacgcggcccggcggggcccatccatggccatccacggcccccggcacgcgcatccagcccagcgccgccgcaccccggggtcccgcgcggggtccccgccccccggctgacccgcccgccgctgcgaccccgggcagcctcgccagctctccaccgttgtctcctcggctcactttttccgtattgctcccccaaccggcaaaactttctatttccccaaacactgccgtgcgcgcgcgcgcgtgcacacacacacactcacacacacacactcacacacactgacgtcttttgcgcatttcctgcattagagggagggagactcgctcgcacaccgacagagggagaggagaccgcgggggagcgcgggctggcgggcggcgagcgagcggcagccgagagcggggacgcggggagcgcggagggcgggcgccggcgcccaggaggtggggccgcgctgagtcgcagtccctgccccgccgccgcgctgcgcaccgcccggtgctggcctgcgcccccgagccggatcggcggccgcccggactccgagcccgcgcggatgtgagattccgggctcctggcgcctcccgatcgccggctccggcgcggcgctgcttcgcccaggaggcggcggccccggctggccgtggggcttgtggatttttaaaaatttggctccgaggaggaccatttcctctcgacatgcatccctccggatagactgaacatccctccgttcacccccccgccccgcgcggtcagaggcaggcgctgagtgtgcgaagaggatccgggttgaaatctgcgcccccggttctcgtccccgccccgtcccaccgccccatccccctcccggagtcgaaatttcccgggattatgtttcggaaaggtaggtaagcgccgggcgcggcgcccgctttcccgcagtccggagccggagagccagcgaggcggcgaggcagcccccgcggcttgcagcggagccgacagctcgtcttctcttctggaggtgcagctggtggtcggggggagagacttgctccaaacacggacatcccccagctctcccccctccctgttttccgttaggaacccggcgaggaaatacatgcactggctgagaatcgcccgcgccagggcgcaacgccacaaggtgtagggagtgtgcggggtggggcgaaaggggacccaagagtccctgtggctcggagtgccgggccgtcggttcttcattcctgccctcggggcagacggagtgaccccggcccccactccccgccccgaccatggtagtgttcaatggccttcttaagatcaaaatctgcgaggccgtgagcttgaagcccacagcctggtcgctgcgccatgcggtgggaccccggccgcagactttccttctcgacccctacattgccctcaatgtggacgactcgcgcatcggccaaacggccaccaagcagaagaccaacagcccggcctggcacgacgagttcgtcaccgatgtgtgcaacggacgcaagatcgagctggct

SEQ ID NO: 865 - DNA, 6000 bp, Homo sapiens
acagaagatgaagaatgttatgctattctccaaatggcatcctagtgagtagggctcacagtcacaggccctgaggaataggggcaccaggccatctccttctgcatccatcagcaagctcgatagggctgcctctgatccctccacctctttgcaggtattaagtgaagcttggcctgagtcactgcaacagaatatagagcagagatggggccagaattcggagctgagatggggccaaaataagaagacatggcagggcagacaaaagcccaccacaggagtataggtgtggggcaaagtttgaagtggggctcagggtcgggtgggggctaggctggggcaggaccagcggagctctagaaggtttctgtgtcattatactgctgcgcgttccatcccatggcccaggtggttggattctgttcagcggagcatgtgtggaatgtatgatagaccctgaccaggcagacctttgcagaagcccattaacattctataaatggcaacaaccagcacagcaacagggacatgaatattaacgcgctagtctacggttctggctcccccttccccgcttcctccagctgatctaaacagtatccacagacagtttcaattttgattatacagagtgtaaatcatcttcagacttggatcttctctttgtctaataccctgttttgaggtgagccttctggaggaaaattacagaagagaaaaatatttatccatcacaaaatcgcctttgtaaagtattaactctagttatgctgcttgcccgctggaatgtttggtgtctctccaggaaaaagttgagacccatctgcaggccctctgaggtcttaactatcaggttcctacttacttcatctcctgttactacctgccacaagtggggcacacctggccgcttacctgaagagtcatggctttcctacctgtacacattatactttttgcagccagtacccttcccttccctctttgctgctggaagaactcctgttggaaagcctagactcagctcaaaggattctgctggttgatgccttcccaggctccccaggcaaaggggtgatccttcttctgtgccactcccatccatagacctattgcaacactgatcgccctgtcctggccacatctgttgttctattcttttctcataagccttaattttgaaaggagaaaggctccattttggtcatctttgttaaattattgtatcattttcttccttctcacaaagattatgaaataactaggccatagttggaatccaaaggtcattttactcaatgtatatgctaaccactgtcttatcctttgggattggagacaggggctgagggaaggatgaagctggcaataatttcctattggaattttaccgtctaagccccctccttgggattttcttttcacatgaaacctggagcagggggttattttggacctggcatctccatgatgtccctggggaattcaacttttcatttggccaagtttgagagtaggaaggcgagagatttatttagaaataaggaggtaataagggcaggaaactagcagtgtttgcatgcagactaccagcattctccctttttatgtaaacattaatccaatacaaaacatgtattttgtttgacaaagtcttttattacccttgctccaaaagagttgctgtaatggaaaggagacaagcattggtcgcccttgagaattgcagtctggtgatttacacggagtaacagtctgctgagccagcatgctaggaaatggtgctggaagtttgtaggttgttttaagacagtcactgagatggtaacagaccctatttaatatatttgggggctgggcatggtggctcctgcctgtacaagacttacccaaagcaagtaatgagaacatatgaagcaccaattagtcaaggatccctaactccatgaaatccttgactttccagacttcccaacaggatcaggactagggtgagatgagtgacgcactcggctcaggtacaaaatttaacaggtgccaataaactcagtagtataaatattttagtgcaatatttaaaattatttaaaatgtggatattgtgtccattctggattctcacatttttatttttaaaaaattgtattaaatctttatcttgattacgtttattggtaccctttacattttgcctctgaaaagtatctcactcatctcactttggtgctggctctgcttcccaaatgcattttcagaagatcaagccatatttgccactgccttccatcacatgccctggaaagggggaaagaggcttcatgagaatagcagagtggaaggaagaagcaaaagggaaaaaagtaataatcaaagaaataaaaattaaacagcaatgagatacccctgcttgtgctttgtcaaacggacatattttaagatatcgtatctccagctgggggagtgacagggtaagacaaccattgaaatcctggctttttacatcggagctacctagatcatacggaagactgaatcttagcaccatctctacccagctgccctgttcaacagggcaggctgcgagaaattactgtattaggaagctccagagcggttgcaggcaaaggctttgcctgttcttaggagatggccctagaacttttcggatcatttttgggacgtgtttgctgcacttgatatcctgtttttccaggggactgcctccttcctcgcctttaagcctttttaggcttttaagccgcaggcaatgataacctttacccactgaggaaaaagtgatcgggaggcgcgttttaaattttggtttacactaaccagacccgccagatgaacactcagcttaccacaatacctacaaattcccagacttgacttggcagaagggcgagggcggaggttttctttccccatttgcataatccccagctccccggcagcggagccgacctcttcaccgccgccgtcttcgcgggtgtcccagctgggccgcgccccggggcccagcgctccggccctgccctcccaggttcccagtctcgggcgcggggcagtccctcgccggccgccggcccggtcccggctcccagccgaggaaatttttccccagcagcccagggctctcctcacgtgaccagccgcggcggtagcttccagcgagagtttaaaggttacggaggaaattagcaaggacacagccactcgccccccggagggcgcgccccattttcccgcagcccggacggcggctgtcagcgcgctgatcagtgccgaagtcccccaaaggggcaccgataaggaccagcgcaaacaggaacagtcactttgcaaaaaataagcagaccacaaaccaagccggggctctaccgagctttcacttgtcaacaagttctcgcagcctgcgaagtccaggacagatcccaaaggggagaatgtccccaaagaaaggcaagagagaagaacagagtttaaaacttcacccgagccatgcttgtccctcccccttccccctcccccaccgccgtggatcacagcgtcccgggacagagtgacagatgggccagaactccgcagactgctcctgcccgccgcggcccgagtgggggtgggcaagggaagggtcccgaggcctctagggcaacagggccccctccactcccccatccccggctctaaaagacagtgttggccgcagggtccccgagagatacgcggcccggcggggcccatccatggccatccacggcccccggcacgcgcatccagcccagcgccgccgcaccccggggtcccgcgcggggtccccgccccccggctgacccgcccgccgctgcgaccccgggcagcctcgccagctctccaccgttgtctcctcggctcactttttccgtattgctcccccaaccggcaaaactttctatttccccaaacactgccgtgcgcgcgcgcgcgtgcacacacacacactcacacacacacactcacacacactgacgtcttttgcgcatttcctgcattagagggagggagactcgctcgcacaccgacagagggagaggagaccgcgggggagcgcgggctggcgggcggcgagcgagcggcagccgagagcggggacgcggggagcgcggagggcgggcgccggcgcccaggaggtggggccgcgctgagtcgcagtccctgccccgccgccgcgctgcgcaccgcccggtgctggcctgcgcccccgagccggatcggcggccgcccggactccgagcccgcgcggatgtgagattccgggctcctggcgcctcccgatcgccggctccggcgcggcgctgcttcgcccaggaggcggcggccccggctggccgtggggcttgtggatttttaaaaatttggctccgaggaggaccatttcctctcgacatgcatccctccggatagactgaacatccctccgttcacccccccgccccgcgcggtcagaggcaggcgctgagtgtgcgaagaggatccgggttgaaatctgcgcccccggttctcgtccccgccccgtcccaccgccccatccccctcccggagtcgaaatttcccgggattatgtttcggaaaggtaggtaagcgccgggcgcggcgcccgctttcccgcagtccggagccggagagccagcgaggcggcgaggcagcccccgcggcttgcagcggagccgacagctcgtcttctcttctggaggtgcagctggtggtcggggggagagacttgctccaaacacggacatcccccagctctcccccctccctgttttccgttaggaacccggcgaggaaatacatgcactggctgagaatcgcccgcgccagggcgcaacgccacaaggtgtagggagtgtgcggggtggggcgaaaggggacccaagagtccctgtggctcggagtgccgggccgtcggttcttcattcctgccctcggggcagacggagtgaccccggcccccactccccgccccgaccatggtagtgttcaatggccttcttaagatcaaaatctgcgaggccgtgagcttgaagcccacagcctggtcgctgcgccatgcggtgggaccccggccgcagactttccttctcgacccctacattgccctcaatgtggacgactcgcgcatcggccaaacggccaccaagcagaagaccaacagcccggcctggcacgacgagttcgtcaccgatgtgtgcaacggacgcaagatcgagctggctgtctttcacgatgcccccataggctacgacgacttcgtggccaactgcaccatccagtttgaggagctgctgcagaacgggagccgccacttcgaggactgggtgagtgcggcgcctccccgtcattccgggaacccggttgtggggtcccggggaaagactcgctggtcttgatcgtagggctccgggacttattgacgactggggtgtgtgtgcctgtaagtctcagtttccttggggaggtacacttcacttcatagttggggagaaacaggcattggcgaggaagatgagacttggaaagaggatgtggccctctgctccctctgtgccctccagttggtgggtgctgcgggaggtttgcaaactgggagagcctgggccactggtgctgaaggttggccgaggacccggctttcttccgcaggcgcgtggtgggctggctgtgtgtgattgtgtgtgggtgggtccctccgtccttggaaaggcacgtggagcctttgactgaaggcttcttgcacgtcctggctttgtcctgcttagccgagcgaggagttgctttatttttccctccgagaggaagctggcttgtttctattctcttgcatggtggttagctcatcttctgacatacaagtagaaaaaatgtgttctcctccaggatgtctcctctatggtcccagaaacatcagtcgagcttgttttgtccaattcattgcccatccatgcagaatgaatg

SEQ ID NO: 866 - DNA, 6000 bp, Homo sapiens
taagagttcagaagtttagtgacttgatcaaagtaaaaaaaaaatccagtagaggacaggtatggtggttcacacctgtaatccaagcactttgcgaggccgaggcagggggattgcttgaggtcaagaccagcctggccaacatggcaagacactgtctctacaaaaacattttacaaattatctaggcatgacggcatgcacctgtggccccggctacttgggaggctgaggcaggaggatcacttgagcctaaaaggtcaaaggtacaatgagccatgattatgccactgtactctagcttgggtggcagagtgagaccccctgtctcaaaaaaaaaaaaaaaaaaaagaggaaaggaaaaaatccagtagagacagaaaaagtatgagtaaacaggtttcctgattcctagtaaggtacttacattgctatatcatgctgcatccagtcaccattcatccatcatgcttccatcattcatccatctctacatccatccatctgtctatgcatccatccatccatccatccatccatccatccacccacccatccattcatccatctctatatccatccatccatccacccatcaattcgtccatccatctcttcattcatccattcattcatccatctctacatccatccatccatccatctatgtatccatccatccatctattcatctatctctccatccatccatccagccagccagccagccagctggacagccaggcagccagacagcctgtcagtttattggtcatatagttgatgctaatgccatgtgtctaaaatttttagtaagggagtctgatttattattatcattattattttcaatttgcttttcagctattgactgaggttgcggcaattgaccagactaccctgtgggctgataaaacctgaaacttgtctatttggttgagattaccatttgtctgtccctcagtggctggtctttacatgtcaagaggatggtaaaaactgccataagggactgaacacagtgcctcacgcctgtaatcccagcactgtgagaggctgaggtgggaggatagcttgagccaggagtttgagaccagcctgggcaacgtagtaagagccagtctctaaaaaaatttttaaaaattagctgggtgtggtggcatgcatttgtagtctcagctgctccaggaggctgaggcaggaagactgcatgagcccaggagtttgaggctgtggtgagctatgatggcaccactctactccagcctgggcagcagagcaacagagcaagtccctgtctctaataaaaacaaacaaacaaaccaaaaaccacagtgagagatttttttttaaagactcctccactcctttttttgggttacattgtttttgttccccctactttctgaactctctggagtgtcaggatactttgacttttgtgattcaatcagcctactgcaatggtagattcttcctttcaagttgtaactcttcccttggagcagggtttcccaaaatgtgttccaaacaatataagaagtgaataggtcattcacactcaaaaacgaatgccataatcaagtgaatttggaaaaccatagagtaaatgaagctaaacatttattgcaggacttttttttacagccttcgataggctattttccatcagttttctggatggcaattgagcgagcagtgtttccaactgtatttgattgttcaacacacatttagggacagtacttacatctcttgatgtcatttgggaaacactgtcttagaatctggaccctactatttaaagttaatacgacatatttagggctgctggccaagagaaactaacatggtgaggaggaaataatcattatccatttatgttaatatttttatcataaagactaaaactttgttttttaaactaggatcccaagtgttgtttatagacacttgactacagaagagagaaaagcttaggttgaacaagtgtttgtagagtatatgaaaatagaagtgcaaacaaggcccctattagccagattttctgaataatattctaggagttcatccttgttctgtctttagtgagtgacatttataaagcagtagcaaagccaatatcatggttccagggatcgttcctatggaattacattggctgaggacagagacccactcttcctcctctttcctgaatcaggtcagggtgaatattatccaagtgcaattgaactcttgctccttctgttcacaaatcaattgttgcttgattggacccagaatgtttgctgctcatcaactctcttttgaaggtgtatctcaatatttcatttccttgtgtttattggaaaatattttttaaaagctacttgcaaagatgtaagcgtgatcattggggttgacttgcggcgaaaatgtgaaggagtcaaagactgatttcaggttttgtgcacgctccttccacttctgagcccctccaagcctggggcccagccaggattcctcacttcctcttggctgagtataaactcatttacactgaggtagatggccgtaatgagatatataagactggtgctttagaagagtgctgtggaggaggccttcctttatctggagggtgacatggcaatgtctggaattttcagatatcagtgacaggaaaagatggacttttgggtcaagaggactctgtcaaaccaggtactaactggagaccaggctatttctgagatcatactctgtgtcaagggctagggatctttacatgagccttcaattgtaagtcagggcccaactcactgtggtcagtgcatatatttctagattacctcactttggaaatgcttgtctccccactctgtgagggattagtgcttctccactttaaaggaaaaacaggtcataaattactgaggaattttatggcacagcccaaagcacagattggaggccaaggaaaaataaaactccagcttctttatgaaagtcaaatggaaaagagaagatgcttcctgaaaagaggtgggcactgcttgagggagaggagggaaaggactctgagtgagtctacaggaactccttttggtgtccttgaggagtttatgagaattctcggcctcatcttgataaacttgaaggcaaagtgaagcaggcagttgaactgtttgtctgggaaatggatgagagacatgattatttttggtagcaagattttctgtgtttggattatgcatgttataaatccagtatcttaatttccatttgccttgggtgatccatatgcctaattttaattcaatgctgattaaatgtcagagaaggaaaggaagggatgaggtgagagtttccaagcctggctgaccaggaagacagcaggcagatcttggagactggacctcatcaattataaagagaaaaatcccctgtaagttacaaaacaaaatagcacaagaaaacactctgtagatgtacattaagccgtctcctttccagaaaacgtttccccagaccaggaagacccagcgtgccccttagcaccttagcccaggccttcagctcttctcagctcacctttttctccagtgaataaacatgatgctgtttttaagtctttgcttccttgtttctagcccatgttttactccagagcagtgagggcacttgtgaccagctttggggagatgaatacactgtcatttatacataaatgcactgtcatttatcatttcagaattggagtgaattctaaatgaatcataacagttgcatttaatgaattattctcctgggtattggctaattttaaaccggtctgacgagttttaaggtccatgtggtttgaggaaattcagtggtgcatttcccggtttggtcctcctcatttccctccagccctgctccttttcaacatgccaggctgcttggctgggttatctttaatcactgtaggtgggaggaggggaggcggggaggtactgggcccaaggtcatgccagaagagttcaggcctctgcttgtcatctggcactgctcagaattcccaggggtctccggggagctggccctcagctcacagatgggcctgactttggtgagaggtggccttccaccaggaagcctccagctggcaggataggtgggtggggaggggtgaactttggctgtggaagcgtctcagcattttactcccctttttcaatagttgctgcctccactccacgcttttattcaagcagcaccggtacctggcagtagctcctacaatgttttctacattggctctaaaatcatggcctagtagacaccaatgcttgacttgtttttttgtttgtttgttttgagaagttgtttaccattggcgtgacgggattttcttggccttgtgaagtacagggagcctcaggatagcttcactgggggtgtcattacatggtcattatcagtggtaagtttcccagtctcaagatggaaccctctgttgcttctctgccgcgtgtttggctctgttgaccttccattgctcacctgtgcttgttcccccagcagcctgtttcttgtaactatttgcctcataatgcaagtattctagtgattgaagtgttgctgtgcaaaagagatcttttaaactgaaaccagtgcaacaaaacaatttaaaacattttaataatttcttaaaggatacagagccttttcctctcttaatacatgcaggtcagaatgacgtcaataaggattatatttttgcattaacaggaaaactaagtttataagactagagtatggatagagaggaagatggttctattgggatataaactctgatccatacatggaagtagcccagtccgtacaaacaccattgcctgtttcattcttgactggacatacatattgccccattgtgatgaaaggttgtgataatgaagagagtaatagaaggctcagctcaggttctaaggagggagcgagtaaaggccatgcaggcccatccttctgtggtcagtcactgctggttggggaaggaaggaggtatcaagtgtctccattctttcctcttttcttcatagtttctagatcattcatttaataaatcattagggagcccctgccatcaagctaggtcttgggatataaccaggaacatgcctagataggtaccctaatctcagagggctcatgctccaattgggggacagatactcaaacaggcaattatgacatagttcataaagccctgtgatgtatgccaccagagtacccaaaagggccccaaactagacatggggagttggggaaggcttttgggagaaggcgacatttcagcagagacctgaaaggagaaactggagacagtttaatgtgactactgcgaagtactgtggggggtgggagtaggttgggggcatggggacaagtaagctgttttttgtcagctgccattgatcttcctccctctcctcctccctccctgcttccttccttctttccgatttaaccctggaatcacgagaggccactttaggtggatagcaactcttgaatttgggctttattctgagggttatggaggagccagtgaaggttttttttttgtttttttttttgttgttgttgtttttttttttttttgagacggagtctcgctctgtcgcccaggccggactgcggactgcagtggcgcaatctcagctcactgcaagctccgcttcccgggttcccgccattctcctgcctcagcctcccgagtagctgggactacaggcgcccgccaccgcgcccggctaattttttgtatttttagtagagacggggtttcaccttgttagccaggatggtctcgatctcctgacctcatgatccacccgcctcggcctcccaaagcagtgaaggttttttaagcagagaaataacctgatcagattcaaattgtatcaccctgtgggatggactagacatggattagaacattaggaaactgctttaggtatttagcct

SEQ ID NO: 867 - DNA, 6000 bp, Homo sapiens
gcaattaactacaaacttctaagtcctagaaaagatttcaagtatttatagagtgagcaacgatcattttcctagtcaaatagtatggcaaaaatcactgttttaaaaagttgtggcattaaactataaatcctccctcccctcgcttcccacccgcaattatgaaagaaaagcatatgacaatgcctactgggctcagcttttgggctaattgagtctgactgagccttcttagcaggttcctgtcttttgaaacctcaaatcccaaaaagctgtctaataattttacttttttagggactaagaccaggtattttcagcagaggttcttacttttctgtaattgaggcgcaactataatgttccagaacacaatcttaaatctgaaagtgagaggaagaaaaaaaaaaaaacggcctgagctccagaaatagctgacccagaagaacactaaaatctagctctcaggctcataggcagctgttaacattcacattttgacagcttcctttcaggtttcttgagctctcagaaaaattagaaggaagtgggctggggatatagagagagtccaaactaccaactaatgaatgaatctgaaggagacacagaagggcaagtagagtttagagtttgagagtgcaggaaagttttgaaatggtcagaactgccagagtaatttctgagatcttactaagcactctcccaccgtttgccttaaagataccccttcccccaaattgaaacatcacaaatctgcagagctctttaatcaggtgtgttatacacagtgaatttaattctcttattgccctggaagaaagataaaccagatgtggcccttgccccttttcagtaagtatttgttagatcttcattacattttaggcctccttcctccagtctcgatactgtgcaatggagagataagctttgacctcttcagttaataagtattggctataatgttgcaaagtatttgccatggaatcgtgtagaatttgttaagtccaaaatgagagcagcctgtttgcttctttaaagtgtttattgaccttattcctgccatgttacaaatccatcatttgtggtggattcccattaataatggttactctctaggttagttcttgctgccacccctttctctcctggtggtgtgttccctgaatacacttaaccactatttctgttttgggccgccgaagtattcagttttctcaacatagctgcaacatttaaaaattatatgatagcacacaaaagtgtacatttctggcaacactggcctggaatatttgcatggccacagcgtatggagcagggttgtaagtgcccctttgagaggaagaatgcatatcactgtgtgcctcagttctctcccagcctctcacatacatgtatgtcacctgcctggccctaaggacatttgagacctccctgtgttcttctctttgtcttgggatagcctggcttttaggaagtgttctcaaagaggcaagtgacatttgagcccctacagtggctcaggtgtgaagtcttgggcttttcccctgtggacttggagtgaagccttgtcagtgactgtaatgaccaaatgaggagttattttagcttgtgtttgttactatcttctgtcatgttaagggcatcttcgttgctagagtaatttcttctaaaatatggaaggtcaacacttttccctttagacttgtggatagtgatggataaaaataactctcttactctatagtaaacttgctcaagtgcaaaagttatatttagcttcagcaataggagtctataaaactgtgagagaaaagccttactaactgaagtcatccttcaaacctttctaccaggggttccaatagcaattgctaagaatacggcagcttaaaaaaattttttttcaattgacagatattaagaatgcctgatatttactgacttgaacattagttaaattcagttagggtgaccagagtgttgctatttgtagaactgttgcttggtagagtcatccaaagtgtcttcctaagctgtaataaatatgcttactaatgtttgactgcttaattaatggtcagtaagcattcagtcagagttcgtttaatacatggagaaagatatatgctttagatcaagggttagcaaaccactgcttgtttgggccacggcctgtttttgtatagtgtgggagctaagagtgggtggtgtacatttttaaagggttatgacaacgacacagaataatatgagacacaaaccctatgtggcccataaaacctaaaattctactgtctggctcttcacagagaaagtttgctgatccccgctttagataatgggggtgctctactactccccttttcatttatagtgttacataagcctaaataatcactgtagctggtggcatcatgtttgttacctactaagtaggtcaaagtgattgccagacatacacatgaaggccttgaattagaaagcaaaggaactgatgatgaccaatgtttaacaaaattcagactgactttgtgcctgatccttcaaaggctagaggtgatatttttggtacctgaaacgtaatttccctgataagtactctttgcccaattattgcttatcagctgagatattaatgtctgaattattcagctcatatatcttcaagcactcaactagttcatactttgaaatcaattctaatagacaattctcataacacctttatagtcttcccatttaaaaggtaaatgttgttagggctggaggggtaagatgcacccttggtatattgtctgatctcagcagaatcaactacttggtagtgtagtccagagaaaatgggtcaaatctattaattattttaggattttgaaattcataattgagactcgtgacttaatagtgaactgctcatggtactttacccagtcttcaagttgtatgccttttgtaggtaggcatttagatgggatgcttttgaaagcataattaagaaactttacttgaattttgtttataatgggctaatgttattttcttatagtttgcagtgttgatgtgggtatttacctatgttggtgccttgtttaatggtctgacactactgattttgggtaagtctacaaagccattgggatgaaaaattgctggaaagattgtgtgccaggagcttagacattttagtggagaatattctcattgtatgaaaagtaggggatgaaaatgtgggccgggcgcggtagctcatgcctgtaatcccagcactttgggaggccaaggtgggcggatcacctggggccaggagttcgagaccagcctggctaacatggtgaaaccccatttctactaaaaatagaaaaaattagctgggcgtggtggcgcacgcctgtaatcccagctactccggaggctgaggcaggagaatcacttgagcccaagaggcagaggttgcagtgagcggagatcgtgccattgcactccaggttgggcaacaagagtgaaactccatctcaaaataagtttgaggttgtattctctttaaataagttggtgatactgcttcccggtttattgaaatgctaccttagttgctgaagacagctcctactaacaaacagtgataaaccagataaagggtggctttatatgatggtgcagtcataaatctaaccagggatacctttattttatgaaatctcactgtgatatgatttgaagctagaaatggttcctagctctaataactgcagcctcacacagttcattcattcctctggagtggctcctcaacagcagatgcatccagagatccttatgtttttattcattcattaggaacactgcttggttatcttgagttgccagtttaatagttttttgagtgtttattcctcccaaatcattccgttctttttgaaaagttgtatatttcccttttcagctctcatttcactcttcagtgttcctgttatttatgaacggcatcaggtaatttcctaactaactgctgacttcagaatagagcactcactctattacatgggatttacggatgtattagtgcccattttcaatgtcttacaaaaatgagaagtgtgatggtttcttaagcctttagcttgacacatagtagtggttaataagattctttagcaacggtaataattcctttatacctctctttcaggcacagatagatcattatctaggacttgcaaataagaatgttaaagatgctatggctaagtaagtatttaaaatctgcagtgtttttactaggataaggtgtgctggattgtgagaacagtattttcatattgcaggcataatgagtaacaaatctctatcagaccttaagtgtgacttcagagttgccaaaagattgtttttctaacatttggaccattcgtttctgggtttattatgtgtttaaggctttgtttaaatctaattcatgaggccaaggtggcaaaattatagcttagaattaggcagctttaaggatttcatttattgtattagctgaataacatacaagtagttcttggaagatggtattttaagcagcagcaaacaaaactgatatttacattgactttttcattttcagaatccaagcaaaaatccctggattgaagcgcaaagctgaatgaaaacgcccaaaataattagtaggagttcatctttaaaggggatattcatttgattatacgggggagggtcagggaagaacgaaccttgacgttgcagtgcagtttcacagatcgttgttagatctttatttttagccatgcactgttgtgaggaaaaattacctgtcttgactgccatgtgttcatcatcttaagtattgtaagctgctatgtatggatttaaaccgtaatcatatctttttcctatctatctgaggcactggtggaataaaaaacctgtatattttactttgttgcagatagtcttgccgcatcttggcaagttgcagagatggtggagctagaaaaaaaaaaaaaaaagcccttttcagtttgtgcactgtgtatggtccgtgtagattgatgcagattttctgaaatgaaatgtttgtttagacgagatcataccggtaaagcaggaatgacaaagcttgcttttctggtatgttctaggtgtattgtgacttttactgttatattaattgccaatataagtaaatatagattatatatgtatagtgtttcacaaagcttagacctttaccttccagccaccccacagtgcttgatatttcagagtcagtcattggttatacatgtgtagttccaaagcacataagctagaagaagaaatatttctaggagcactaccatctgttttcaacatgaaatgccacacacatagaactccaacatcaatttcattgcacagactgactgtagttaattttgtcacagaatctatggactgaatctaatgcttccaaaaatgttgtttgtttgcaaatatcaaacattgttatgcaagaaattattaattacaaaatgaagatttataccattgtggtttaagctgtactgaactaaatctgtggaatgcattgtgaactgtaaaagcaaagtatcaataaagcttatagacttaaaatatgctttggtattttcatttcatgaaattgcagcagattaaaaatgcacacagtgggtaaactgcttcaaccagcgaatggtagcttgtgcttttagaagggtttttttcagctgatggtgcagctgtttgtttgtttactgtggaaacaaaagtcaacaaatgtgtttacataatcaaattttatttgacacataaaatgtttaagtgatgtgttttatactttgaaaataaattcatgcaccaatgttttaactcacatatatcatacagtgcaggatttatgaacatacataaaatcaaaatcataccatataaacgtttacaaataagtttttcatgacacacggacactattgctctttaaat

SEQ ID NO: 868 - DNA, 6000 bp, Homo sapiens
cccatgaaaggtaaagcccttggtaattcaggtgcacactctgataatgtacatgaaaggtcttccttgataaacgataaaccttgtgattttgccacacaagaatttagctaaaccctttcctaatgtcattgtatatgagtagtacagattccatgtgtttgtttccattgaatatacagaaatactgaatacttccttaaaacagcttttattgaaaaaaggaagctgataaaaatcactttgcttttttataaaaacgcttgataggattacctttctagagagacttctgtgtatggccacacttatccaccacagtttttgtttatatagagagcattttaaaaagaagaaggttttcctggccatgcacagtagctcacgcctgtaatcccagcactttgggaggccaaggcggaaggattgcttgaggccaggagtttgagaccagcctaggcaacattgtgagactgtttctataaaaaaaaaaaaactgaaaaatcagccagccatggtcgcccatgcctgtagtcccagctacttgggaggctgaggcaagaggattcttgagcccaggaggtggaggatgcagtgagccataatcataccactgcattccagccacggcaacagagtgagaccctgtctgtttaaaaaaaaaaaaaaaattattaaaatcttaatcttaagttccttaatagtggactgtattactttttgccttttagccacaaaaactggtagggaaagttatattctgtcaccctaaagcaagcaaaaaatgtttttccaattcccattctttttttactttttcaacataaggaaaaatgtatttaccttgtttaaacggatttattttaatgccttacagtcagattttaaatttatgggaagtttgctaatagctccagtctctccagttgagatgaatgttttttcttatttaaataacaatgagttttttaaaatttataggaagtagctttttattggaattacattgattttatatgattcatagctaggaaaatggaaaccatcttaatttcaggaaaatgtagtagaaattactctcatttctaaatttttgtcatttagaaaagacatttttatcaagctctgtgtttacaaaataatagtttttaaacaacaatttgaaagaagtatctctataactcattgtcttcataaatgcaaaatctgttgtgtgccctcaaatttatatctacatttttagattctgggtcacaattatcactagctcttttttttttttttttttttttggagatagagtctcgctgtgtcacccaggctggagggcggtggtgcgatcttaggctcactgcaacctttgccttccaggttcaagtgattctcctgcttcagcctcccaagtagctgggactacaggtgtccgccaccacgcccagctaatttttgtatttttagaagagatggggttttgccaagttggccagactggtctcgaactcctgacctcaggtgatctgcctgccttggcctcccagagtgctgggattacaggtgtgagccaccatgcccagcctacaattatgactatttccatgtgaaaccatcttcctcagaaattgaaattttagagccgctcttgctagcatgtgaaaccttttccttgcttattgccttttggcgggggcagtgaaggaggagcctggcctttcaaaatgtgatcaaaaaaataaccaaactccagggctcattagtccttttataaacaccggtgtgaaatgatgggtatccgtgtgcctggtccaagtttcctggtggttgacttgggcgaataaaaataagacatgttctgcagagttctccttttaaattcttgtgtaatattccgtttgttttgctcctttgcaattaactacaaacttctaagtcctagaaaagatttcaagtatttatagagtgagcaacgatcattttcctagtcaaatagtatggcaaaaatcactgttttaaaaagttgtggcattaaactataaatcctccctcccctcgcttcccacccgcaattatgaaagaaaagcatatgacaatgcctactgggctcagcttttgggctaattgagtctgactgagccttcttagcaggttcctgtcttttgaaacctcaaatcccaaaaagctgtctaataattttacttttttagggactaagaccaggtattttcagcagaggttcttacttttctgtaattgaggcgcaactataatgttccagaacacaatcttaaatctgaaagtgagaggaagaaaaaaaaaaaaacggcctgagctccagaaatagctgacccagaagaacactaaaatctagctctcaggctcataggcagctgttaacattcacattttgacagcttcctttcaggtttcttgagctctcagaaaaattagaaggaagtgggctggggatatagagagagtccaaactaccaactaatgaatgaatctgaaggagacacagaagggcaagtagagtttagagtttgagagtgcaggaaagttttgaaatggtcagaactgccagagtaatttctgagatcttactaagcactctcccaccgtttgccttaaagataccccttcccccaaattgaaacatcacaaatctgcagagctctttaatcaggtgtgttatacacagtgaatttaattctcttattgccctggaagaaagataaaccagatgtggcccttgccccttttcagtaagtatttgttagatcttcattacattttaggcctccttcctccagtctcgatactgtgcaatggagagataagctttgacctcttcagttaataagtattggctataatgttgcaaagtatttgccatggaatcgtgtagaatttgttaagtccaaaatgagagcagcctgtttgcttctttaaagtgtttattgaccttattcctgccatgttacaaatccatcatttgtggtggattcccattaataatggttactctctaggttagttcttgctgccacccctttctctcctggtggtgtgttccctgaatacacttaaccactatttctgttttgggccgccgaagtattcagttttctcaacatagctgcaacatttaaaaattatatgatagcacacaaaagtgtacatttctggcaacactggcctggaatatttgcatggccacagcgtatggagcagggttgtaagtgcccctttgagaggaagaatgcatatcactgtgtgcctcagttctctcccagcctctcacatacatgtatgtcacctgcctggccctaaggacatttgagacctccctgtgttcttctctttgtcttgggatagcctggcttttaggaagtgttctcaaagaggcaagtgacatttgagcccctacagtggctcaggtgtgaagtcttgggcttttcccctgtggacttggagtgaagccttgtcagtgactgtaatgaccaaatgaggagttattttagcttgtgtttgttactatcttctgtcatgttaagggcatcttcgttgctagagtaatttcttctaaaatatggaaggtcaacacttttccctttagacttgtggatagtgatggataaaaataactctcttactctatagtaaacttgctcaagtgcaaaagttatatttagcttcagcaataggagtctataaaactgtgagagaaaagccttactaactgaagtcatccttcaaacctttctaccaggggttccaatagcaattgctaagaatacggcagcttaaaaaaattttttttcaattgacagatattaagaatgcctgatatttactgacttgaacattagttaaattcagttagggtgaccagagtgttgctatttgtagaactgttgcttggtagagtcatccaaagtgtcttcctaagctgtaataaatatgcttactaatgtttgactgcttaattaatggtcagtaagcattcagtcagagttcgtttaatacatggagaaagatatatgctttagatcaagggttagcaaaccactgcttgtttgggccacggcctgtttttgtatagtgtgggagctaagagtgggtggtgtacatttttaaagggttatgacaacgacacagaataatatgagacacaaaccctatgtggcccataaaacctaaaattctactgtctggctcttcacagagaaagtttgctgatccccgctttagataatgggggtgctctactactccccttttcatttatagtgttacataagcctaaataatcactgtagctggtggcatcatgtttgttacctactaagtaggtcaaagtgattgccagacatacacatgaaggccttgaattagaaagcaaaggaactgatgatgaccaatgtttaacaaaattcagactgactttgtgcctgatccttcaaaggctagaggtgatatttttggtacctgaaacgtaatttccctgataagtactctttgcccaattattgcttatcagctgagatattaatgtctgaattattcagctcatatatcttcaagcactcaactagttcatactttgaaatcaattctaatagacaattctcataacacctttatagtcttcccatttaaaaggtaaatgttgttagggctggaggggtaagatgcacccttggtatattgtctgatctcagcagaatcaactacttggtagtgtagtccagagaaaatgggtcaaatctattaattattttaggattttgaaattcataattgagactcgtgacttaatagtgaactgctcatggtactttacccagtcttcaagttgtatgccttttgtaggtaggcatttagatgggatgcttttgaaagcataattaagaaactttacttgaattttgtttataatgggctaatgttattttcttatagtttgcagtgttgatgtgggtatttacctatgttggtgccttgtttaatggtctgacactactgattttgggtaagtctacaaagccattgggatgaaaaattgctggaaagattgtgtgccaggagcttagacattttagtggagaatattctcattgtatgaaaagtaggggatgaaaatgtgggccgggcgcggtagctcatgcctgtaatcccagcactttgggaggccaaggtgggcggatcacctggggccaggagttcgagaccagcctggctaacatggtgaaaccccatttctactaaaaatagaaaaaattagctgggcgtggtggcgcacgcctgtaatcccagctactccggaggctgaggcaggagaatcacttgagcccaagaggcagaggttgcagtgagcggagatcgtgccattgcactccaggttgggcaacaagagtgaaactccatctcaaaataagtttgaggttgtattctctttaaataagttggtgatactgcttcccggtttattgaaatgctaccttagttgctgaagacagctcctactaacaaacagtgataaaccagataaagggtggctttatatgatggtgcagtcataaatctaaccagggatacctttattttatgaaatctcactgtgatatgatttgaagctagaaatggttcctagctctaataactgcagcctcacacagttcattcattcctctggagtggctcctcaacagcagatgcatccagagatccttatgtttttattcattcattaggaacactgcttggttatcttgagttgccagtttaatagttttttgagtgtttattcctcccaaatcattccgttctttttgaaaagttgtatatttcccttttcagctctcatttcactcttcagtgttcctgttatttatgaacggcatcaggtaatttcctaactaactgctgacttcagaatagagcactcactctattacatgggatttacggatgtattagtgcccattttcaatgtcttacaaa

SEQ ID NO: 869 - DNA, 6000 bp, Homo sapiens
gaactgggcaatcaactgtagactacgggtgttggtgccatctagtgttgcagatggaagatcaagtctgtggaatgatctataattgactatgtggaataaattcagttggacagagaaatttagcgagctgtgaatatcgttttgcactaacagatgagtttaaaatttttataaacaattttgaatattgacatcttgtaccaaatcaaacaaatgctttaatcatactactataaacattatgaaatgaccttaaagattccccccaaacctggatacttaaatgaagacattaaagtttaagaagatctgtttagggcctagtgactattaattcttgaattcagaatttaaaaatgcgtgcttgaggccaggtgcagtggctcacgtctgtaatcccagcactttgggaggctaaggcgggcagatcacgaggtcaggagatccagaccatcctggccaacatggtgaatcctcgtctctactaaaaatacaaaaattagctgggcttggtggcacgcacctgtagtcccagccacttgggaggctaggcaggagaatcacttgaacccgggaggtggaggttgcagtgagccaagatcgtgccactgcattccagcctggtgacagagcgagactctgtctccaaaaaaaaaaaaatgcttgcttcagcagcacatactaaaattggaattatacagagaagattagcatagcccctgcacaagaatgacgcatagaatttgtgaagtgtttcatatttttatataaaaaatttttaaaaatgctttgggtgtttaagaatatttgtatgttttagattataatgtaagaagttagcatattagttttcataaatagtgtcactttcagtttatgaattttagtattcatttttggtaccttatgttaaattttttatagactttaaaatgctcgttgttttgctattttaacttgtactgtcattcattttctagactaaaatctttttccagttcttaagatttaattcagtaatgttgaagtgctgtaatttagtccatagagggcattatattacagcatatggtagggttttaaaaattaactcctttcagtattgaaacatgttaatttcatacctttgtgtagctcagaatagttaaattttgaaataagcttaaaactactgtgtagctataattgtttcttattttttaaaaaacatgcctattttctgtggctggaaagtataaattattttagctctcaagagcagtgtacataagcagtctctaactttcagagtagcattttcaatccaaatgattgctgctttcccaccctctttcccttgcatctctaaatgttgtaaagaaaaacgaagcaaaacaaaaacctgagtttttcctgggtgcagaagtagaggaaagaaagaaatggaaaaggaagaatgtcttagaataagagctggctggggtggacttaacaccttgcctagtgctgcctgttctaaaatctaaaatataactttctactgtctgaaatcttgccagttagataccaccccccctacaccctcccccccccccaaaaaaaaacccaccaaaaaacatacacacagtttctgaggtcataaaagagtttcttgtttagtaggaattgatttatgcgtatttcctacttaacaggtaagtgcatgaaggaaacgagggtttggtctgagatgtgagaaaagaaaccgtgtaggtaattttacagcatattaccctttagagcttatcccttcataagatgcaaaggaaagacattatggatatgtatttgggcaagttttcatctttgatttttttgtcatgcttgggagaaggggatactggggacatggacattgaggagtgggaaattgccaaatatgaactttgaacagtttatttcaaaagttctgtataaagctgattttgagttcaggaaaaggagaatacttttcccctcttctcccctccacaaacacacaatatgaaatagggcttagaattcatacaacacttttattggcttgcagtataaataaaggagttttctgtggcctctcctttgtgagcctttgcttttatgggaaaagaggttcctgtctcaaatagtcaaaatgccattctgcaagttgagacatgtgctctacttgaaaattgtcctcaaaagaattaatttttttaaaagttaggtagttgaaggaaaacaaaataaatgaagataagtttttaacagatttatgtcctttctttatttgacttgttaagttggggttcattgtggaataggacctataaactatgcagatgtacatttttctcagctggaaaataatagaactatacagcaacgacaatagtttgtgtatgagagggggcaattctgtttagaaagattgggttattgcctagagttgaaggacttaatatatgagctttcttagatgtgccttacttgtcttgttgcttcttagtttgattgttatttttagcatactgataagtaaatagcacttacatagtgcctactttttgtcaggcaatgtcctaaagccttctatttttagtagagattatatgattttcataataaacatagcccatctggctttacatctttaacaaatttgtgtcatatcagtttttcagatttaagcacttttttgcttaacttgccaaacttaaaacaagtctagttgaaaaactttgtgagaaagaactgggcaaaatgtcagttgatttccacaagctagttttccttgtacacttacaaagaccataaaaattaaagaagtagatgtcactatgtaggctgaaatgtttactaaacttcagggctcctattttgactttttaatctgtcaggggtgctattaagtatgtttaatgtttagatgagtgggtatgtcttattacacattcttgcccctctcagacttttttctttaattgttaagccaaatcaagtaccacggaagatacaagtagtcttaagtgccgagtaacttgatcacagtaaaacttttttcttctactagtgaagtaatctctgacttgaaaatagtgtttgagtactatagttgagtgttttattctaatgctcgttatttattggctttcagttttaagggacttgttattagaaagtcagtattttgtatttactaaatagtttgagattctgaatgttgcgtggagaggccagacattttcaggccatgatatggcttgctgaccgggttctcaaatatcacattatgcaggggttcagtgaataaagtttaaagttaaatattaactcgagctgagaatactgggctcttttaaaaattacttttctttatttatgtttggagttagagaggcagatagggaaataaatgtgtcattgatattcaagccacttcctttttcccctctcattttcctaattttagttctttctatgtttaagtcttacatgttttgtttttagtttttttgggtacataataggagtatatattaatatcaagccacttctgatattaaggattttgcagcccacagatagcaggttccagaaaatattatctctatttcattttagctatacagtcttaagtatgtatttttgtacataggctacgtatcttatagtattttcgcaaattgcattttaaaatattttagctgatttgttagtgccttttctgcttaggcagatataagtatcaggtgaattgattgtggaacataagtagagacactgcattggaatgaaaatcagttttataaagttgaacacagattttaaaaatgctgtacatagatttgtttttatatttttcagtaaaattttaggccaggtgtggtggctcatacctgtaatccccgcactttaggaggctgaggtgggagaattgcttgagcccaggagtttgtgaccagcttggacaacacagggagacctcatctctaaaaaaagtgtaaaaataaaaaattaactgggcatggtggcacatgcctgtggtgactgagatgggaggatctcttgagcctgggaggttgaggttgccatgtgaccaatgattgcaccactgcactccagccttggtgacagagcgagaccctgtgtcagaaaaaaataaaaaataaaataaaattatagtttgcttttatgtcattttcccatggcagattatatcattagcccatgaatatatctccccaagctaagaatctattaatactgtctgtagaggtgtctaataaatattcaaagattgagttggagcagatgatgattaagagtaagtgtatgtttgtaagtctctggatttccataattgtaaaagaggaaaaaagatattaggaagattaagttgctaaagttttctgttcaaataatatgttcaataaacattagtaatttgacttttattttctgtttatctcttcataaggtgcaaaatgctgaatgttttacgtcttaatgaacttaggagcaattaaggagactcatcatttcacaagcttgaaatttaggctattaatatttgatcagtccatttttatcttattaggtaaccattaattttagagttttaaatgaaactgaaaaccagtagcataattcgaccatctgttaaaaaaagaaagaaaaaaaaactgcatatggctttaattgcatttcagatacattcagtggttagttctaagaacaacccttatttcctttcttttggtagcctgccctctccctgcaaatgcagctccatttggtatgagcaacaaggcaaatgcctaaaacaatcaacagatagaaggaaagcattaatgctggagtattagtagcctagttacagattgcactgcgtcagactgttccacacccagaagacgtcaggtgacttcagtcctgctgcagttgtgcagcagaggagactgcagacttcggttgaggaaacgggtatttcatgtctcagggagtaggtttgtgcagttacagcttttctgttggtatgcataattaataattggagctgcaaagcagatcgtgacaagagatggacggtcagaagaaaaattggaaggacaagggtatatctgctttttaatttcttattcagtttttatatgtgaccactaatatatttctatgaataagctttggaatttagatattttggattgaaagtgaaacctctgaagagttgaagtctaaaggattaaaacggctatctcacgtgtttttacatttggttgtataccagaaaatgtcatgctgttctgtttcactggcattcggtttagtcttttcagtcctgccgtttaggttctgttctctaatcttgcacattgtaaacaatatagatctaacagatttcatttgttcgtcacttggatgtggtaaatacacattgctgtttttgtgtttcacagtgacatattttccgtgactattttaaaaaaccttacttggtgtagttgaaattctgtgcaaaggtttgtaggtagcaagatattgtgtttgcagtaagcctcttctttgaaaatctgatttgaacctttaaaattattaccaactttcttttaatcagattatgtgcatcttgaaatcattcaaattacacagtataattacgcagtaattttaaatgcatgtctatatttaagtcactaacctttgtccttgtaataaccaatcagtgattttgatcccttttcctcccccttgaaagcccagatcctttcaaatctcagtggatcattgtgtaagaatttaagcctgtaaatggtaaaatgttgactagaatatttaaagaatattttattatgtagatggttaaatctacctttttttctttaaaagaaagtggtaggctgtatatctgaccacttataataaattacctttaaattattagagctatttttaagtagtccaaaatagacattctacgtaagcaatttttttcctggctacattcaagttttataa

SEQ ID NO: 870 - DNA, 6000 bp, Homo sapiens
ttaggcacagaaaggctaagagttacagttgtaagtgatggatttgtgatttggacttaggcaattcaatttcatgatctgtgattgctttattaggagtctgaactgtattcttgaagtcccagaagatagttaactattctggatttttttaaagagcttttagaaatgtagtacttgttttatgggtaactggatcgaatcccattttacaaaatgaagatttttctttttttcttaaacataatgaatctttgaaataccaatttgaaaacttttttacttagaaaaattccaggaatatagtttttattataaaagattattgcactaggtaggaataagagtacagtacattaaaaaaatactttaaaattatggcacaaatttagatgtagtttgttttcccactaactttaacagtaatatatgtttctagttcactttccagatagactagcctctgaattagtggcttttaactatattgtctagataaaaaagacaaccattttgttaagaattggttaactgttatttagatggagcagctgcgtaattatttggttctgctctttgaccctcaaatttcagttttatacaagctaataattcattattttagctgaagggaactttccttcattttacaaatgagaaactgtaatttaagatcacatagcaagtaatcttttaaatatgtgtacacatatatatgcactttatttaaaaatcttataagccattatgttacccctttgactggatagcccatcctacctagtgctctaggttggaggaaacccttttaaacacacatcataaatttcccgtcatcaccctcatctaggaatcctttaagtatgacttcatgcccagtatatatttatctaaaatatataagaccttgtgaagttagctctcctaattcattaagggtaatatgcttggaagacaagtccgtattcatgttagctacatttcttggatttttatctgttttgatcagccttgtctagcttgtccatccagatgaaattgtctaaatttattaggttctctctgttaaaggaatatcaccttccagtcatctctcaggctgtttcaaattgtctgatggtagaggcctttctctagtgtaaaccatggaagatctttagcttaggatctcccaactgcaggtacaagatgacattgtacaaagttaatattaccaatatagagtgtattagttagcttgggctgccgtaacaaaataccataggctgggtggctgaacagaaatttacttctcacaattctggaggctggtaagtctaagatcaaggtgctggcaaggtagatttctttttgaggcctcttctcctggcttataggtgaccaccatctcactgtgtgcacacatgacctcttgtgtgtgcctggggagacagggagcatgacagcaagctctctggtgtctcttcttgtaagggcattaatccccttggcccagggccccaccctgactgcatttaaccctaatcacctcccaaagtccccatcttcagatactatcactttaggggttggggctttaacatgagttttgtaggaaatataagcattcagttctgtaacatacagtgattaaggaaatgggctctggaattgaattgccttagtctctcacttactagttgtgtatacaaataacaagtagccctcacttaggttaattttaagcaaaaccaataatggtgtcatcctaaaggcagttaattttttttttttttgtattttggactctggcatttggacattggcacaggactaatgtcttcaaagagcaatgtacaatgactgtaacaacttagaatgtaagagaaaatgcataattctttaaaagtgtttctttaaattgaatatatgccaataacaaaagattaaacatttgtagttgttaattgtattcaaattcagctttttgtttttggcctgaatagaacaagacaatttacctatgtgaaaacctgagtgaaagcttgggatgtgatatgttaagtagaacagtattttaaagccactttgattcataagtttctttaacataaacaggttgtattgcctcttgaaaaatgataggttctatggataacatttaattagctttataatacatatgatgatttaacctgaattaatggtactactttttctgacttccttttgatcttggccctttctctgtaaagttttttgttaacttattacaaactgaaccctggcttgctcctcttatctttagtctcctttcaatctgtctttatttctgctgaggttatattctatttgtttttcagatgagaccctttttgctcttcctgctgcatctgagcctgtgatacgctcctctgcaggcaagttctttctgccagccttttatcctctctgtattctaactttaactctttagtgtgttaacactatgcagagtagtttgggtttactaaaaattagcatggttccgagaatgttttgtctactggaaaagttgaaatgtgcattttatatggtatgcccaagggaaaaatgagcaaaatctgatgaatacttggaagtacataaggaattcttggacccttgaattacatttacatatttaccattccctttctccaaatacagtttgagtatagccagaaaggctttcctgtaaataaataccagtctatggcatttacccagtgccccttctttcctatgctgtcaccgaaactcttttcacagatattcttctcttctctaaaactagctattagtatcttagttgataacatttgaggtttactcagacttgatttgtctttgcacagcatgtaattgcctctgtagccatgcatatgttatatttacaatagcttaatattttcagtaatgattgaagtctactctattgttacttattaattgctattaacatttcattttagtaaacagtaagtctttactaacactattttggatctgtcataaaacttgcattaactctgagaacactggcattctctaactttcctttctgtccatggtcacagaaaatatggacttgaaggagcagccaggtaacactatttcggctggtcaagaggatttcccatctgtcctgcttgaaactgctgcttctcttccttctctgtctcctctctcagccgcttctttcaaagaacatgaataccttggtaatttgtcaacagtattacccactgaaggaacacttcaagaaaatgtcagtgaagcttctaaagaggtctcagagaaggcaaaaactctactcatagatagagatttaacagagttttcagaattagaatactcagaaatgggatcatcgttcagtgtctctccaaaagcagaatctgccgtaatagtagcaaatcctagggaagaaataatcgtgaaaaataaagatgaagaagagaagttagttagtaataacatccttcataatcaacaagagttacctacagctcttactaaattggttaaagaggatgaagttgtgtcttcagaaaaagcaaaagacagttttaatgaaaagagagttgcagtggaagctcctatgagggaggaatatgcagacttcaaaccatttgagcgagtatgggaagtgaaagatagtaaggaagatagtgatatgttggctgctggaggtaaaatcgagagcaacttggaaagtaaagtggataaaaaatgttttgcagatagccttgagcaaactaatcacgaaaaagatagtgagagtagtaatgatgatacttctttccccagtacgccagaaggtataaaggatcgttcaggagcatatatcacatgtgctccctttaacccagcagcaactgagagcattgcaacaaacatttttcctttgttaggagatcctacttcagaaaataagaccgatgaaaaaaaaatagaagaaaagaaggcccaaatagtaacagagaagaatactagcaccaaaacatcaaacccttttcttgtagcagcacaggattctgagacagattatgtcacaacagataatttaacaaaggtgactgaggaagtcgtggcaaacatgcctgaaggcctgactccagatttagtacaggaagcatgtgaaagtgaattgaatgaagttactggtacaaagattgcttatgaaacaaaaatggacttggttcaaacatcagaagttatgcaagagtcactctatcctgcagcacagctttgcccatcatttgaagagtcagaagctactccttcaccagttttgcctgacattgttatggaagcaccattgaattctgcagttcctagtgctggtgcttccgtgatacagcccagctcatcaccattagaagcttcttcagttaattatgaaagcataaaacatgagcctgaaaaccccccaccatatgaagaggccatgagtgtatcactaaaaaaagtatcaggaataaaggaagaaattaaagagcctgaaaatattaatgcagctcttcaagaaacagaagctccttatatatctattgcatgtgatttaattaaagaaacaaagctttctgctgaaccagctccggatttctctgattattcagaaatggcaaaagttgaacagccagtgcctgatcattctgagctagttgaagattcctcacctgattctgaaccagttgacttatttagtgatgattcaatacctgacgttccacaaaaacaagatgaaactgtgatgcttgtgaaagaaagtctcactgagacttcatttgagtcaatgatagaatatgaaaataaggaaaaactcagtgctttgccacctgagggaggaaagccatatttggaatcttttaagctcagtttagataacacaaaagataccctgttacctgatgaagtttcaacattgagcaaaaaggagaaaattcctttgcagatggaggagctcagtactgcagtttattcaaatgatgacttatttatttctaaggaagcacagataagagaaactgaaacgttttcagattcatctccaattgaaattatagatgagttccctacattgatcagttctaaaactgattcattttctaaattagccagggaatatactgacctagaagtatcccacaaaagtgaaattgctaatgccccggatggagctgggtcattgccttgcacagaattgccccatgacctttctttgaagaacatacaacccaaagttgaagagaaaatcagtttctcagatgacttttctaaaaatgggtctgctacatcaaaggtgctcttattgcctccagatgtttctgctttggccactcaagcagagatagagagcatagttaaacccaaagttcttgtgaaagaagctgagaaaaaacttccttccgatacagaaaaagaggacagatcaccatctgctatattttcagcagagctgagtaaaacttcaggtaatccaatctatatgcagttttgtgctttcatgccacttttggatttagggaacattccactacattttgtgttttatattatgtttatagtgtctcatatgtcacattggtaagaagtcttctccactttttcagttaaaggttttagtgctttttctaactctcttgcactcagcattcacccttaacttttccacacagttacacttttatattgcactatggaactattaatagaaaatatttttgtttataagaattggctttagtacctatttctttctttctttcttttttcacttgtgtttcttgataacatgaagagcaagagatattaaaatattttcagatgtgtttttgttatcccagaaattaccatatttaatttttaaagaaaatttctatagtatgttttaaatatttctatataatatagtacttttccagtggtaggtataaagttaggcatattgagtgtagacattttgttgaaaagtataaaatgagttatgctattatg

SEQ ID NO: 871 - DNA, 6000 bp, Homo sapiens
tagaagctgctttaaaaggaacaagtaaaattaatttaataatattatacttatcccaatatatccaaaatatcaatttcaacattcagtcaacaggaaagctgagatattttacatttcggaggtactaattcttgaaatccagtgcgcattttacacttacagcacatctaatttcagcctagctacatacattccgagtgttcaatcagtagccacaagtagccagtacctgtcaggtacagcacagatttagactttgagcaacttgaaagcaggttatcctcttctctccagggcctccagagtaggcatgcagtgaatatttttgaaaggtaaatcagaaagataaaaggatcctgattcttacaaagatgttctgcaactactctctttaaactctccagcctcataaaaagtggaatggggatcatgcttattcctgcatatcaaaccaatgactatggggcttcctgactcccagaaagcctgaatcatccgaaatgttgactcatgaacctaaggtgactgaaatgtaacgtgaaccaaattagctttccaaggcatctttgtatttccactttcctgtctccccgctgcctctctctttgggtgactcactctcttaccatgtaagagtccagcaggcaaggccccaaactctctttggaagaagagcagactttcaaatggtcggccccagatccctagttaattcagcacagctgttttcctcccaatttcgggggctgcggtttagactgagtgagcctaactgtcaaaaaacaatttttttcttattttagggtggtagtagtagtgatgtagtttggaactttgagtgaacaaataatcttttatttcaaaaatctttaaaaatccttagggcccacttcccagtcccgctaatacctttctccagtcgggtttcttcctttcccgggaggaaagtttccactctcagttcccccaggataacgcccttccggtggcgcgccagaaaccgcgccgacccctcccagccagcagcccgccccctttcccagtgctctaacgacatacggacgccagctgcgggcaaggccaagaccccaccccaactcacggttacccaaagtgggggtggagctcccagctctcagccccgcccattgaacgcaatcccagccggtaagagagaggaagtgccgtagtccccacccactttcatctccttccctttctgttggcccggctggtcgcctatcttctcgatcctgtagccgattggctctctccctcccgcgccagtccctgccctcccctggggagggtgagtcacgccaaactgggcggagagtccgctggcctcactcctagctcatctgggcggcggcggcaagtggggacagggcgggtggcgcatcaccggcgcggaggcaggaggagcagtctcattgttccgggagccgtcaccacagtaggtccctcggctcagtcggcccagcccctctcagtcctccccaacccccacaaccgcccgcggctctgagacgcggccccggcggcggcggcagcagctgcagcatcatctccaccctccagccatggaagacctggaccagtctcctctggtctcgtcctcggacagcccaccccggccgcagcccgcgttcaagtaccagttcgtgagggagcccgaggacgaggaggaagaagaggaggaggaagaggaggacgaggacgaagacctggaggagctggaggtgctggagaggaagcccgccgccgggctgtccgcggccccagtgcccaccgcccctgccgccggcgcgcccctgatggacttcggaaatgacttcgtgccgccggcgccccggggacccctgccggccgctccccccgtcgccccggagcggcagccgtcttgggacccgagcccggtgtcgtcgaccgtgcccgcgccatccccgctgtctgctgccgcagtctcgccctccaagctccctgaggacgacgagcctccggcccggcctccccctcctcccccggccagcgtgagcccccaggcagagcccgtgtggaccccgccagccccggctcccgccgcgcccccctccaccccggccgcgcccaagcgcaggggctcctcgggctcagtgggtgagtgccgcgacctctcgcttcgcgccgcccctcgcgcccctccctcttttgtgtgcagccccagatgctttgggctggtccctcctctccgccccgagggcgctttgtctgcggacttcggggcgatggcgccccgtctggttggaagcgcggggagaagggtggggcggcccttggagcccgggtttgttcttattgtccgtcttggtttcggggaacacgtgcaccgctcccggctcccactttcaccctgtgtgatgcccagcgtacggattctcggaagttaggcacccacccgtagtaggagccgggtatatacccgagagccagggttgtggatttatcgggttggttgggcttcgaggtgaggaaggaaaggccttggcacccagatatttttaggaggtgcttttgtctacccgtctgggttgctcctttggaaaaggtgcagttttgctgcgggtctgttggcctgcattctgccccgggctccctcctcacctcctggctggcgtgggtggcccctttgcgcttcccctccccctcctcctgtgctcgtggggagctggccgagtggaaaacgtccacattgacccaaccgcagtgaagggagagcgcctccagtggtgtggtgcgtggagaaatgggaaggagagagttctggtaaagtcctgccaccgcccagctccccggggtgtgatgtggactgctccccaccagctaaaccgagccagggaaaggggatctaggcattgtgttcgagggggcgtagttctgccggggtttcagctgcagggtcggaggaattgctgttagtgtggacttggcccagcctcttagtgcatcataattgaatcttacagaaaaaaataaaaggcaaaatggttgacattcctaaagaagggaaaacctgtggattccttgccaggaattggctaattgaactcgtggcagatttaccatgagacacagagaaatgttttgagacagacattttcatatatattggttagaaatactgtttttcagaaggatatgttttaggttacagaatcaaaatacggtcacgtgcctcataacgacgtttaggtcaaggacagaccgcatttgcaacggtggctccataaggttgtaatggagctgaaaaattcctgccgcctagcgacgtcttgatcttgaccctgtgtaggcctagggtaatgcgtttgtatcttagtttttaacaaaagttaaaaaaaaaatagaaaaaagcttatagaataagaatataaaatttcttttctatagctttaaaatgtgtttgtgttttaagttaaacgttattacaaaagagccaaaaagtttataaaatagaaaagatacagtaagctaaggttgatttattattgaaaaaatatatctaaagataaatttagtgtagcctaaccgtagagtgtctgtaagttgtacagtagtacatggtaatgtcctaggccttcacattcactcactactcacgtccacagcagcttccaggctggcaagctctgttcatggccagtgccctgcacacgtgtgccatcttttaatcctttgtacagtgttattttaggtatgtttagataaacactacacaaataccattgtgttacagttgcctacagtaacatcctgtataggttagtagcctaggagcaattgattataccatatagcctacatataggtatgtagtaggctctaccatctaggtttctgtaagtatactgtgaggtttgcacaacgacagaattgcctaacaatacatttctcagatcctgttccccctgttcagcgaggcatgactatgtatggtctgtaaaatagttttcaagttctttcattcacctaagttcctgattgtatgttattattagtcacgttgttttattgccgttttcatcttgggaaattattttggaagcgaaaaaaatcacgtttgttagagattgagaatgcataatattagatacattcataagtacttgctacttcggggacagaaagtgtcccactagcagtaggacctttatgtataaaaggtcaagaatcaagtagtgtaactgcctgcttggaaatcttcatagccttgtaggatgttagaggtgattcatttcttaaaagaaaatcagtctgatttttttttttctcaattcacttctccataatgggggaaaataagccaattgcgatgctttttagtaatattttgatgttgacggactcctcacccccatactactcaaaacactaattgccatattaaaggtcttagaagatgaggagtaactcaatcttttcctttttctttatgaaaaagacatacttgagggaaactgaggtaagagaaaaatatgaaatatatttttaaacaggaattttttttttttttttttgagatagtctcccccttgtcaccaggctggagtgcaatgacgcaatcttggctcactgcaacctccgcctcccaggttcaagtgattctcctgcctcagcctcccgagtagctgggattacaggcgcctgccaccacgcctggctaatttttgtatttttagtagagacgggattttaccatgttggccaggctggtggtcttgaactcctgacctccagtgatccacccaccttggcctcccaaagtgttgggattacaggcatgagccactgcgcctggccacaggaagtttaatgattgacaaaagcatactaatcttgtattggtatgggaacaaagaaaatagttctgtctttgaacattagggattcagggggtgacagcactctcttggaatcttgtgtgttggaatgctgaggttggaaggcaatggggaaagaatattgcctgttctacagagttccctaattccatattgatgatacctattgggaaactttagtttttttagtaagtgtaagaacattgtgattatggttgtggatagttaaccattttcaatgtgtctggatttcttaatgcattcaagagtttgttcattaattcaacccattattgattacctaccaagagacaggatctattctaagctttgagggtatagcaataagcaagacacatgctcccccttgggagagtacagataataagcacataaataaagaacccagaatagtggtgttatgaggaaaataaacaggataatggcatagagaatgatggggatttatgggggcttttttaggttaggtgacactaagacaggcttagaaggtgagatttgagctgcagagagaaaacatttccaagcaacttcagggcaaaaccctgaggcaggaatgagctctttgtgtctgagaatctagtgtaagactagtgagaaaaactagtgggagagtgaagaggtggccttacccacccagatcattgggggtctctaacaggcaatggtaaaaatgtttagctttttaaaaaaataaaaatatgcttattaaataattatattgtgattttggaactaaaataagtttggaagattcagggctactgagaggactgatgtgagacaaaggtgagaaatgtgcagagcagggttagaagcatagactagcctgcctggaagagagggtttctagatcactgacacttgtctgtttaacattgctgtttacgttatttatgagtaagccctgattttcatctgttaataagttgtaattttactgtttgctgttgtgcccagagcatctccatcgcaatgcagtaactgaagtgagactaaaacctctcacttgagggccatttttcatgggaaaatacttggcttagtggttggttaagttaggctttgaggatatgcgcagaaaactctggctaga

SEQ ID NO: 872 - DNA, 6000 bp, Homo sapiens
gcaacccctgcctctcaggtccaagcaattctcctgcctcagcctcccaagtagctggggttacaggtgtgcaccaccatgccctgctaatttggtatttttagtagagatggggtttcaccatgttggccaggctggtctcaaactcctgacctcaagagatctacccgcctcagccacccaaagtgcggggattataggcatgagtcacggtgcccgtctgataagctattttcaaatataaattattgaataattattttaaaactattattagtatctagaatgtgcatttttcttttaactggttcaaatgtccaccagaattttgttagtgatagtgatatttacatctagttacaacaatgtataactagctttacttttaattgtggtagagcagcaacagcctcctttctttttgctttgttgatcattctatgaaagctgggcaaactctttactcatctatctatcaaatacttatttttttagaagtcactgagattaataaaatttatttttattctgcaccagatagtgcttatattattgcatcaatattaactgctatttcctattaaaattgtaaatctactatttataattattcttttgtgaaactttgattaaagatactcctttgagactattttagtagtagtaggtacagggatatatgaatgcagaaatatcatataaacaacttgcaaataacgtaagtcctgtttatattagacatacataaaggccctgtgaaacttatcattaaggaatttcagaacagtcatagtgggaaaagcatgcggggaagactgctgatagctaaactgtgacaatagaaaaggtcgtatcataaaatactgttagtatatttttgtatgtttatgcaattggttgaaaatcaggcaaattttttataatttttgataaatatttgacaaagacttcaaatatgtctcttgtagtcaccattgtagaaatttgttttgtttaaattcatttggcattaacttcccgccccaaaattctacatcaatacatctctcttcctactcttcccaacccctccaaaaaataacaccaaactcaaagcaagtcacaaacgttttgcacaaataaagccagttctccgtggaattaatgtgataggtcttgaatatattgttgataattaacccaatcaagtaacattgccaggaaatctttattcttttccttttttaaaggttcataaactttatttcttagagcagttttaggtttacagaaaagttgaacaggaagtacagagttcccatacactctcactcctgccccctaaccacagtttcctctattattattaacataacgcattgaggtggtacatttgttacaactgatgaactgatattgatatatcattaactaaagtcaatagtctacattagggttcactctttctgttgtatagtcctgtgggttttgtcaaatgcataatgttatgtatccaccattacaggataatacagaacagtttcactgcccccaaaatcttctgtgttccacctatttatccctccctccaactcttacttttcttttttaatacccaaattaagccacagtaatataaattagttggagctaagaatttgccagtgattccccatggcaatcaaactttcttaattattaatctagactagcactgtccaaaagaaatataatgtgagccattatgtatttaaaaaactctagaagctgctttaaaaggaacaagtaaaattaatttaataatattatacttatcccaatatatccaaaatatcaatttcaacattcagtcaacaggaaagctgagatattttacatttcggaggtactaattcttgaaatccagtgcgcattttacacttacagcacatctaatttcagcctagctacatacattccgagtgttcaatcagtagccacaagtagccagtacctgtcaggtacagcacagatttagactttgagcaacttgaaagcaggttatcctcttctctccagggcctccagagtaggcatgcagtgaatatttttgaaaggtaaatcagaaagataaaaggatcctgattcttacaaagatgttctgcaactactctctttaaactctccagcctcataaaaagtggaatggggatcatgcttattcctgcatatcaaaccaatgactatggggcttcctgactcccagaaagcctgaatcatccgaaatgttgactcatgaacctaaggtgactgaaatgtaacgtgaaccaaattagctttccaaggcatctttgtatttccactttcctgtctccccgctgcctctctctttgggtgactcactctcttaccatgtaagagtccagcaggcaaggccccaaactctctttggaagaagagcagactttcaaatggtcggccccagatccctagttaattcagcacagctgttttcctcccaatttcgggggctgcggtttagactgagtgagcctaactgtcaaaaaacaatttttttcttattttagggtggtagtagtagtgatgtagtttggaactttgagtgaacaaataatcttttatttcaaaaatctttaaaaatccttagggcccacttcccagtcccgctaatacctttctccagtcgggtttcttcctttcccgggaggaaagtttccactctcagttcccccaggataacgcccttccggtggcgcgccagaaaccgcgccgacccctcccagccagcagcccgccccctttcccagtgctctaacgacatacggacgccagctgcgggcaaggccaagaccccaccccaactcacggttacccaaagtgggggtggagctcccagctctcagccccgcccattgaacgcaatcccagccggtaagagagaggaagtgccgtagtccccacccactttcatctccttccctttctgttggcccggctggtcgcctatcttctcgatcctgtagccgattggctctctccctcccgcgccagtccctgccctcccctggggagggtgagtcacgccaaactgggcggagagtccgctggcctcactcctagctcatctgggcggcggcggcaagtggggacagggcgggtggcgcatcaccggcgcggaggcaggaggagcagtctcattgttccgggagccgtcaccacagtaggtccctcggctcagtcggcccagcccctctcagtcctccccaacccccacaaccgcccgcggctctgagacgcggccccggcggcggcggcagcagctgcagcatcatctccaccctccagccatggaagacctggaccagtctcctctggtctcgtcctcggacagcccaccccggccgcagcccgcgttcaagtaccagttcgtgagggagcccgaggacgaggaggaagaagaggaggaggaagaggaggacgaggacgaagacctggaggagctggaggtgctggagaggaagcccgccgccgggctgtccgcggccccagtgcccaccgcccctgccgccggcgcgcccctgatggacttcggaaatgacttcgtgccgccggcgccccggggacccctgccggccgctccccccgtcgccccggagcggcagccgtcttgggacccgagcccggtgtcgtcgaccgtgcccgcgccatccccgctgtctgctgccgcagtctcgccctccaagctccctgaggacgacgagcctccggcccggcctccccctcctcccccggccagcgtgagcccccaggcagagcccgtgtggaccccgccagccccggctcccgccgcgcccccctccaccccggccgcgcccaagcgcaggggctcctcgggctcagtgggtgagtgccgcgacctctcgcttcgcgccgcccctcgcgcccctccctcttttgtgtgcagccccagatgctttgggctggtccctcctctccgccccgagggcgctttgtctgcggacttcggggcgatggcgccccgtctggttggaagcgcggggagaagggtggggcggcccttggagcccgggtttgttcttattgtccgtcttggtttcggggaacacgtgcaccgctcccggctcccactttcaccctgtgtgatgcccagcgtacggattctcggaagttaggcacccacccgtagtaggagccgggtatatacccgagagccagggttgtggatttatcgggttggttgggcttcgaggtgaggaaggaaaggccttggcacccagatatttttaggaggtgcttttgtctacccgtctgggttgctcctttggaaaaggtgcagttttgctgcgggtctgttggcctgcattctgccccgggctccctcctcacctcctggctggcgtgggtggcccctttgcgcttcccctccccctcctcctgtgctcgtggggagctggccgagtggaaaacgtccacattgacccaaccgcagtgaagggagagcgcctccagtggtgtggtgcgtggagaaatgggaaggagagagttctggtaaagtcctgccaccgcccagctccccggggtgtgatgtggactgctccccaccagctaaaccgagccagggaaaggggatctaggcattgtgttcgagggggcgtagttctgccggggtttcagctgcagggtcggaggaattgctgttagtgtggacttggcccagcctcttagtgcatcataattgaatcttacagaaaaaaataaaaggcaaaatggttgacattcctaaagaagggaaaacctgtggattccttgccaggaattggctaattgaactcgtggcagatttaccatgagacacagagaaatgttttgagacagacattttcatatatattggttagaaatactgtttttcagaaggatatgttttaggttacagaatcaaaatacggtcacgtgcctcataacgacgtttaggtcaaggacagaccgcatttgcaacggtggctccataaggttgtaatggagctgaaaaattcctgccgcctagcgacgtcttgatcttgaccctgtgtaggcctagggtaatgcgtttgtatcttagtttttaacaaaagttaaaaaaaaaatagaaaaaagcttatagaataagaatataaaatttcttttctatagctttaaaatgtgtttgtgttttaagttaaacgttattacaaaagagccaaaaagtttataaaatagaaaagatacagtaagctaaggttgatttattattgaaaaaatatatctaaagataaatttagtgtagcctaaccgtagagtgtctgtaagttgtacagtagtacatggtaatgtcctaggccttcacattcactcactactcacgtccacagcagcttccaggctggcaagctctgttcatggccagtgccctgcacacgtgtgccatcttttaatcctttgtacagtgttattttaggtatgtttagataaacactacacaaataccattgtgttacagttgcctacagtaacatcctgtataggttagtagcctaggagcaattgattataccatatagcctacatataggtatgtagtaggctctaccatctaggtttctgtaagtatactgtgaggtttgcacaacgacagaattgcctaacaatacatttctcagatcctgttccccctgttcagcgaggcatgactatgtatggtctgtaaaatagttttcaagttctttcattcacctaagttcctgattgtatgttattattagtcacgttgttttattgccgttttcatcttgggaaattattttggaagcgaaaaaaatcacgtttgttagagattgagaatgcataatattagatacattcataagtacttgctacttcggggacagaaagtgtcccactagcagtaggacctttatgtataaaaggtcaagaatcaagtagtgtaactgcctgcttggaaatcttcatagccttgtagga

SEQ ID NO: 873 - DNA, 6000 bp, Homo sapiens
tgaaacatcattttggtactcttaagaatttttttatttaaattttttatttgtataaatttatgggtacaagtgtaatttttttgcatgtattgattgcatagtggtcacccttttagtgtatccatcaccctaataatgtacattgtaccaataaggaatttctcatcatcccttctccttctctccagtcttctgagtctccactatcattccaaactctatgtccatatgtacactttatttagctcttgcttataagtgagaccatgataatggaagagagattggttaagctgacctcccaaagttctcccaaccctaagattctatgattctagcaggctggatctcttgtagtgttctcagagagaacagctactaaccagtggtatctgaaaactttaatcttctacttctgatgaggtattttcttttctttgtttctttttttttttgtttttttttgagatggagtttcgctcttttcacccaggctgtagtgcaatggcatgatcttggctcactgcaacccctgcctctcaggtccaagcaattctcctgcctcagcctcccaagtagctggggttacaggtgtgcaccaccatgccctgctaatttggtatttttagtagagatggggtttcaccatgttggccaggctggtctcaaactcctgacctcaagagatctacccgcctcagccacccaaagtgcggggattataggcatgagtcacggtgcccgtctgataagctattttcaaatataaattattgaataattattttaaaactattattagtatctagaatgtgcatttttcttttaactggttcaaatgtccaccagaattttgttagtgatagtgatatttacatctagttacaacaatgtataactagctttacttttaattgtggtagagcagcaacagcctcctttctttttgctttgttgatcattctatgaaagctgggcaaactctttactcatctatctatcaaatacttatttttttagaagtcactgagattaataaaatttatttttattctgcaccagatagtgcttatattattgcatcaatattaactgctatttcctattaaaattgtaaatctactatttataattattcttttgtgaaactttgattaaagatactcctttgagactattttagtagtagtaggtacagggatatatgaatgcagaaatatcatataaacaacttgcaaataacgtaagtcctgtttatattagacatacataaaggccctgtgaaacttatcattaaggaatttcagaacagtcatagtgggaaaagcatgcggggaagactgctgatagctaaactgtgacaatagaaaaggtcgtatcataaaatactgttagtatatttttgtatgtttatgcaattggttgaaaatcaggcaaattttttataatttttgataaatatttgacaaagacttcaaatatgtctcttgtagtcaccattgtagaaatttgttttgtttaaattcatttggcattaacttcccgccccaaaattctacatcaatacatctctcttcctactcttcccaacccctccaaaaaataacaccaaactcaaagcaagtcacaaacgttttgcacaaataaagccagttctccgtggaattaatgtgataggtcttgaatatattgttgataattaacccaatcaagtaacattgccaggaaatctttattcttttccttttttaaaggttcataaactttatttcttagagcagttttaggtttacagaaaagttgaacaggaagtacagagttcccatacactctcactcctgccccctaaccacagtttcctctattattattaacataacgcattgaggtggtacatttgttacaactgatgaactgatattgatatatcattaactaaagtcaatagtctacattagggttcactctttctgttgtatagtcctgtgggttttgtcaaatgcataatgttatgtatccaccattacaggataatacagaacagtttcactgcccccaaaatcttctgtgttccacctatttatccctccctccaactcttacttttcttttttaatacccaaattaagccacagtaatataaattagttggagctaagaatttgccagtgattccccatggcaatcaaactttcttaattattaatctagactagcactgtccaaaagaaatataatgtgagccattatgtatttaaaaaactctagaagctgctttaaaaggaacaagtaaaattaatttaataatattatacttatcccaatatatccaaaatatcaatttcaacattcagtcaacaggaaagctgagatattttacatttcggaggtactaattcttgaaatccagtgcgcattttacacttacagcacatctaatttcagcctagctacatacattccgagtgttcaatcagtagccacaagtagccagtacctgtcaggtacagcacagatttagactttgagcaacttgaaagcaggttatcctcttctctccagggcctccagagtaggcatgcagtgaatatttttgaaaggtaaatcagaaagataaaaggatcctgattcttacaaagatgttctgcaactactctctttaaactctccagcctcataaaaagtggaatggggatcatgcttattcctgcatatcaaaccaatgactatggggcttcctgactcccagaaagcctgaatcatccgaaatgttgactcatgaacctaaggtgactgaaatgtaacgtgaaccaaattagctttccaaggcatctttgtatttccactttcctgtctccccgctgcctctctctttgggtgactcactctcttaccatgtaagagtccagcaggcaaggccccaaactctctttggaagaagagcagactttcaaatggtcggccccagatccctagttaattcagcacagctgttttcctcccaatttcgggggctgcggtttagactgagtgagcctaactgtcaaaaaacaatttttttcttattttagggtggtagtagtagtgatgtagtttggaactttgagtgaacaaataatcttttatttcaaaaatctttaaaaatccttagggcccacttcccagtcccgctaatacctttctccagtcgggtttcttcctttcccgggaggaaagtttccactctcagttcccccaggataacgcccttccggtggcgcgccagaaaccgcgccgacccctcccagccagcagcccgccccctttcccagtgctctaacgacatacggacgccagctgcgggcaaggccaagaccccaccccaactcacggttacccaaagtgggggtggagctcccagctctcagccccgcccattgaacgcaatcccagccggtaagagagaggaagtgccgtagtccccacccactttcatctccttccctttctgttggcccggctggtcgcctatcttctcgatcctgtagccgattggctctctccctcccgcgccagtccctgccctcccctggggagggtgagtcacgccaaactgggcggagagtccgctggcctcactcctagctcatctgggcggcggcggcaagtggggacagggcgggtggcgcatcaccggcgcggaggcaggaggagcagtctcattgttccgggagccgtcaccacagtaggtccctcggctcagtcggcccagcccctctcagtcctccccaacccccacaaccgcccgcggctctgagacgcggccccggcggcggcggcagcagctgcagcatcatctccaccctccagccatggaagacctggaccagtctcctctggtctcgtcctcggacagcccaccccggccgcagcccgcgttcaagtaccagttcgtgagggagcccgaggacgaggaggaagaagaggaggaggaagaggaggacgaggacgaagacctggaggagctggaggtgctggagaggaagcccgccgccgggctgtccgcggccccagtgcccaccgcccctgccgccggcgcgcccctgatggacttcggaaatgacttcgtgccgccggcgccccggggacccctgccggccgctccccccgtcgccccggagcggcagccgtcttgggacccgagcccggtgtcgtcgaccgtgcccgcgccatccccgctgtctgctgccgcagtctcgccctccaagctccctgaggacgacgagcctccggcccggcctccccctcctcccccggccagcgtgagcccccaggcagagcccgtgtggaccccgccagccccggctcccgccgcgcccccctccaccccggccgcgcccaagcgcaggggctcctcgggctcagtgggtgagtgccgcgacctctcgcttcgcgccgcccctcgcgcccctccctcttttgtgtgcagccccagatgctttgggctggtccctcctctccgccccgagggcgctttgtctgcggacttcggggcgatggcgccccgtctggttggaagcgcggggagaagggtggggcggcccttggagcccgggtttgttcttattgtccgtcttggtttcggggaacacgtgcaccgctcccggctcccactttcaccctgtgtgatgcccagcgtacggattctcggaagttaggcacccacccgtagtaggagccgggtatatacccgagagccagggttgtggatttatcgggttggttgggcttcgaggtgaggaaggaaaggccttggcacccagatatttttaggaggtgcttttgtctacccgtctgggttgctcctttggaaaaggtgcagttttgctgcgggtctgttggcctgcattctgccccgggctccctcctcacctcctggctggcgtgggtggcccctttgcgcttcccctccccctcctcctgtgctcgtggggagctggccgagtggaaaacgtccacattgacccaaccgcagtgaagggagagcgcctccagtggtgtggtgcgtggagaaatgggaaggagagagttctggtaaagtcctgccaccgcccagctccccggggtgtgatgtggactgctccccaccagctaaaccgagccagggaaaggggatctaggcattgtgttcgagggggcgtagttctgccggggtttcagctgcagggtcggaggaattgctgttagtgtggacttggcccagcctcttagtgcatcataattgaatcttacagaaaaaaataaaaggcaaaatggttgacattcctaaagaagggaaaacctgtggattccttgccaggaattggctaattgaactcgtggcagatttaccatgagacacagagaaatgttttgagacagacattttcatatatattggttagaaatactgtttttcagaaggatatgttttaggttacagaatcaaaatacggtcacgtgcctcataacgacgtttaggtcaaggacagaccgcatttgcaacggtggctccataaggttgtaatggagctgaaaaattcctgccgcctagcgacgtcttgatcttgaccctgtgtaggcctagggtaatgcgtttgtatcttagtttttaacaaaagttaaaaaaaaaatagaaaaaagcttatagaataagaatataaaatttcttttctatagctttaaaatgtgtttgtgttttaagttaaacgttattacaaaagagccaaaaagtttataaaatagaaaagatacagtaagctaaggttgatttattattgaaaaaatatatctaaagataaatttagtgtagcctaaccgtagagtgtctgtaagttgtacagtagtacatggtaatgtcctaggccttcacattcactcactactcacgtccacagcagcttccaggctggcaagctctgttcatggccagtgccctgcacacgtgtgccatcttttaatcctttgtacagtgttatt

SEQ ID NO: 874 - DNA, 6000 bp, Homo sapiens
acgccttttaactcttttgaggggcatacataattcaaggacaattaacttgttctacaaataccagtttaggtgtcaatttagcattctgcaaataaggtataatactatagaaatggaaggggtgatttccccaagtaataggtctcttactgaaaacatgcaagcacgtttgtgtctggcgtagtgctgtattcttcaaagtcttgagcagggcctggtgcagactgtatacccaacaaatatttctcttattaaaaagtataaagtgaaagcacaaaagggatggttaagcaagataagaaagatgagaggtggattacagacacacctgtttcaagagcagtcaaccacagctttttcacctactgaaaatgactggcctgtgttcaagagcacctctgaattacattcaatctttctatttaaaagagactgaaacatcattttggtactcttaagaatttttttatttaaattttttatttgtataaatttatgggtacaagtgtaatttttttgcatgtattgattgcatagtggtcacccttttagtgtatccatcaccctaataatgtacattgtaccaataaggaatttctcatcatcccttctccttctctccagtcttctgagtctccactatcattccaaactctatgtccatatgtacactttatttagctcttgcttataagtgagaccatgataatggaagagagattggttaagctgacctcccaaagttctcccaaccctaagattctatgattctagcaggctggatctcttgtagtgttctcagagagaacagctactaaccagtggtatctgaaaactttaatcttctacttctgatgaggtattttcttttctttgtttctttttttttttgtttttttttgagatggagtttcgctcttttcacccaggctgtagtgcaatggcatgatcttggctcactgcaacccctgcctctcaggtccaagcaattctcctgcctcagcctcccaagtagctggggttacaggtgtgcaccaccatgccctgctaatttggtatttttagtagagatggggtttcaccatgttggccaggctggtctcaaactcctgacctcaagagatctacccgcctcagccacccaaagtgcggggattataggcatgagtcacggtgcccgtctgataagctattttcaaatataaattattgaataattattttaaaactattattagtatctagaatgtgcatttttcttttaactggttcaaatgtccaccagaattttgttagtgatagtgatatttacatctagttacaacaatgtataactagctttacttttaattgtggtagagcagcaacagcctcctttctttttgctttgttgatcattctatgaaagctgggcaaactctttactcatctatctatcaaatacttatttttttagaagtcactgagattaataaaatttatttttattctgcaccagatagtgcttatattattgcatcaatattaactgctatttcctattaaaattgtaaatctactatttataattattcttttgtgaaactttgattaaagatactcctttgagactattttagtagtagtaggtacagggatatatgaatgcagaaatatcatataaacaacttgcaaataacgtaagtcctgtttatattagacatacataaaggccctgtgaaacttatcattaaggaatttcagaacagtcatagtgggaaaagcatgcggggaagactgctgatagctaaactgtgacaatagaaaaggtcgtatcataaaatactgttagtatatttttgtatgtttatgcaattggttgaaaatcaggcaaattttttataatttttgataaatatttgacaaagacttcaaatatgtctcttgtagtcaccattgtagaaatttgttttgtttaaattcatttggcattaacttcccgccccaaaattctacatcaatacatctctcttcctactcttcccaacccctccaaaaaataacaccaaactcaaagcaagtcacaaacgttttgcacaaataaagccagttctccgtggaattaatgtgataggtcttgaatatattgttgataattaacccaatcaagtaacattgccaggaaatctttattcttttccttttttaaaggttcataaactttatttcttagagcagttttaggtttacagaaaagttgaacaggaagtacagagttcccatacactctcactcctgccccctaaccacagtttcctctattattattaacataacgcattgaggtggtacatttgttacaactgatgaactgatattgatatatcattaactaaagtcaatagtctacattagggttcactctttctgttgtatagtcctgtgggttttgtcaaatgcataatgttatgtatccaccattacaggataatacagaacagtttcactgcccccaaaatcttctgtgttccacctatttatccctccctccaactcttacttttcttttttaatacccaaattaagccacagtaatataaattagttggagctaagaatttgccagtgattccccatggcaatcaaactttcttaattattaatctagactagcactgtccaaaagaaatataatgtgagccattatgtatttaaaaaactctagaagctgctttaaaaggaacaagtaaaattaatttaataatattatacttatcccaatatatccaaaatatcaatttcaacattcagtcaacaggaaagctgagatattttacatttcggaggtactaattcttgaaatccagtgcgcattttacacttacagcacatctaatttcagcctagctacatacattccgagtgttcaatcagtagccacaagtagccagtacctgtcaggtacagcacagatttagactttgagcaacttgaaagcaggttatcctcttctctccagggcctccagagtaggcatgcagtgaatatttttgaaaggtaaatcagaaagataaaaggatcctgattcttacaaagatgttctgcaactactctctttaaactctccagcctcataaaaagtggaatggggatcatgcttattcctgcatatcaaaccaatgactatggggcttcctgactcccagaaagcctgaatcatccgaaatgttgactcatgaacctaaggtgactgaaatgtaacgtgaaccaaattagctttccaaggcatctttgtatttccactttcctgtctccccgctgcctctctctttgggtgactcactctcttaccatgtaagagtccagcaggcaaggccccaaactctctttggaagaagagcagactttcaaatggtcggccccagatccctagttaattcagcacagctgttttcctcccaatttcgggggctgcggtttagactgagtgagcctaactgtcaaaaaacaatttttttcttattttagggtggtagtagtagtgatgtagtttggaactttgagtgaacaaataatcttttatttcaaaaatctttaaaaatccttagggcccacttcccagtcccgctaatacctttctccagtcgggtttcttcctttcccgggaggaaagtttccactctcagttcccccaggataacgcccttccggtggcgcgccagaaaccgcgccgacccctcccagccagcagcccgccccctttcccagtgctctaacgacatacggacgccagctgcgggcaaggccaagaccccaccccaactcacggttacccaaagtgggggtggagctcccagctctcagccccgcccattgaacgcaatcccagccggtaagagagaggaagtgccgtagtccccacccactttcatctccttccctttctgttggcccggctggtcgcctatcttctcgatcctgtagccgattggctctctccctcccgcgccagtccctgccctcccctggggagggtgagtcacgccaaactgggcggagagtccgctggcctcactcctagctcatctgggcggcggcggcaagtggggacagggcgggtggcgcatcaccggcgcggaggcaggaggagcagtctcattgttccgggagccgtcaccacagtaggtccctcggctcagtcggcccagcccctctcagtcctccccaacccccacaaccgcccgcggctctgagacgcggccccggcggcggcggcagcagctgcagcatcatctccaccctccagccatggaagacctggaccagtctcctctggtctcgtcctcggacagcccaccccggccgcagcccgcgttcaagtaccagttcgtgagggagcccgaggacgaggaggaagaagaggaggaggaagaggaggacgaggacgaagacctggaggagctggaggtgctggagaggaagcccgccgccgggctgtccgcggccccagtgcccaccgcccctgccgccggcgcgcccctgatggacttcggaaatgacttcgtgccgccggcgccccggggacccctgccggccgctccccccgtcgccccggagcggcagccgtcttgggacccgagcccggtgtcgtcgaccgtgcccgcgccatccccgctgtctgctgccgcagtctcgccctccaagctccctgaggacgacgagcctccggcccggcctccccctcctcccccggccagcgtgagcccccaggcagagcccgtgtggaccccgccagccccggctcccgccgcgcccccctccaccccggccgcgcccaagcgcaggggctcctcgggctcagtgggtgagtgccgcgacctctcgcttcgcgccgcccctcgcgcccctccctcttttgtgtgcagccccagatgctttgggctggtccctcctctccgccccgagggcgctttgtctgcggacttcggggcgatggcgccccgtctggttggaagcgcggggagaagggtggggcggcccttggagcccgggtttgttcttattgtccgtcttggtttcggggaacacgtgcaccgctcccggctcccactttcaccctgtgtgatgcccagcgtacggattctcggaagttaggcacccacccgtagtaggagccgggtatatacccgagagccagggttgtggatttatcgggttggttgggcttcgaggtgaggaaggaaaggccttggcacccagatatttttaggaggtgcttttgtctacccgtctgggttgctcctttggaaaaggtgcagttttgctgcgggtctgttggcctgcattctgccccgggctccctcctcacctcctggctggcgtgggtggcccctttgcgcttcccctccccctcctcctgtgctcgtggggagctggccgagtggaaaacgtccacattgacccaaccgcagtgaagggagagcgcctccagtggtgtggtgcgtggagaaatgggaaggagagagttctggtaaagtcctgccaccgcccagctccccggggtgtgatgtggactgctccccaccagctaaaccgagccagggaaaggggatctaggcattgtgttcgagggggcgtagttctgccggggtttcagctgcagggtcggaggaattgctgttagtgtggacttggcccagcctcttagtgcatcataattgaatcttacagaaaaaaataaaaggcaaaatggttgacattcctaaagaagggaaaacctgtggattccttgccaggaattggctaattgaactcgtggcagatttaccatgagacacagagaaatgttttgagacagacattttcatatatattggttagaaatactgtttttcagaaggatatgttttaggttacagaatcaaaatacggtcacgtgcctcataacgacgtttaggtcaaggacagaccgcatttgcaacggtggctccataaggttgtaatggagctgaaaaattc

SEQ ID NO: 875 - DNA, 6000 bp, Homo sapiens
taaattttgtggactcttttctgccttctttcttcatatgaggacacatttttatttgtctaagacagcataggatgtcttctgcttggttttgtactagtagatcaaaattaactttctcgtatctgaaataatttttttgctagatcaaaataaatttctccagggaaacaatgcatattcaaatagcctaatttctaataatgcaggggaccgaaaacagttaaaggagaaagatttggttcagttttaattatgactttcacttgcttattatgggatttctttttgggacttaacatttttattttagatccaacactaactgtcaatgcttaactaacatgactgaagaagttgatcttacatttatatttctattcttattacagaatggatttaatatgttaagatgttgaacagaaccatgaactgcatttcacaaaatggtacatttcataaaatctaaaatcccagcaaaatgatagggacaacaacttagcacgctgttaatttttcacttaagggtgccaaaatgatatttcagtcttttttacatagaaaggtcagatgtcattcagtggcgctcctgaacacaggcaagtcattttcagaggtgaaaaagctgtggttgactgctcttgaaacaggtttctctacaatccacctctcatctttcttctcttaccgaacccactctggtgttcacgtcctgctatatgtaggcaagagtatacccatcctacgccttttaactcttttgaggggcatacataattcaaggacaattaacttgttctacaaataccagtttaggtgtcaatttagcattctgcaaataaggtataatactatagaaatggaaggggtgatttccccaagtaataggtctcttactgaaaacatgcaagcacgtttgtgtctggcgtagtgctgtattcttcaaagtcttgagcagggcctggtgcagactgtatacccaacaaatatttctcttattaaaaagtataaagtgaaagcacaaaagggatggttaagcaagataagaaagatgagaggtggattacagacacacctgtttcaagagcagtcaaccacagctttttcacctactgaaaatgactggcctgtgttcaagagcacctctgaattacattcaatctttctatttaaaagagactgaaacatcattttggtactcttaagaatttttttatttaaattttttatttgtataaatttatgggtacaagtgtaatttttttgcatgtattgattgcatagtggtcacccttttagtgtatccatcaccctaataatgtacattgtaccaataaggaatttctcatcatcccttctccttctctccagtcttctgagtctccactatcattccaaactctatgtccatatgtacactttatttagctcttgcttataagtgagaccatgataatggaagagagattggttaagctgacctcccaaagttctcccaaccctaagattctatgattctagcaggctggatctcttgtagtgttctcagagagaacagctactaaccagtggtatctgaaaactttaatcttctacttctgatgaggtattttcttttctttgtttctttttttttttgtttttttttgagatggagtttcgctcttttcacccaggctgtagtgcaatggcatgatcttggctcactgcaacccctgcctctcaggtccaagcaattctcctgcctcagcctcccaagtagctggggttacaggtgtgcaccaccatgccctgctaatttggtatttttagtagagatggggtttcaccatgttggccaggctggtctcaaactcctgacctcaagagatctacccgcctcagccacccaaagtgcggggattataggcatgagtcacggtgcccgtctgataagctattttcaaatataaattattgaataattattttaaaactattattagtatctagaatgtgcatttttcttttaactggttcaaatgtccaccagaattttgttagtgatagtgatatttacatctagttacaacaatgtataactagctttacttttaattgtggtagagcagcaacagcctcctttctttttgctttgttgatcattctatgaaagctgggcaaactctttactcatctatctatcaaatacttatttttttagaagtcactgagattaataaaatttatttttattctgcaccagatagtgcttatattattgcatcaatattaactgctatttcctattaaaattgtaaatctactatttataattattcttttgtgaaactttgattaaagatactcctttgagactattttagtagtagtaggtacagggatatatgaatgcagaaatatcatataaacaacttgcaaataacgtaagtcctgtttatattagacatacataaaggccctgtgaaacttatcattaaggaatttcagaacagtcatagtgggaaaagcatgcggggaagactgctgatagctaaactgtgacaatagaaaaggtcgtatcataaaatactgttagtatatttttgtatgtttatgcaattggttgaaaatcaggcaaattttttataatttttgataaatatttgacaaagacttcaaatatgtctcttgtagtcaccattgtagaaatttgttttgtttaaattcatttggcattaacttcccgccccaaaattctacatcaatacatctctcttcctactcttcccaacccctccaaaaaataacaccaaactcaaagcaagtcacaaacgttttgcacaaataaagccagttctccgtggaattaatgtgataggtcttgaatatattgttgataattaacccaatcaagtaacattgccaggaaatctttattcttttccttttttaaaggttcataaactttatttcttagagcagttttaggtttacagaaaagttgaacaggaagtacagagttcccatacactctcactcctgccccctaaccacagtttcctctattattattaacataacgcattgaggtggtacatttgttacaactgatgaactgatattgatatatcattaactaaagtcaatagtctacattagggttcactctttctgttgtatagtcctgtgggttttgtcaaatgcataatgttatgtatccaccattacaggataatacagaacagtttcactgcccccaaaatcttctgtgttccacctatttatccctccctccaactcttacttttcttttttaatacccaaattaagccacagtaatataaattagttggagctaagaatttgccagtgattccccatggcaatcaaactttcttaattattaatctagactagcactgtccaaaagaaatataatgtgagccattatgtatttaaaaaactctagaagctgctttaaaaggaacaagtaaaattaatttaataatattatacttatcccaatatatccaaaatatcaatttcaacattcagtcaacaggaaagctgagatattttacatttcggaggtactaattcttgaaatccagtgcgcattttacacttacagcacatctaatttcagcctagctacatacattccgagtgttcaatcagtagccacaagtagccagtacctgtcaggtacagcacagatttagactttgagcaacttgaaagcaggttatcctcttctctccagggcctccagagtaggcatgcagtgaatatttttgaaaggtaaatcagaaagataaaaggatcctgattcttacaaagatgttctgcaactactctctttaaactctccagcctcataaaaagtggaatggggatcatgcttattcctgcatatcaaaccaatgactatggggcttcctgactcccagaaagcctgaatcatccgaaatgttgactcatgaacctaaggtgactgaaatgtaacgtgaaccaaattagctttccaaggcatctttgtatttccactttcctgtctccccgctgcctctctctttgggtgactcactctcttaccatgtaagagtccagcaggcaaggccccaaactctctttggaagaagagcagactttcaaatggtcggccccagatccctagttaattcagcacagctgttttcctcccaatttcgggggctgcggtttagactgagtgagcctaactgtcaaaaaacaatttttttcttattttagggtggtagtagtagtgatgtagtttggaactttgagtgaacaaataatcttttatttcaaaaatctttaaaaatccttagggcccacttcccagtcccgctaatacctttctccagtcgggtttcttcctttcccgggaggaaagtttccactctcagttcccccaggataacgcccttccggtggcgcgccagaaaccgcgccgacccctcccagccagcagcccgccccctttcccagtgctctaacgacatacggacgccagctgcgggcaaggccaagaccccaccccaactcacggttacccaaagtgggggtggagctcccagctctcagccccgcccattgaacgcaatcccagccggtaagagagaggaagtgccgtagtccccacccactttcatctccttccctttctgttggcccggctggtcgcctatcttctcgatcctgtagccgattggctctctccctcccgcgccagtccctgccctcccctggggagggtgagtcacgccaaactgggcggagagtccgctggcctcactcctagctcatctgggcggcggcggcaagtggggacagggcgggtggcgcatcaccggcgcggaggcaggaggagcagtctcattgttccgggagccgtcaccacagtaggtccctcggctcagtcggcccagcccctctcagtcctccccaacccccacaaccgcccgcggctctgagacgcggccccggcggcggcggcagcagctgcagcatcatctccaccctccagccatggaagacctggaccagtctcctctggtctcgtcctcggacagcccaccccggccgcagcccgcgttcaagtaccagttcgtgagggagcccgaggacgaggaggaagaagaggaggaggaagaggaggacgaggacgaagacctggaggagctggaggtgctggagaggaagcccgccgccgggctgtccgcggccccagtgcccaccgcccctgccgccggcgcgcccctgatggacttcggaaatgacttcgtgccgccggcgccccggggacccctgccggccgctccccccgtcgccccggagcggcagccgtcttgggacccgagcccggtgtcgtcgaccgtgcccgcgccatccccgctgtctgctgccgcagtctcgccctccaagctccctgaggacgacgagcctccggcccggcctccccctcctcccccggccagcgtgagcccccaggcagagcccgtgtggaccccgccagccccggctcccgccgcgcccccctccaccccggccgcgcccaagcgcaggggctcctcgggctcagtgggtgagtgccgcgacctctcgcttcgcgccgcccctcgcgcccctccctcttttgtgtgcagccccagatgctttgggctggtccctcctctccgccccgagggcgctttgtctgcggacttcggggcgatggcgccccgtctggttggaagcgcggggagaagggtggggcggcccttggagcccgggtttgttcttattgtccgtcttggtttcggggaacacgtgcaccgctcccggctcccactttcaccctgtgtgatgcccagcgtacggattctcggaagttaggcacccacccgtagtaggagccgggtatatacccgagagccagggttgtggatttatcgggttggttgggcttcgaggtgaggaaggaaaggccttggcacccagatatttttaggaggt

SEQ ID NO: 876 - DNA, 6000 bp, Homo sapiens
atcaccagagcctagatggtcagtaggtttttgtttttgttttttttgtttttttttttgagacggagtctcgctctgttgcccaggctggagtgcagtggcgcgatctctgctcactgcaagcgctgcctcccaggttcacgccattctcctgcctcagcctcccgagtagctgggactacaggcgcccgccaccacgcctggctaatttttttttgtatttttagtagagacggggtttcaccatgttagccaggatcatcctgatctcctgacctcgtgatccgcctgccttggcctcccaaagtgctgggattacaggcgtgagccaccgcgcccggccaaggtcagttggttttagttgaatcaatgaacaatgtttaaagacagtgaccacttggtttctatctatctccattgaagattaaataacagaacttacacttcaacctttaagtattaaaaataataagttatatattagaatgagttgttaaattttgtggactcttttctgccttctttcttcatatgaggacacatttttatttgtctaagacagcataggatgtcttctgcttggttttgtactagtagatcaaaattaactttctcgtatctgaaataatttttttgctagatcaaaataaatttctccagggaaacaatgcatattcaaatagcctaatttctaataatgcaggggaccgaaaacagttaaaggagaaagatttggttcagttttaattatgactttcacttgcttattatgggatttctttttgggacttaacatttttattttagatccaacactaactgtcaatgcttaactaacatgactgaagaagttgatcttacatttatatttctattcttattacagaatggatttaatatgttaagatgttgaacagaaccatgaactgcatttcacaaaatggtacatttcataaaatctaaaatcccagcaaaatgatagggacaacaacttagcacgctgttaatttttcacttaagggtgccaaaatgatatttcagtcttttttacatagaaaggtcagatgtcattcagtggcgctcctgaacacaggcaagtcattttcagaggtgaaaaagctgtggttgactgctcttgaaacaggtttctctacaatccacctctcatctttcttctcttaccgaacccactctggtgttcacgtcctgctatatgtaggcaagagtatacccatcctacgccttttaactcttttgaggggcatacataattcaaggacaattaacttgttctacaaataccagtttaggtgtcaatttagcattctgcaaataaggtataatactatagaaatggaaggggtgatttccccaagtaataggtctcttactgaaaacatgcaagcacgtttgtgtctggcgtagtgctgtattcttcaaagtcttgagcagggcctggtgcagactgtatacccaacaaatatttctcttattaaaaagtataaagtgaaagcacaaaagggatggttaagcaagataagaaagatgagaggtggattacagacacacctgtttcaagagcagtcaaccacagctttttcacctactgaaaatgactggcctgtgttcaagagcacctctgaattacattcaatctttctatttaaaagagactgaaacatcattttggtactcttaagaatttttttatttaaattttttatttgtataaatttatgggtacaagtgtaatttttttgcatgtattgattgcatagtggtcacccttttagtgtatccatcaccctaataatgtacattgtaccaataaggaatttctcatcatcccttctccttctctccagtcttctgagtctccactatcattccaaactctatgtccatatgtacactttatttagctcttgcttataagtgagaccatgataatggaagagagattggttaagctgacctcccaaagttctcccaaccctaagattctatgattctagcaggctggatctcttgtagtgttctcagagagaacagctactaaccagtggtatctgaaaactttaatcttctacttctgatgaggtattttcttttctttgtttctttttttttttgtttttttttgagatggagtttcgctcttttcacccaggctgtagtgcaatggcatgatcttggctcactgcaacccctgcctctcaggtccaagcaattctcctgcctcagcctcccaagtagctggggttacaggtgtgcaccaccatgccctgctaatttggtatttttagtagagatggggtttcaccatgttggccaggctggtctcaaactcctgacctcaagagatctacccgcctcagccacccaaagtgcggggattataggcatgagtcacggtgcccgtctgataagctattttcaaatataaattattgaataattattttaaaactattattagtatctagaatgtgcatttttcttttaactggttcaaatgtccaccagaattttgttagtgatagtgatatttacatctagttacaacaatgtataactagctttacttttaattgtggtagagcagcaacagcctcctttctttttgctttgttgatcattctatgaaagctgggcaaactctttactcatctatctatcaaatacttatttttttagaagtcactgagattaataaaatttatttttattctgcaccagatagtgcttatattattgcatcaatattaactgctatttcctattaaaattgtaaatctactatttataattattcttttgtgaaactttgattaaagatactcctttgagactattttagtagtagtaggtacagggatatatgaatgcagaaatatcatataaacaacttgcaaataacgtaagtcctgtttatattagacatacataaaggccctgtgaaacttatcattaaggaatttcagaacagtcatagtgggaaaagcatgcggggaagactgctgatagctaaactgtgacaatagaaaaggtcgtatcataaaatactgttagtatatttttgtatgtttatgcaattggttgaaaatcaggcaaattttttataatttttgataaatatttgacaaagacttcaaatatgtctcttgtagtcaccattgtagaaatttgttttgtttaaattcatttggcattaacttcccgccccaaaattctacatcaatacatctctcttcctactcttcccaacccctccaaaaaataacaccaaactcaaagcaagtcacaaacgttttgcacaaataaagccagttctccgtggaattaatgtgataggtcttgaatatattgttgataattaacccaatcaagtaacattgccaggaaatctttattcttttccttttttaaaggttcataaactttatttcttagagcagttttaggtttacagaaaagttgaacaggaagtacagagttcccatacactctcactcctgccccctaaccacagtttcctctattattattaacataacgcattgaggtggtacatttgttacaactgatgaactgatattgatatatcattaactaaagtcaatagtctacattagggttcactctttctgttgtatagtcctgtgggttttgtcaaatgcataatgttatgtatccaccattacaggataatacagaacagtttcactgcccccaaaatcttctgtgttccacctatttatccctccctccaactcttacttttcttttttaatacccaaattaagccacagtaatataaattagttggagctaagaatttgccagtgattccccatggcaatcaaactttcttaattattaatctagactagcactgtccaaaagaaatataatgtgagccattatgtatttaaaaaactctagaagctgctttaaaaggaacaagtaaaattaatttaataatattatacttatcccaatatatccaaaatatcaatttcaacattcagtcaacaggaaagctgagatattttacatttcggaggtactaattcttgaaatccagtgcgcattttacacttacagcacatctaatttcagcctagctacatacattccgagtgttcaatcagtagccacaagtagccagtacctgtcaggtacagcacagatttagactttgagcaacttgaaagcaggttatcctcttctctccagggcctccagagtaggcatgcagtgaatatttttgaaaggtaaatcagaaagataaaaggatcctgattcttacaaagatgttctgcaactactctctttaaactctccagcctcataaaaagtggaatggggatcatgcttattcctgcatatcaaaccaatgactatggggcttcctgactcccagaaagcctgaatcatccgaaatgttgactcatgaacctaaggtgactgaaatgtaacgtgaaccaaattagctttccaaggcatctttgtatttccactttcctgtctccccgctgcctctctctttgggtgactcactctcttaccatgtaagagtccagcaggcaaggccccaaactctctttggaagaagagcagactttcaaatggtcggccccagatccctagttaattcagcacagctgttttcctcccaatttcgggggctgcggtttagactgagtgagcctaactgtcaaaaaacaatttttttcttattttagggtggtagtagtagtgatgtagtttggaactttgagtgaacaaataatcttttatttcaaaaatctttaaaaatccttagggcccacttcccagtcccgctaatacctttctccagtcgggtttcttcctttcccgggaggaaagtttccactctcagttcccccaggataacgcccttccggtggcgcgccagaaaccgcgccgacccctcccagccagcagcccgccccctttcccagtgctctaacgacatacggacgccagctgcgggcaaggccaagaccccaccccaactcacggttacccaaagtgggggtggagctcccagctctcagccccgcccattgaacgcaatcccagccggtaagagagaggaagtgccgtagtccccacccactttcatctccttccctttctgttggcccggctggtcgcctatcttctcgatcctgtagccgattggctctctccctcccgcgccagtccctgccctcccctggggagggtgagtcacgccaaactgggcggagagtccgctggcctcactcctagctcatctgggcggcggcggcaagtggggacagggcgggtggcgcatcaccggcgcggaggcaggaggagcagtctcattgttccgggagccgtcaccacagtaggtccctcggctcagtcggcccagcccctctcagtcctccccaacccccacaaccgcccgcggctctgagacgcggccccggcggcggcggcagcagctgcagcatcatctccaccctccagccatggaagacctggaccagtctcctctggtctcgtcctcggacagcccaccccggccgcagcccgcgttcaagtaccagttcgtgagggagcccgaggacgaggaggaagaagaggaggaggaagaggaggacgaggacgaagacctggaggagctggaggtgctggagaggaagcccgccgccgggctgtccgcggccccagtgcccaccgcccctgccgccggcgcgcccctgatggacttcggaaatgacttcgtgccgccggcgccccggggacccctgccggccgctccccccgtcgccccggagcggcagccgtcttgggacccgagcccggtgtcgtcgaccgtgcccgcgccatccccgctgtctgctgccgcagtctcgccctccaagctccctgaggacgacgagcctccggcccggcctccccctcctcccccggccagcgtgagcccccaggcagagcccg

SEQ ID NO: 877 - DNA, 6000 bp, Homo sapiens
gtaccacaggtcaaatcatttccttcaaacttaacaaaccatacatgttcatctgctactaacaaaatcttcattgttcatctataaaattgggaataatagtgtaacagtattttctttgataaaatagataatactgtctactttgtaggcaaccatgaagattaaataaaataatatcagtcaggcacggtggctcacatctgtaatctcagcactttgggaggctgaggtgggaggatcacctgagtccaggagtttgaggtcagcctgggcaacaaagcaagaccccatctctattttttatataattattttttttaaaaagtggctgggcgtggtggctcatgcctgtaatcccagcattttgggaggccaaggtgggtggatggcctgagctcaggagttcaagaccaccctgggcaacatggtgaaaccctgtctctactaaaatacaaaaaattagccaggcatggtggcacacacctgtagtccccgctactcgggaggctgaggcacaagaatcgctggagcctgggaggcagaggttgcagtgagacgagatcacgccactgcactacaacttgagctacagagtgagactctgtctcaaaaaataaataaataaataaataaataaataaataaaataaaaataaaacaataaaacaatatatatatattttttaaattccataactggcatatggaagatacatagtgttaactgaagaatcccaaggtttataaatttggagaggggagctttactttttataaagggttgcagcctgcaggctggtgatcctgacaggctgggaagtgtagactctggcagagactgaaagcaggtatttagagggaggaaaaagtggaacacaaatttatgccaaatgagttggctaagaatacacacttaagttacaggagctttgattattcacaaagcggggggcagcacatgcatgcatagtgagcaaacatgcatgttacatatgtcctatgttctctttggggtggagatttaacatttaaatgcattacaattaggtgaagcaaaggacatgaagacactcagtgcacagcctctgaaaaccagccagaaccagtctgtggttggtagtctcttactaggatgttactgaaatcagtctcttgtccaatcaaagaaatagttatggtttgtggaacaggggttggggggatacagttagtcagcatctagtggtcagtgagctacaattgattcaatattgcttatctccaggccagtgtctatttagctaccagagaaaaagaaaaaccttgtggcagttagaagatggtttactcttcaagtgtagggatgtgtgacttaacccttgcctgacacagccttaggtcttgtttataatttggcatcttattgcctcaaagagtctgttccatcggtcatatgatcactattgtaacaatagtaaatggcactttcttttcccactccctttgactatttacccatagcatcttccacacctagttcaaaattcatctaggatacttcaaatcaatctttccaccttaatcagatagctctgttttgtgtcacatttaaagtaaattatttactttaagtactgctaagaacacactctatgtaaactattatactggatgcccaaggagataagtagaagatggttctctggctttgaggtgtttggttgagacagcaatatacattaaaagttgaacaggaatgcaaagcagcatgggacaaattatacagaaagtgtgatagttttgagattatagtggctgatctgttcattattttgtactcaggaactaaaaaattactaagagttgtaagagctctggttttatagctgagataataagcccagtgacacaagtggtctaggatcccagctatgaagtggcaagaggtttcctgtctcctggtcctatgctgcttgtgcgtgggtttctaactattcacgagtcttttaatcagttaatgtttgctctctctaagtagacagtttagtatagccaggtaagaactgggctttgaaactaaaatgtttgggtttgaatcctggctttgctatttactgtgtgactttgggcaagtcactaatctctttgctttacttacccacctataaaatgagtataataatggtactttacttcatagggtggttgtgagcattatatacttaatatatgtaaagcatgaaaaactgtggatttgtcattataattgctattagtctgtgagggaatggagggcaaggaatctagtcatgttttttgttttttaaacctcttccctcagcttctgatcagagcattcacgtgggtgttaaataaatgcatgttagctaccttaagcatattgggagtttttgtatcactgaagtaagacttgagatttgtgtaagcctggactagtctggtaccagagaagtctagaaaggtaaaaactgagatagcatcagattgattttaggacctagcacagcttgtttaaaaaagtcagtcaagacaaataagtgctgagagaaatgggggtcaatgagtctaattccaaatgagctttctcatctattttaagatctgcttcaaacttcctcagacaaaaatctggccttttaaggaaagtgcagagaacatgccttcgtgggcttagtttgagggaataggggctgcatttcaccctggaggtggctacatgaattcgtgaactgaggtgacaacactgactctctccggaagaaaagatgctatctcttcacggagtttaattacaatggcactacttgaaacaagctgcagcagcagcaacaacaaacgctactgttaacccagtcacagctcagctcaatattcagattagagaaagcaagaaccatttttttccctgggacacccttctctactcaaatacccgctgaaaaaaaaattctgagacaagcactagggagtggggaaagcgggcagagatgaacaataacccatattcaggggttagaaaaataatattaataaatcatggtaggtttttttgtttgtttttggcagcaacttgccactcttcagcatcatccatcaggaaatctaggtcggaaaagtgtaccaactgaccttccaaattttctgcatttggcagatgcaaatcacacagtccatccccgccctcagcacttggacggtatcagggaaacgtaagtatcaatggaagaatcttgaagtgaaaaataaataactggtcaggttagggttagtgttcttgtgtgcaagggagctagtgaagtttaggctttgatgcgcacccacagcgtcagcaaaggaggaggaattaagggacagcatgggccgaaaagcccccgagttttgaggtcaagccaacgggctgggtctccggtatcctaggatctgccctgcacacaacctttggcagtttctcggtttgaatctcgcctgtacatttccagacgagacactgtcttactgagcgttctcacagcgcctagctcagagctgaccgcagagccggctctcaataacatcgagacgcaaaagcagcttttgaggttaggggcggaagggcatcggttttacttatttcaaggctggcgctcggtgcagccggatccaactgccagcacaatgttcccgatcacttctcgcttccatttcagcccaggagacgtcgggaaacccacaggacccgctaggggctaagcggttaagccgcgtccttcaggtgtcagtctcgatccgttcggaaaccacaacctccagaatcccttgtgccaggaggccaggccgcaaataagatggctccagaagggtggaacatacagcgggggggggggggggggaacttagttgttggcagtttcttcacgggatgtgtttaaattgccgagtccccacatacgcgccaccccacaaatctccttcgaggccgtggaggccacacggctgccgcctcgccctctcctccaggagtatgctgggatttgtagtccagcagccggactgtgccgagctacctttcccagcttgccctgcggctcgggtgatatcaacagtcttttccagaactctgtctgcactgagaccctcttcccccagtcctcttctcgcggtcgactccttcccatccgtggcgacagaacggcggttgcaggagaggccccggtccctcgccgcgccgccccgaggggcacttccggcggcggttcacttcctggttgggtggatggagccgggcgggagcgcgcgcgggggaggggcggcgggtcagtctccgcccggcgctcccgggatcagctggcgggcgggcgggagccgagcgcggccccggctctcgctgcagcgccgcctcttctctgcgtcgcaggccggcccggcggccgtgacaatgtcgcggggctggtagcagggcgccggccgccgagccgtctcaagtgggtgctgccaggatgccgcctcgaggggcggcggggagacccgggaggagcgggaggcagtgcccgggagggtcggcgctgccggagcagctcggatccctcctttctccgagctcccggctcgggggtcccgggttctggggccggggtcgcgttttcagccccacggtttttctcgccgggaaaatacatgaagcgtttccccaggatgatggcttttgctccccctaggactcagcggttgaatttttaagcgtgttactgattcatcctctctttcttcctctgtcatcacaggtttaaacttacacgaatcgctttctggaggaggaggggacccgctgcgcgattgacacgcatattcctataggcatcctccctcagcccccacccccacggccggattcgggtggctcctctccgaggtgaaatctgagaagaaatccttggatctcttttcttaaaaaaaaaaaaaaaaaaaaaaaatctagaaaccatcggtattttgctttgctgctccctattcgcaagatgaagaagtttttcgactcccggcgagagcagggcggctctggcctgggctccggctccagcggaggagggggcagcacctcgggcctgggcagtggctacatcggaagagtcttcggcatcgggcgacagcaggtcacagtggacgaggtgttggcggaaggtacggtggggctcaatgcgccgtaaattaaaatcttgtgctgatgcggcaatactgtggtttctagttgttgcatgtatgaatgggctttgaccagttgaccctcccttcccccttcacttgccctgtgagtcattgtccttgagagatttaaaattgagatttgaaagtgactgggcttatgggggtgtggggaggttgccgaaattgtttacgttagtggccttttatttttatttttttaatattgagaagccaaattttgaggatcacacaagaaaacgtatgtgtgaaagtgtaaagctttatgccaaaggcagggtgatgggcttgtcatcctcctaaaacttaaaatcttgatgtgaaggctgaagggtggggggacttttaagaagagaggggtttctccttctcctacccaactttcccacttccatgagcaggcattggaaggaagagaggattttcggagaacgtgaacgtgtttttccaagggccaaggctcttggtggatttcactagtagatttgtttcctgacccaactgtaatcaggtccccaggttatagcaaagataacagaaattacataaaacaaatgtggttattttgaactcagtctagtaggcccctcttccttctcgctttaggttttgttttttgtttttttaatcaaaagaaaaattacttgagagtggctctgattttgttttttcgctatcagagaggatgttatttagatctgctgcataaattccctctgtgtttcatctgtgtgtctatactcacgtagatatacatcttgattcccccaggctttcgggaaatctttgcatgtctct

SEQ ID NO: 878 - DNA, 6000 bp, Homo sapiens
ttgaagtcctgacctcaagtgatccacctgcctcggcctcccaaagtgttgggattacgggcatgagccagcatgcctgggcaagaactgtcatttttttaaaaaggacatggttcttacaagttcgcttctgctaaacagtggttctcaaacttgaatgtgtattagaattacctgaaaggtttgtgaacagaaactgctgcctctgcccctccctcttactcagtaggtctggatggggccccaaaatttgcatttctaacaagttccacttcgctaaaagacggcaacatagaaagcccatatggtgtaatgaaaatgatgtgggttttgaggtcagtcttggctctgccctttttaagatgttttgtagaaatagttgacagactctaatcctgctcagcctctgtttccacaccaataaaagtaatgcacacttcatagatgtattgtgagggttaaatggtatgattaaatacccaacatagtgcttgactcagttaaggattttaattaatggtggtcccctttcctttgatttcctcaaagatacagcacactgggtttatggtaacatgatttaggtgtaccacaggtcaaatcatttccttcaaacttaacaaaccatacatgttcatctgctactaacaaaatcttcattgttcatctataaaattgggaataatagtgtaacagtattttctttgataaaatagataatactgtctactttgtaggcaaccatgaagattaaataaaataatatcagtcaggcacggtggctcacatctgtaatctcagcactttgggaggctgaggtgggaggatcacctgagtccaggagtttgaggtcagcctgggcaacaaagcaagaccccatctctattttttatataattattttttttaaaaagtggctgggcgtggtggctcatgcctgtaatcccagcattttgggaggccaaggtgggtggatggcctgagctcaggagttcaagaccaccctgggcaacatggtgaaaccctgtctctactaaaatacaaaaaattagccaggcatggtggcacacacctgtagtccccgctactcgggaggctgaggcacaagaatcgctggagcctgggaggcagaggttgcagtgagacgagatcacgccactgcactacaacttgagctacagagtgagactctgtctcaaaaaataaataaataaataaataaataaataaataaaataaaaataaaacaataaaacaatatatatatattttttaaattccataactggcatatggaagatacatagtgttaactgaagaatcccaaggtttataaatttggagaggggagctttactttttataaagggttgcagcctgcaggctggtgatcctgacaggctgggaagtgtagactctggcagagactgaaagcaggtatttagagggaggaaaaagtggaacacaaatttatgccaaatgagttggctaagaatacacacttaagttacaggagctttgattattcacaaagcggggggcagcacatgcatgcatagtgagcaaacatgcatgttacatatgtcctatgttctctttggggtggagatttaacatttaaatgcattacaattaggtgaagcaaaggacatgaagacactcagtgcacagcctctgaaaaccagccagaaccagtctgtggttggtagtctcttactaggatgttactgaaatcagtctcttgtccaatcaaagaaatagttatggtttgtggaacaggggttggggggatacagttagtcagcatctagtggtcagtgagctacaattgattcaatattgcttatctccaggccagtgtctatttagctaccagagaaaaagaaaaaccttgtggcagttagaagatggtttactcttcaagtgtagggatgtgtgacttaacccttgcctgacacagccttaggtcttgtttataatttggcatcttattgcctcaaagagtctgttccatcggtcatatgatcactattgtaacaatagtaaatggcactttcttttcccactccctttgactatttacccatagcatcttccacacctagttcaaaattcatctaggatacttcaaatcaatctttccaccttaatcagatagctctgttttgtgtcacatttaaagtaaattatttactttaagtactgctaagaacacactctatgtaaactattatactggatgcccaaggagataagtagaagatggttctctggctttgaggtgtttggttgagacagcaatatacattaaaagttgaacaggaatgcaaagcagcatgggacaaattatacagaaagtgtgatagttttgagattatagtggctgatctgttcattattttgtactcaggaactaaaaaattactaagagttgtaagagctctggttttatagctgagataataagcccagtgacacaagtggtctaggatcccagctatgaagtggcaagaggtttcctgtctcctggtcctatgctgcttgtgcgtgggtttctaactattcacgagtcttttaatcagttaatgtttgctctctctaagtagacagtttagtatagccaggtaagaactgggctttgaaactaaaatgtttgggtttgaatcctggctttgctatttactgtgtgactttgggcaagtcactaatctctttgctttacttacccacctataaaatgagtataataatggtactttacttcatagggtggttgtgagcattatatacttaatatatgtaaagcatgaaaaactgtggatttgtcattataattgctattagtctgtgagggaatggagggcaaggaatctagtcatgttttttgttttttaaacctcttccctcagcttctgatcagagcattcacgtgggtgttaaataaatgcatgttagctaccttaagcatattgggagtttttgtatcactgaagtaagacttgagatttgtgtaagcctggactagtctggtaccagagaagtctagaaaggtaaaaactgagatagcatcagattgattttaggacctagcacagcttgtttaaaaaagtcagtcaagacaaataagtgctgagagaaatgggggtcaatgagtctaattccaaatgagctttctcatctattttaagatctgcttcaaacttcctcagacaaaaatctggccttttaaggaaagtgcagagaacatgccttcgtgggcttagtttgagggaataggggctgcatttcaccctggaggtggctacatgaattcgtgaactgaggtgacaacactgactctctccggaagaaaagatgctatctcttcacggagtttaattacaatggcactacttgaaacaagctgcagcagcagcaacaacaaacgctactgttaacccagtcacagctcagctcaatattcagattagagaaagcaagaaccatttttttccctgggacacccttctctactcaaatacccgctgaaaaaaaaattctgagacaagcactagggagtggggaaagcgggcagagatgaacaataacccatattcaggggttagaaaaataatattaataaatcatggtaggtttttttgtttgtttttggcagcaacttgccactcttcagcatcatccatcaggaaatctaggtcggaaaagtgtaccaactgaccttccaaattttctgcatttggcagatgcaaatcacacagtccatccccgccctcagcacttggacggtatcagggaaacgtaagtatcaatggaagaatcttgaagtgaaaaataaataactggtcaggttagggttagtgttcttgtgtgcaagggagctagtgaagtttaggctttgatgcgcacccacagcgtcagcaaaggaggaggaattaagggacagcatgggccgaaaagcccccgagttttgaggtcaagccaacgggctgggtctccggtatcctaggatctgccctgcacacaacctttggcagtttctcggtttgaatctcgcctgtacatttccagacgagacactgtcttactgagcgttctcacagcgcctagctcagagctgaccgcagagccggctctcaataacatcgagacgcaaaagcagcttttgaggttaggggcggaagggcatcggttttacttatttcaaggctggcgctcggtgcagccggatccaactgccagcacaatgttcccgatcacttctcgcttccatttcagcccaggagacgtcgggaaacccacaggacccgctaggggctaagcggttaagccgcgtccttcaggtgtcagtctcgatccgttcggaaaccacaacctccagaatcccttgtgccaggaggccaggccgcaaataagatggctccagaagggtggaacatacagcgggggggggggggggggaacttagttgttggcagtttcttcacgggatgtgtttaaattgccgagtccccacatacgcgccaccccacaaatctccttcgaggccgtggaggccacacggctgccgcctcgccctctcctccaggagtatgctgggatttgtagtccagcagccggactgtgccgagctacctttcccagcttgccctgcggctcgggtgatatcaacagtcttttccagaactctgtctgcactgagaccctcttcccccagtcctcttctcgcggtcgactccttcccatccgtggcgacagaacggcggttgcaggagaggccccggtccctcgccgcgccgccccgaggggcacttccggcggcggttcacttcctggttgggtggatggagccgggcgggagcgcgcgcgggggaggggcggcgggtcagtctccgcccggcgctcccgggatcagctggcgggcgggcgggagccgagcgcggccccggctctcgctgcagcgccgcctcttctctgcgtcgcaggccggcccggcggccgtgacaatgtcgcggggctggtagcagggcgccggccgccgagccgtctcaagtgggtgctgccaggatgccgcctcgaggggcggcggggagacccgggaggagcgggaggcagtgcccgggagggtcggcgctgccggagcagctcggatccctcctttctccgagctcccggctcgggggtcccgggttctggggccggggtcgcgttttcagccccacggtttttctcgccgggaaaatacatgaagcgtttccccaggatgatggcttttgctccccctaggactcagcggttgaatttttaagcgtgttactgattcatcctctctttcttcctctgtcatcacaggtttaaacttacacgaatcgctttctggaggaggaggggacccgctgcgcgattgacacgcatattcctataggcatcctccctcagcccccacccccacggccggattcgggtggctcctctccgaggtgaaatctgagaagaaatccttggatctcttttcttaaaaaaaaaaaaaaaaaaaaaaaatctagaaaccatcggtattttgctttgctgctccctattcgcaagatgaagaagtttttcgactcccggcgagagcagggcggctctggcctgggctccggctccagcggaggagggggcagcacctcgggcctgggcagtggctacatcggaagagtcttcggcatcgggcgacagcaggtcacagtggacgaggtgttggcggaaggtacggtggggctcaatgcgccgtaaattaaaatcttgtgctgatgcggcaatactgtggtttctagttgttgcatgtatgaatgggctttgaccagttgaccctcccttcccccttcacttgccctgtgagtcattgtccttgagagatttaaaattgagatttgaaagtgactgggcttatgggggtgtggggaggttgccgaaattgtttacgttagtggccttttatttttatttttttaatattgagaa

SEQ ID NO: 879 - DNA, 6000 bp, Homo sapiens
cacttatctcaggtgttgagctctgttaagagtcaggcctgtgtcccattcatcttaggatctctggaacctaatacagtgcctgccacaaagaggcacgtacgtgtatcatattgataccaccaacatattatgtgcctttaatggaatttttggtgatttcacacacatttttaagccttactagtttgctctgtaggtaggagaaattatcaaagtttactgatgtggacatttggtacttctcatcagccttggacctggattccttgaatataaattagaaagctgttctgaggagccatctagtccaccttatagttccagaatgttgtcttcaacacagtaataaataaacatttattgtttaaagcttagatataagtcctcgtatagctaaggaagtatgataaaagcacagcttctcaatccttctttgaacattgctccaattttcccattgagctcattctggaagcttaaaccaaatcttcccttgatatcatatgcccattaacttagacatgatttagcttctcatcatggcatctttgctgagaaagctagaaagaaaatattctccctggcacccagcctagaaatagccatattcctctaaactcataacttaaagccttcacttcccccaaacagcccctgctggactagttagtgaaaccaggccaggaaggctgatgctaccaggggaggtatggcagtgcgacatctttttgtcttacccagcacctgctccttggggttcttgcaattccttatgaaaaagcacagaccaatacccacgctagagaaaaagagatcatcagcggaatgtggtggtaatctggtctgtgttttgaagcctctcacaccactcctccctaaactgcctagccaccgctctgggcacacagggtacaactcctgtggtccttaaacaactctggctagaactgtagataagtcagcactcggggactcacagagaagagagtccagggaaggagcatggctacccaaaacgtctgttaagcctttaaggagctggtgaggactctgcaaagaacatctggctctgtcccctaacaatgggggaaaggaattgcttcagattgctgcagctcaactagctttcacattgctcccactcccctttaacacacacacacacacacacacacacacacacacacacactctctctctctctctctctctctctccccccccacatatatacatatgatgtataacgttgctggtaagtaatggctaccatttattgaacacctgaaaatgttaattatatatattgcctcatttaatcttcatgaccagcccattaagcagtggttctcaaacttgaccttgcgtcagaatctctccaggaacttattaagccccacacccacagcctacagagtgaggcctgagaatctccatttccaacaagctcgcaggtgataagtatgccccactttgagaaccactgccacagggaaacagagattcaagagtggtttggaatgtcttgcctacagttccacagctagtaaagaacagatccagaatttgaacctagatctgtctgactctacagacagtgctggtaaccatgctactgtatgtgtgaatgtatgcctcatcttcccaaattcattggcagatccttaaaggcagatgtcaatcacactatagacctccctcatccatctcagaacttcatagggtctttggacttggtaggtgctacataaatactttgtatactggctcctacatatctacatacttctaagagccacaaattcaaactcaacttaagccaaagaacacaaaaagggcgcatagccagacccagttttacgtgacattctctctcgctactctgtctttgcccatggtgccaccacactaactcctactcactcttcagtcacttccttcagaaatcctgggctccctaaaactgggggccactgcaccctaagtttatctctatgatggcatttaccaatccactataactggctattttccatctcttaaagcagttggtaaaagctagcatctagtttaacagtatacccccagagcctagcacagcacctggcacttcacaggcaactccataaactgttgaatgaataaatgcagagctacaagtcctaaattctgtgtaaaaatatcacaatacgtgatgcgcagttctcaaagatgaatcccagagaagaggaaggcagcctaggtaacaaagaccaattttgccttttcttttccctatcacttctctcacacttggagaacatgcaccgcttagggcagcatcatccgtgatgagacaacatcctagctgaacaaaacgctcgtgggctataaggtcagcagaggccattcagaggggaggaaagtgttctgtggcccttcgtttctcctgatttctctctgacacactctccttttcactgtttctccaccccactgcagttaagggctttggcacagggatgaaagagacagatcagactcaagggtgcggatctggcagcgggcacagaagcatctcctagcctgcaccaaagtccacgggaaagatccaaggggacagtgactctggccccagataaagcgcagctagaacagtactgagattggaagagcaataatttcacatggacattaactgtcagagatcttttttaaaaatcatgtttttaaagtacagacttcaactctattcccagaaaactgggccctgctgaatccagtgcttacacaagctgagagccaaacacagcttcttcctcttccaaacccacccaccagcccgcaacatccaccatggtaagcatttcccaggcccaggtcaggacccttgcttcaactttagcttgcaaaaggcccctttttaaagaggcctcttagctttctctcttcccttgctaataaaactgttccctaccatcaccatgttgcagtaagagagacctctcccttcttccaacccctctcggtctataacacaacctacagcaggttggccccatccaatcagtctgaattgcttcatgccaaggaaattgctgcttttattaaaaataaaagcacactaggcaggcgaagggctgtgaaaagtatgagtctggcataattatgaaggtcgaggttaaggttaccaaaagagacatgcaaagatttcccgaaagcctgggggaatcaagatgtatatctacgtgagtatagacacacagatgaaacacagagggaatttatgcagcagatctaaataacatcctctctgatagcgaaaaaacaaaatcagagccactctcaagtaatttttcttttgattaaaaaaacaaaaaacaaaacctaaagcgagaaggaagaggggcctactagactgagttcaaaataaccacatttgttttatgtaatttctgttatctttgctataacctggggacctgattacagttgggtcaggaaacaaatctactagtgaaatccaccaagagccttggcccttggaaaaacacgttcacgttctccgaaaatcctctcttccttccaatgcctgctcatggaagtgggaaagttgggtaggagaaggagaaacccctctcttcttaaaagtccccccacccttcagccttcacatcaagattttaagttttaggaggatgacaagcccatcaccctgcctttggcataaagctttacactttcacacatacgttttcttgtgtgatcctcaaaatttggcttctcaatattaaaaaaataaaaataaaaggccactaacgtaaacaatttcggcaacctccccacacccccataagcccagtcactttcaaatctcaattttaaatctctcaaggacaatgactcacagggcaagtgaagggggaagggagggtcaactggtcaaagcccattcatacatgcaacaactagaaaccacagtattgccgcatcagcacaagattttaatttacggcgcattgagccccaccgtaccttccgccaacacctcgtccactgtgacctgctgtcgcccgatgccgaagactcttccgatgtagccactgcccaggcccgaggtgctgccccctcctccgctggagccggagcccaggccagagccgccctgctctcgccgggagtcgaaaaacttcttcatcttgcgaatagggagcagcaaagcaaaataccgatggtttctagattttttttttttttttttttttttaagaaaagagatccaaggatttcttctcagatttcacctcggagaggagccacccgaatccggccgtgggggtgggggctgagggaggatgcctataggaatatgcgtgtcaatcgcgcagcgggtcccctcctcctccagaaagcgattcgtgtaagtttaaacctgtgatgacagaggaagaaagagaggatgaatcagtaacacgcttaaaaattcaaccgctgagtcctagggggagcaaaagccatcatcctggggaaacgcttcatgtattttcccggcgagaaaaaccgtggggctgaaaacgcgaccccggccccagaacccgggacccccgagccgggagctcggagaaaggagggatccgagctgctccggcagcgccgaccctcccgggcactgcctcccgctcctcccgggtctccccgccgcccctcgaggcggcatcctggcagcacccacttgagacggctcggcggccggcgccctgctaccagccccgcgacattgtcacggccgccgggccggcctgcgacgcagagaagaggcggcgctgcagcgagagccggggccgcgctcggctcccgcccgcccgccagctgatcccgggagcgccgggcggagactgacccgccgcccctcccccgcgcgcgctcccgcccggctccatccacccaaccaggaagtgaaccgccgccggaagtgcccctcggggcggcgcggcgagggaccggggcctctcctgcaaccgccgttctgtcgccacggatgggaaggagtcgaccgcgagaagaggactgggggaagagggtctcagtgcagacagagttctggaaaagactgttgatatcacccgagccgcagggcaagctgggaaaggtagctcggcacagtccggctgctggactacaaatcccagcatactcctggaggagagggcgaggcggcagccgtgtggcctccacggcctcgaaggagatttgtggggtggcgcgtatgtggggactcggcaatttaaacacatcccgtgaagaaactgccaacaactaagttcccccccccccccccccgctgtatgttccacccttctggagccatcttatttgcggcctggcctcctggcacaagggattctggaggttgtggtttccgaacggatcgagactgacacctgaaggacgcggcttaaccgcttagcccctagcgggtcctgtgggtttcccgacgtctcctgggctgaaatggaagcgagaagtgatcgggaacattgtgctggcagttggatccggctgcaccgagcgccagccttgaaataagtaaaaccgatgcccttccgcccctaacctcaaaagctgcttttgcgtctcgatgttattgagagccggctctgcggtcagctctgagctaggcgctgtgagaacgctcagtaagacagtgtctcgtctggaaatgtacaggcgagattcaaaccgagaaactgccaaaggttgtgtgcagggcagatcctaggataccggagacccagcccgttggcttgacctcaaaactcgggggcttttcggcccatgctgtcccttaattcctcctcctttgctgacgctgtgggtgcgcatcaaagcctaaacttcactagctcccttgcacacaagaacactaaccctaacctgaccagttatttatttttcacttcaagattcttccattgatacttacgtttccctgataccgtccaagtgctgagggcgggg

SEQ ID NO: 880 - DNA, 6000 bp, Homo sapiens
gggaggggtaagaaggagacatcagtggtctaccctctttatgtgataacagactccctcttttatctggcagctgctccctcaagaggaatacccattctttcttcctaggtcaagaaagagagtccaaggcatggtcaatcacaacactgtccctctagtcatgggccaagtgctgggcacacgtcaccagccaggctactcttagcctttcccataattttaataacctgagactgggagaaagaagcctcactctctcctggagtgatcaaactgtatgtaagtctagagttctctgtgagtacagtctcctctagcaagaaaggatgagaccaactcataataagaagccaaaatacatgtacatatgagtaagagagagagagagagctgacagcattgtttgggtgtctggatctagccattcctgtggtggctctgtctagtccttacttaaatgagttaatacatccccttttaactgaagctagtttgtgttgggtttctgtcccttaaagtcaagagtcctgagaaatacaatactggtcaaaaaaagtcttcatagaacaggtgaaccaggaaaaaagggattcaccagaaagataagaggagaggcagagggtgaacgtaacagcagctgcactcgaggaactgcgagcagctcaggatgacttgagctgagatgtgcagagggggttggagagacgggcgagagccacatcagggaaggccttgtttgtcaggttaaaatgtttggtctttatgtgagggcgacagggagcccccaaagggtttcaagcagtggtgtgacatgctcaagctcgttttgagaagatcactcgggagaacgggtctgagagacagcacaacaggagggcagcggattagttatgaggctgctccgggaatccaggtgaagagctcaggatggaaaatgactcgacgtttttgacttggtcattggccagaggggagggcaagaacgaaaagagttgtgttttgttcatgtgcagtttgaagtaagtatcatacatttaaatggaattgtccagtaggtttactaaaagagatgacagagttggcgatgtttaagtttttctgagtcatcaattcagctgtttgctgtctgcctactactggccaagcactgtgtggaggagaacaccgtccagcctctgctccctggcatcacactgtggcaagacaaaacagatgataaccagagaaaccaatcaagaaacaagggaagtgcaggggagaccgtaaagcagcatcgtgtagcagaggggctggggtgggggctccatctcttcagtggtcctggaaggaggagctgacgccctgagggtgcaggaggtggctgaagatgaatattctccaattcatgcccactgaataggaacatgcccatttaaaagcatccatatgcattttgtttggcttgttggttttctttgcctgcctatgccttcaaagctggcattgaggtggcaggaggcttctgtgcagaaaactgaggctggtgctggaaaactcccaccatggcccctttgttctcatccagtgcctttcatcccacactcccaaagcccatcctggcgcccaccctttaattgtcaggcctggctcatcgacacaagcaggtggcatttgatcattattcctgcatcataaatgagggtaacaaaggcctccctctccagggtatcagccaatattattttgtgagttcaagggatctgactttgagttgaagcagaaaggcctgatgtcccatccttttcatttctggaattacccgtcgctgcatctttctgttaccgccatttcctctttaactccacgtatctaactggaaactttgcttttctttgtttcatcttctttggaatatgttgttccctgtgacccctccccacaaagccttgcctctgcagcagatgccctgagccttcctgatgcctgggactggtacctcatccagtttgcttgtttcaggcactaactaaactagaatgtgcctggatccctatgggccttggctttctaccagatgacaggcaaactaagagacgtacacaacctatgcactcccttccctctagaatgtttcagcaggggtcctctaagtaagaaagctggaattaaaaggaatagttttaatggggaaaccctggctagggagatgcttgataccctaaggctgtatgtctagctaggtcaggcatagctcagtgcggtctgcatttcatagcagatgtttagtttggaaagtcccctggctacttggcttctagagccctctctcaccatgggacttctctgtgggaggacagaactcatcaatcacattctccaaatgtcaagttcctgctgtgtaaccccaggagaaccttgcttcccatctacataacagaagtgaggaccccagatttgctagacaaaagcttgaacctgtggggaaaggtccccccagctggtcagaattcccaaagaaggctaccactgggagatggattgcaatataaatggcacccccaccctctggatgtttgtcatttcacccttccttctttacctgacaatctcttaagagattcttggggggatgtaatacaccagccaggaactaaattatattcaactttctcaagtagatactatttcagctacgtttgggaaatgcttagccagaatttgaggtcactggaagaggtcatagaatcactcaggttcagacttgtggaattacttacactttccagaacctgtcatgacttctttggctccagggctttatacctgctgcttcttgtgctttggggtttccttctctcccaccagccctatccacagcacacacatgcatacacaaacatgtacacacgtatacacatgcatgcatgcacatgcgcacacatgcacacacatgcatacacaaatgcacacacatacatgcatacacacacatacacacacattcacacacatgcatacacatacgtgcatacacacacatgctgcacacatgcacacacatatacatgcacacacatacatgcatacacatgtgtgcatacgcacatgcatacacacacatgcatacacagcatggcctctgcttgtccttccagagtctcttataaagcttttcctgatattccaagtctcaagctagctaccctccttttttttttttttgtgactgagtctcacactgtcacccaggctggagtgcagtggcacaatctcggctcactgcaacctccacctcctaggttcaagtgattctcctgcctcattctcccaagtagctggaattacaggcacctgccaccacgcccagctaattttttgtatttttagtagagacaaggtttcactatgttggccaagctggtcttgaactcctgaccttgccacacccccatttttacagttttctaaccattgactattttccagtcttttttttttttttttttttttttttgaggcagggtctcgctctgcacccaggctggagtatgatagtgcaaccatagcacattgcagcctcctgggctcaagaaagcctcctgctttcagcctcctgagtagctgggactacaggtatgtgccacaacatccaagtaatttttaaaaattattattatttttttttgagacggagtcttgctctgttgcccaggctagagtgcagtggtgcaatctcggctcattgcaaactctgcctcccgggtttgagtgattcttgtgcctcagcctcctgagtagctgggattacaggcgcccaccaacacacctggctaatttttatatttttagtagagacaggtttcaccatgttggctgggctggtctcgaactcctgacctcaagtgatccacctgcctcagcctcccaaagtgctgggattacaggcatgagaaaccatgccctgcctaaaattattttttgaattattaattatacaaaaatcattagttaaaaatcattaaattttgtatttttagtagagatggggtctcactatgttgcccaggctggtctcaaactcctgcttaagtgatcgtcccaccttggcctcccaaagtgctaggattacagacatcagtcactgtgcctggcgaagtctttaccaattggcaataagctctctggttgtcattacagttccaacgtgccaggcaaccagtaaatgatcaataaatattggcattttgggtgaatacataggtcattagtgctactgttctgctttgactctcattcagattaggaacgagctccccctccaaataagcaagcagactagagactatttcctgagaatgtaattccgattcaattcagaatttgtttcatatgctcaggacttggccctcggagggctggggagagggaaacaagcaatactaattgtaatctctgccttcaattttcccctttttgaacatagtactagtgttggccacctctctgcactgcttcaaatccccccggtccctcctctcgctccatcagtgccttggtgaccactttcacgcaggctttgccaactgcacatgttcaaaggctcataggtgaaagagcacagtgcatccatggaacttcaagaaattcaggggagctgaagcaaagttcattcacggtggggaggagcagaggcagtgaggggaagaagtgaggatggagggctctgcatgggatgcagcatgaaggaccttccaagagtgcaaagttatgtatcctgatggcaaggggcagccatggaagattttgagtagggaagtgacttgatcagatttatgtttttaaaagattcctcttgctgcaatatgggaaattgaccagagggggcacagctggaggcagaagtccagttggtaattagacattctcaatctgcctatatgtgaacatcattaaagaaatacccagaggaggggtccaaatgtcactttttttttcttccaggtcccctcagtgattcctgtgtgcacccagggttgagaactactgcataagaggtcctagaagatatctggtatggccagagtacagagggaccggaggtaagccaggagagacatgcagagcaaagagttgaggtctccatcttctgtgggcagcatctggcctgttctgcttcctctgattctcaccaaagtgttggcccaaatgatttttaaatttgaattcattgccattattaaacatatatagatgtcacacaaaatatccagatttctgctcctctaagaaacttgggaggtctggccaccctgggcctgcatgcccccatggcaataaatcaagccctggctgctgcttcacatgtggcatggactctccgagctgccacagcccggccactctttgtcagttcccaccactgcagccaaaagccagctgctgtttttcatctcttacccagcctgtttgctcatttaagctaattgtctagtccctgttgagattggagtttagatctcaaaagctagactctacagggtgggtaggcctgttaatgattttgttatttaccctggaagcactgcaaaggcattggaaggtttcacgtagagcagcaataacacaagcaaatctgatgtcgaaagatcactctggctggccttggtggctgatgcctgcgatcccagcactttgggaggctgaggcaggaggattgcttgagcccaggagttggagacaaggctggcaagaccctgtctctacaaaaaaaattgaaaagttaaccaggcacggtggaacacgcctgtagtcccatatacttgggaggctaaggtgaggattgcttgagcctgggaggtagaggctgcagcaagctgtgatcatgccactgcattccagcctgggcaacagagtgagaccgtctcaaaaaaaaaaaaattactctggattgtttaaactccaggtaagcagctatttgactagacaataaggacaaatcaagacctcccccagtctcct

SEQ ID NO: 881 - DNA, 6000 bp, Homo sapiens
gtgttgctactgagaaatcagatgccattccgattctggatcctttatgtgaaaccttatttcctcctgggtacttgtaagatcttccctatgtcctcagtcttctaaagttttatcacaatgttgccttggtgtggttctggttttgtccattgcactatgctcagtgagcactttcaatgtggaaattcatgctctttagttctcaaaatatataattgaattatttaattcatttcttcccctgtttcccagatgtccaaggctggctttctaatcttcttatcctttcttatttctttcccttctctttgccttctgtctatgcattctaggatattttctaactttatcttcttaacattctactcagttttttatttttgctatcagatttttaatttaaaagagctgtgtttggttctatgagtgttccttttttagggtatttatttatttacttattgagatagtgtctcgctatgtcacccaggctagagtgcagtggctgttcacaggtgtggtcatagcctcaaactcctgggctcaagttgtcctcctgcctcagcctaccaagcagcagggactacaggctcatgtcatcgcacccagcttttctgttttatttgatctttctcagagaagatcaataatagatttctcagttttcttctccccctatactctttttcttccttttctcttttttcctgttagcatgttttgggttctgtttttaatgtcagatccttcccctacattgtgatgaccttcagctgcctgctcttacttaagtgtgccagatttagcaacaaaaagaaagaaaaaaaagacaggacatctggttaaatttgaattttagataaacaatgaataatttttagtataagtatgtctcatgcaatatttggacatacttatagtacataagtattttatattttagtaaaacattaattggtgtttaactgaaaatcaaatctaactaagtgtcctgtattttatctcgcaaccctaagagtgaggtctacaaagctgcctggaagccctgagtgcgtgtgtaagtgggtggggcttgacaagggtgagtttaccaacaggttgctccagtttcattgcataaatgattacatctcttcaggtctttcctcttagattccccaaagaaaagtattccaaactctccagcctggtgagtttgaacttggctgccagagttctaggagccaagcgggaagaataccaagcagctcagtaggcatcatcttaagtttcatatggctcttcaatttcagtacagtagccctagtcttgtgttaatctcatggccttgatgaaagatggctgcaaattctttgcaccctcccacccctccccactcagggatggagcctaatccccttcccttaaatctagactggccctagtgactggcatgatttatagaatgcaacagaaataatgttcaacagcttccaagcgtgcataagaaggcttgtaacttctgcctggatgtcttggagtaaactttctggaaaccctgagcctccatgaaggaaatctgaccctgagcctgccatgtgaaggggcatgtgtagatgctctagttgacagtgccagttgagaccaaccttccagctcttcttatcatggtacccaatatgtgagttctccagactggcccatctgccagctggataacaccaagtgacctttcttgatgccaggtggaatagaagaattgctcagttcaaattcagacccacaaaatcatgagatataatggtcactgttttatgtaaccttcaagtgttgggatggttttttaggcagccttagataaccagaacacctcaactacatctgatgtccccattccagagagccactgcatgattcttcagagaacatccttccaatcatccaccctcgtggaagagggaccgtggccactgtgcagtgttgggaatgctgactgcttcttgtacagacttacaagaaatcgtcctgggtttagtctcacctacacacccactttcagacacatccagtgcagcaaactctcctatcccgagaaatcctactgtcatgttgcttctcggttttccctactcctggtttggaagtcggctttctgaggtctgttaagtcagttatcacctgtccacgtgctttccaggttccaaactcttattatttttcctctcttgttcccttgtccttgtgagatttttaatttttttttatttaaaaaagtggtttttttaggggggtggggtggggacagagtctcactctgtcacccaggctggagtgcagaggcatagctcactgcagcttcaaacccctgggctcaagtgattttcctgcctcagcctccccagtagctgggactagaggcgtgcgtcactaggcttggctaattttttttttttttttaaagagacacggtgggtgggagagagagtctcattatgttgcccaggctgatctcgaactcctgacctcaagccatcctcccaccgcggccttccaacgtgctggtgttacaggcgtgagccacagcacccagccctatctttaatttaaaggctccttggagtggaatttcaacaattatattaattttttaaatactcttagatcaggtttcctggaaacagagcctgaccctaggattcttgtgcaagtgctgtagtgagggtattctcgagggaagcctccgagtaagtgagggaaataggataggccagagggagaaactgagcaaagatatggtttctgatgaagtttatcctcagtctgatcccatgggaactctggcatatgaagggtaccacagatttattcctggccttttataagctaaaaaagttagcctctggccatggcttcctcagtctggtctgagcgcagatgtcagcagatgggggcaatgaaggggcagtgacctggggctggatgcacccacctagtaaaggttatttacgcggggtgccaacgcatctacttcattcctaaactttatttttttcatgtagcttaattttttctttctttttctttttcttttttagggacaggttttcgccatgtagcccaggataatctcccaaactcctagcctcaagcaaccacctgggcctcccaaagtgttgggattacagtctgagccacctcacctggcctaattgttgcttgtaagggatgcagtgtctctctaatcttgcttaagaaatgaattatctgtatttcattttttttcctactgtttgacctttaattttttgttttgttttgtttttgtttttgtttttgttttgagacaaggtctcaccctgtcgcccaggctggagtgcagtggtgcagtcatagctcacagcaacattgaactcctgggtttagagtgatcctcctgcttcagcctggctagtagctgggactacaggcgtggctatgcacccggctaattatttatttattttttgttttcttttctttttttctttctttttcttttctttcttcctctttttttttttttttttttttagacaatgtctcactctgtcgcccaggctggcgtgcagtggcgcaatctcagcttactgagcctctgcctcccgggcttgggtgtttatcccacctcatccgactgaatagctgggactacaggcgcatgccaccacacccggctatatatatgttttttttttttttttttttgagatgggatttcaccacattggccaggcttatctcgaactcctgggctaaagtgatccacttgccctggcctcccaaagtgctgggattacaggcatgagccactgtgcccagccttaattttttaagttatcatatgcagataaaagaggcagaaccagttttagtatccaaatcagtctgatcctaaaacccgtgctctaaaccatattaaaccaccttttaaaattacatcttaatgaaataatttaatgttacctctccagctttaagggtgccattaaccacttagattttgatgtgtcggatggaaaacactccccaaacgggctattctctgttttttaaaaaaactgaatttgcctatagactcaacggattcattctgcaagcattcactacgtggcgaaatcggtgctgggcatgggtgcaaagacgacctagccctagttggtgtcttcaagaggctgcgtccagcaggggaagcagatatgaaaacacagaactattacaagggatgagcgccgcgccaagccgaacctgggagctacggacagtgtctaaactttagtcactcacaggagtacaaagatccggggctgctcctaactcctactccaaagctttcctggcctgctgggcgcacagggaagagggaagtgctggaaacttttgggaatgtgtgttttcatgtgaaagaggggaatgaaatgtatccttcagatttcactttctacttttccggccacgggctcggcacgacctgccgttgggagacgaacggtttcccgaggtggggggaagcgcggatttgccgcgggactccggcttggcgcggagctgggcgcggcaggcgcagggaggaactggcgaggtggcccgggctcggccctccgagggtgtggagcgcccgggaaacgggaccccaagaatccaactgctcccaccctgcgcggccaggagcggggctggcgatactggggacactgtccaatccgggcagggggcgaggccgggggaccgggcgggcctggggagcaggcacgtgtggagggcggacccgccgggggtcgaggcctgcctctccgagagctcctggcgcggccgtcccggcccggggccccaggtgcgcttcccctagagagggattttccggtctcgtgggcagaggaacaaccaggaacttgggctcagtctccaccccacagtggggcggatccgtcccggataagacccgctgtctggccctgagtagggtgtgacctccgcagccgcagaggaggagcgcagcccggcctcggtacgaggggtaaaggggctccgggccgggggtcctgggctcagggaacggggagcgtggcccgggagcgtctcgcggggatgcccggctccgcgctgcaccccagagtgggtgctcgccgccggcttgcgggcaagcccgggcggccacagggtggagggggccagcgggccctggactcgctccgggtgggcgagagggaggcgagcgcggtgcttaaccgctggcaccatccaggacatccagggccgcttacacggctcaggacgcgggtcagagaccacggcagttatttattcagtccatgtgctaggctttgcatcaaaaagaaaggaccgagataatcttgcctgtagctaactcctcctaacacctcttacagtttactttttaattctttactccatttaagaaacttactcctttctcctagatccttaccactttcttaccttctcgtgtgtctaatgccctcggcacagtgcccggcacatcggagtctgattattatagggtccatgacttgagttggctggtggcgcagtctcagcattttgtcatgactttgaccagctggagactttggtgccaaggaggaaggcttctcaaccatttaccggcagaagtgacccccggggcaatgcaagtcttctgagctgacagagcagagtgggtcctgcataactcgtgctttacatggaactgggcatctgctctctcctgctgacagtgggaaggatagataaggtgtccctctccaagttatccattctcctgcccaccagtccatgacaccccaccacccccttccactccctactgtttgccctttaattttttgttttgttttgttttgagacgaggtctcactcctgtagcccaggctggagtgcagtggctggatacagttcactctgcctcccaggctcaggtgtttcacccacctcaacctcctgagtagctgagactacagg

SEQ ID NO: 882 - DNA, 6000 bp, Homo sapiens
ctcatggataacctgtcagaacctcccaagtgagagacgtggcagagaggcatatgctaggatttgcatttgacagcgctccaaccccagccccacctcaaagctgggttcagaagctcctatctggttgctttccatcagtgaagcagcagaggctgctccacagctgtggttccctctgtgtcactgagaaccacgttcagatcggacccctgggtggcaggaagcacagagggaggatttcagacccagctttttcaaccccacattttaagaaacaggaatatcttggctgggtgcggtggctcacgcctacaatcccagaactttgggaggccaaggcaggcggatcacctgaggtcaggagttcacgaccagcctggccaaaatgacagaaccctgtctgtactaaaaatacaaaaattagctgggcatagtggggcacacctgtaatcccagctacttgggaggctgaggcaggagaattgcatgaacccaggaggcagaggttgcagtgagctgagatggtgccactgcactccagactccatccagcctgggcaacagaatgagactccatctcaaaagaaacaaaacaaaaacaggaatatcgtgtgacaggataagctgatcttgaccattttaccagagtttagtttttgaaaaactgtgtgtggggtgaaaaaacctcatgataagctgcttccataagcaggctggtcttgaggggacagattgctctggagtgtgacagggcattgggcaagactcttaattctgaagtagctaatttcactctcttgctagaatatggacggagccttgaagatgacattcgctctgacacatcgttcatgttccagcgagtgctggtgtctctgtcagctgtgagtgactgcttctgatggggggcgggttttatcgaaatgtccactctatcccctttgccagcctttctcatcctttcagcccctgacatgtggatattccccaggtagtgttctcagacccctctgttcctttatcttatttctccttcagagactctggctaatcctgcctgcccattttttctactttaatttgatatttacaagtacctaacacctgccaggtccccctgtcactcagtgcattgagagttatgaagatgattcagaggcagttcctgggccttaagagtatatattgtcataagggaatacatcaggtacacagttgctagaaggcatgaaaagattacatgccaaaggagaggcgcataggaaaaagaagattcaaggagaaaatttggttgtagaaacaaagaaaagccttcatgacagagatgctggttcagagaggacttggaggattactagaatttcaagaggcagagacgtgggtgggtgtattgcagacaggaagaacagcaagaataaggcagggaacatggggttcagggaacaactgggtgaacagttgggctggtgattctggaaacagggtgggaggataaactggaattctatgttgggagcagtttacacttatttatttgggagcagtagatgacgtgatgatgacaacgatgatgggagtgatgtgactggagctgcactttcagaagagtaatgtaatagtgacgtgtaggatgaacagtggagaggaactggaggctggacgaccaggtaggaagctacctggaaaattccagctggaaaataaagcaggactgagctaggtggggcagggttgcctgaaaagggaagctggagacttcagacatttcacatcacttcccaattgcatctttatccccggcctccttcctgagcttgagactctcatttcacattgctttttagatgtttcattacagatattctactatacccttaatgaactgaaccagaactcattttcccttcaaaccagctcttcttccggacttgcctgtttctgttaatattgctgttgttcctcctacacctaaagaagcagaaccctggaaatcatctccaatttccactttgctcttgtctccaatatttacttagtaacgcctgcctgtgtctcatatttctttcccactttctcttttcctcccatatttaccactctgatgagccatgcctagaccatggaacatcgagacagtataacaataaaaatagcctaaaaactagaggaaagtagcccattttatcatttgttagcattcttcagaggcttccaccctgccttcttgtgagctggtgttggtgaggggtagggggacatttttatgggatcctcaagtcccaccataggtctcatattctctcgactctcctctgttcccaacctccccaccttttttttttttttttttaagattcaaggtcttgctatgtttcccaggccagctcttcacaggtgccatcttagctcactgccttgaactcctggcctcaagacatcctcccacctcagcctcgagtagctggaactacatgcacatcccgacccccttttggcagaggttgatcaatgtagatttgccagttaggaaggcatgagtcagctgggaagacacaggagagtggggtggtgggggaggccaggagatagtggagggagctgtccttgggaagcttctcctgctattggcagaggcactcatgcaacgttaggggccacactgaggctcagccctctaggcacacatcagagccattgtaataatgcgagcgcatttagaggacgtctgtcctccctccctgggtctgaagctccaattcttgtggtattttgtctcattactctagacctgctatcttaatggtgtccccagatcttcatgtatactctcgaattattttttatttgtttttctcatcctcagggtgggagggatgaaggaaattatctggacgatgctctcgtgagacaggatgcccaggttggtagaactgcagcttctttcttccagctttcttctctttcgccaatgagacaggccttagtgggtggatagcaacttatattacagtgtatattagccaggcttggatatgttctttaaaaatattcccacagatagcctttaataacaggtttcttgcagaggtacctggggctggacatcattatataagcactcctgggttccaagtttctcaacattaggaccattgtgtggcaatcccagagaaccactgtcttccgaatcccgtggaggtgaaagggactgttcactgtgcacttttacttcatcaaagaggacatttgataggacctatataaaatagcttgacacagtgtataccctgctgggtaaaattaatagcaaaccccaagaggcatttgcctctctgtttcccagcccagtgatggttgtcctggaaccaacccatggtctaatcagctgtggccagataacactaacgataatagctaataaaaagtgggtcattaccaggtaccaaacactgttctaaaattttttttttttttttgagatggagtttcactcttgttgcccaggctggagtgcaatggcatgatcttggctcactgcaacctccgcctcctgggttcaagtgattctgctgcctcagcctcccaaatagctgggattacaggtgcctgccaccatacccggctaatttttttctatttttagtagagacgggttttcaccatgttggccaggctggtcttaaactcctgacctctggtgatccgcctgccttggcctcccaaagtgctgggattacaggcatgagccatcgcgcgtggcccactgttctaaattctatattaagtatgtcattgaatctttgcaataacttcataaggtaagtattgctatccccattttacaaacaaggaaactgaggctcagagaggtcaagtaccttgctcaagctcagaaagataataaagggcagagctaggatttgaaccaattggcatctagacccagtattctctctctctctctctctctttttttttttttttttttgagacagggtctcactgtcgtccagactggagtgtggtggtgtgatctcagctcaccgcaacctccccctcccaggttcaagcaattctcccacctcagcctcctgagtatctgggattacaggatgcaccaccaccacccggctagtttttgtatttttaatagagatagggtttcaacatgttggccaggctggtcttgaactcctgacctcaaatgatccacctgccatggcctcccaaagtgccgggattacaggcatgagccaccgcgcctgaccatagacccagtattcttaaccaatacataaccataatgagggattggttccattcagtttgtgaggtatgaacaactttgttttatgcaaaaaaaaagaacctgttgctttcattagaggggatagaggtatgtgtgtggcttgggcttcttggagcacggcagctgggtttcaagaaggagcacccagaaagcaagcattccaatagaaacaatggcagttgcatgattgtttatgatctagcctcagagatcagtgtcacttccactaacctgtattttattctttttttttttttttttttttgagatagggtcttgctctgtctcccaggctgttgtgcagtggcatgatctcggcccactgcaaccttcacctcccaggctcaagtgatcctcccacctcagcctcctgagtagctggactacaggcgtgtgccatcatgcctggctaagttttaaatatttttttggtagaggtggggttttgccatattgcccaggctggtctcaaactcctgggctcaagcaacctatctgccttggccttccaaagtgctatgattacaggcatgagccaccgtgcccagcccacaactatgctttattaattaaagcaatgtattagtcagaattcttaagaggaacagaaccaatagagagagagagcgagagagacacagaggggtgtgtgtgtgtgtgtgtgtgtgtgtgtgtgtgtgtgtgtgtgtgtgtgtgagagaaagagagagaggatggagttgggcaagtaccaggatcttcagagggaatcagcaagctggagatgcaggccagcctatggttttgttccagtctgagtccaaaggcctgagaactaggagcagttcccatctgaaggccagcaggctggaaacccatgaagagctgatgttccagttcaagtccaaaggcaggaaaaaaactgatgtcctagctcaaggcagtcaggcaggaggagtccctctcactcttgggaaggtcagccctcttcttgaaaacaaaagctttcagctgattgtatgagggcccctcctccatattggatcatccaaaaaccctcacagaaacacccagaataatgtttgagcaaaaatctgggtaacccatggctcagtcaagttgacataaaataaattgtcacaagcctgttgagattcaagtttcagaagtgctgaataagatgaactcttttgaattaggtgaattagatgaacgctttcagctttaaatttttatgattatgtgaattgactctaaagcagtgagggaatcagagaaagaagtgaaaaaatgggggagtatatggaggtaagcccaatgagccacaatatgtgtgagttaagatctttttgagaaatgtaacaggcaagctgcttattaaaaatgaacagtaattctgattgagcaataatgtagttaaattgagcagaatgagtttcctatattcctacctggttggaatgtaagcaattggcaatgggtccctggttctactgtgagacctgtagcctcaggaaaatcacagatcattctagagcagggctatccaatagaactccccgcagtgatgagaacattccacatctgcactgtcctgtatgggtgactaccggctacctgtagccgctgggtacttgaaatgaggccaatgtgattgaagagctgaattttaaattgtatttaatttcaattaacatttaaacagccac

SEQ ID NO: 883 - DNA, 6000 bp, Homo sapiens
gccagtggcttggtggaagacaaatcagaactaactgggcaacccgaaagcctcccgctccaaagagtacatatgagtgtaggtgtattggagaagaaaaggaaatgtggaattttggagaaaaatacgctagattttaaatgttagagctgttcccggagacttattgcagaaatagatgagaagcaaatcaagactactattcaaaaatgtacttagttttcatttttgtaattataaataatattatttctaatgtcaagtctcctattaaatagaaaatactgggtaattttttagacattcgtgggggaggtttaattctgaactgaagtataatatgtgtaatataagcattttgatcaaggttaatgttacctttacagtagtgtagtgaatgctacttttctctttctgcacattttatttaatgaattaaagacataaaccttttctctcaccagcaaataccaaacagctatcatatgatgaggttgtaaatcagtctagtccaagcaactgtactgtatactgtggaggtgttacttctgggctaacaggtatgggagccttccctgtgtggcattaatttttaaagtgcaaagcttaatatttgtaggatttttatataacttagtgtgatttgtttgttttggttttttgtctaacagaacaactaatgcgtcagactttttcaccatttggacaaataatggaaattcgagtctttccagataaaggatattcatttgttcggtagggatggttttttaaaaaaacatttttcttggtaatgtaactggaaaaccagaaaataaataaaaataaaaaactttttcctccaaaatattttttgaacatttacctcgttttcttaaaaatttaccttggttataaaaaagttgaaattttggccgggtgcggtggctcacgcctgtattcccagcactttgggaggccgagacgggtggatcaccgtcatgagtttgagaccagcctggccaacattgtgaaaccccgtctctactaaaaatacaaaaatataaaaattagccggcatggcggtgcatgcctgtaatcacagctactcgggaggctgaggcaggagaatcacttgaacccaggaggtggaggttgcagtgagccaagatcacaatcactgcactccagcatgggcaacagagccagacaccatctcaaaaaaaaaaaattgaaatttctctagcatccagcgtatttgcctctgtgattttatagctccctccctaacacaaggccagtgaaacacacattctttgttaacacaagttgccccagaactacaagatctttgaaaaaaatagcaaagaaaatatgccatgttacgcaaactgttttacctcagactcaccttgatttttaaaaataggttttattcataaatatttaaaagaatttgtattggtgattcttaatattgttttcaataggttcaattcccatgaaagtgcagcacatgcaattgtttctgttaatggtactaccattgaaggtcatgttgtgaaatgctattggggcaaagaaactcttgatatgataaatcccgtgcaacaggtgagagggttcttaactttgagaagtaattgttgggctaataatgttattttaaggtgaagattgttgataatccttgttaataagtttctagctaaaatgatagtatataagggctcttcctacatgtattatagttccagaatggtgtttcatggattgcagtggtgacatgatgaatgtgaccgcctcaattgactcatgctcacacagtggattttaaaatgctccgagaaacctaaaagggtattacatctttttttaatacttggtagatttattcacataccatttggagaactcacaagcatgcttgactcaactgaaacaaaaataaagctgtaaatatagttatggccttggcatttttcttccagattttgctgccttttttttccaggcagctttagtggttcaaacttgattccacaaagatttctatgaggaaactgtaaatggagcacagagatgggagtaagcaaatcctaaactatataagtgtcttaagtaagctgaatatagaaataattaatcacatcttccctatctaaaggaaacaatcatgtagatagtataccaaacacttaaacattctactaagtttaacatttattactagggtatcaactgatgccttccaaaaactatgccattcagagtatcacgtagagttacagcagtataacctcacttgttttgttgttgttttttgttttttttttttttttttttttttttagcagtcaactcttgtttatcctgtcattttaattgtaatgatggccctgtgtgttttggctaagaatttgtggtatcagcatattaggattgtatatatatagttaacttcaagtaatactaaattttatttaatagcagaatcaaattggatatccccaaccttatggccagtggggccagtggtatggaaatgcacaacaaattggccagtatatgcctaatggttggcaagttcctgcatatggaatgtatggccaggcatggaaccagcaaggatttaagtaagcatatcttatgtcttcctttactaacctttgaaaatgtctaaagaaattttaagtaggaagaaattttaagaattagtgggtaatagggcctcttatgtaaagcgtaactatagccttgaaagaacttaaaattgttttttagtaagaaaataagagcttaatagttgttaagcttttcacatgactaatggtcacttagccattcttatatacactgagtttgatgctagttgttgtattcattatgcttttttctgtacaaagggttttttcaatatgccttgttacattgcaagcttccttatacaccctgaattacactattttacttacatttctgaaaaacacactggaaataaaaatacttgagaggttaaaaaggaatttagtgggctgggcgtggtagttcctgcctgtaatcccagcattttgggaggctgaagtgggtggatcacttgaggccaggagtttgcgaccagcctggccaacatggcgaaaccccacctctgctaaaaatacaaaaattagccaggtgtagtggtgcacaccagtagttccagctatttgggaggccgaggcaggagaatcacttgaacctgggaggcggaggttgcagtgagctgagactacaccactgcactccagcctgggcagcagagcaagactctgtctcaaaaaaaaaaaaggattttgtggttgggcatggtggctcatgcctataatcctagcactttggaaggccaaggcaggcggatcacttgagtccaggagtttaagatcagcctgggcaacatggcgaaatctcatctctacaaaaggtacaaaaaaaattagccaggcatggtggttgcgtgcctataatcccagatgttcgggagactgaggtaggagaatcgcttgagcctggggagacgtaggttgcagtgagctgagatcataccactgtactccagcctgggtgacacaatgaaaacctgtcttaaaaaaaaaaaaaaaagaaaagaaaagaaaatcttgtaatgttatgaatttttatgagctttcatatgctaataattgttttgatttcttctttgagtagtataatgttcctttttcgttgtagggaacctacctgactctttcaggtagtggtttcctcagcaaatatgttcaaccaaggcatagagatgagatggatagctttcttttccaagaatggggttaggtttttctatattcaaaggagatgaatgttgataagttcagggtattttcttagctttaatttctaacaaaattaaactgtccaaattaaacatacagggatgcttgtttttaagagaaaaaaactttagtaaaagatttcattttccctagcataaattattctatttgggattaagaaaaagtatgtttcccatttcccatatttgttcttgttgtttgttcttgccaatactttattttaatcagtggatttcctctcccctctgcttctttcacattctccaccagtcagacacagtcttctgcaccatggatgggaccaaattatggagtgcaaccgcctcaagggcaaaatggcagcatgttgcccaatcagccttctgggtatcgagtggcagggtatgaaacccagtgaataaggactccagaatctaaagccagtggcttgaggctacagggagtgtagtaaagccgttgtttacttaaagatttatcaaatcagtcagtgcaaatgtcagatacaatgtatttatttaaaagattcatttttaatcatgaaattacttatcatccacattgttttaaaaagaaacaagatgctggatgtctgccaatttttgccttcattaccttttttgataaagtttctcagatccttgtttcaaacacaaatgcagggattgctgccactttttaactattaagaggcagaaaattgcacaatattgaacttttttccactgaagtagtgtgcagttctagtttgcattcctgatatgatttaaaacatgtaatataaagatgttaaaaaaaaaaaccaaaactgtgcagagtctagaagttgtttgtcatcttcagcttgtgcacaattctgttttaggttaaaaaaaggcattgtttgagctgtcccatctccactgttatccctttggggttttttaatataaattattagtttacatcatttttgtatctacatcttttttcacaaatttgtcttgccttattaaagttctgtaaaatatacttaaatggaaaaaatgatgttcatttagattgaaaacttttctcagatggattgataattgcattcatcttgtgttttatatgagaaggtgcctcaagaatttcctgttggatttgtttaaaaggatttttatctttcgtgataaactttgctgtgtaccaggaactataaaaacaaaaacttgttactaaagaaaatatctgaaatgtgataagttcttatgccatgttaatttcatgtgtcaacttcaacatttacatgtattatttcattatgtaaaatgttttagcaatttaatattttgcacagttagcaaactttgtatgtcatttccttcaaggcatcatgcagagttgacatgagatttataaggttttaagttgtttgcatgtgaaaatcaaatacatactttggtagtctttgaatacaaagtcatctgctcttgtttttcaagaattttgagacacaaagttgtatgtaaaggaatatattaatttgccgttttctaggtagatttgctcaaaaagagtgaatcaacttaatatgtacaaatgatagctgtgaaactgtagaatatctttgtgtcaggcttggagttcattgtgacctccaaattttgcctgaaggaccagctgggcaaagcatcttttaaatgttcagaggccaaaagataaacaaaaaaaaaaccttaaaatcctacctctttaaacagccttcagataagagaatcctcagtgcaatcattattttgattcgtttggtacctgttttcctggagttcccgattttattattttggggtggctccaagcattaagaggtttaatctttgatggcattgttctagttttgaaatttctagtatatttcagagtctcttagaagacttgtgtgggaagtttcactttgttttcagtgaagatcacaaacctccttcttcctttactcaagaggaaaggtcccagtatacatatttgaatggttgatggttttcaagaccttcagggagctccctgcattttacctagaaacagaaaaggcccgcaaaatcttaagtttcctggcctgcatttcccgggtaggggcaaatgactccaagctggtctctaagccaatacccttataaaccagagcccaggaaag

SEQ ID NO: 884 - DNA, 6000 bp, Homo sapiens
cgatttgagcccagggttcgagaccagcctgagcaaaatggcgaaaccccgtttctacgaaaaaatacaaaaaaattagcctggcatggtggtgtgcacctgtagtcccagctactcaggaggctgaggcaggaggatcacctgagcctgggaggtagaggctgaggtgagcagtgattgtggtactgcattccagtctgggcacagagtgagactctgccccccaacctccaaaaaaaaaaaaaaaaaaaaaaaaggtacatgtaccaggatacaactgcaacattatttgtaatacaataggtttttgaaaagtagtaacctgaatatccatcaatgccagttatggtaatttattcaatttaccattcaatacattggggaactttcattttatggacgattttgcaactattaaaaaactattaggccaggactgggcgcagtggctcacacctgtaattccagcattttgggaggccgaggctggtgcatcacttgagcccagcaatttgagaccaatctgggcaacaaagtgagacctccgtctctacaaagaatacaaaaattagctgggcgtgggccgggcatggtggctcatgcctgtaatcccagcactttgggaggccgaggcaggcggatgacctgaggtcaggaattcgagaccagcctggccaatatggtgaaaccccatctctactaaaaatacaaaaattggccgggtgtggtggcaggcgcttgtaatcccagcaactcaggaggctgaggcaggagaattgcttgaacccgggaggtggaggttgcagtgagctgagatcgagccattgcactccagcctgggcaacaagagtgaaactctatctcaaaaaaaaaaaaaaattagccaggcatggtggcacgtgcctgtagtcccagctactcaggaggctaaggtagcaggaacacctgagcctggaggcagaggctgcagtgagctgacatcattgccactgcactccagcctgggcaacagagcgagaccctgtctcaaaaaaaaaaaaaaaaaaaaaagcccggcgcagtggctcacacctgtaatcccagcattttgggaggccaaggtgggcggatcacttgaggttaggagtttgagaccagacagtccaacatggtgacaccccatctctactaaaaaatgcaaaaattagcggggcatgctggcccacgcctgtaatctcagctactaggcgggctgaggcaggaaaatcgcttgaacctgggaggcagaggttgcagtgagctgagatcaggcgggtggatcatttgaagtcaggagtttgagaccagcctggccatcatggtgaaatcctgtctctactaaaaataaaaaaaaattaggccgggcatggtggctcacgcctgtaatcccagcactttgggaggccgaggcaggcagatcatctgaggtcaggaattcaagaccagcctgaccaacacggagaaaccccatctctactaaaaatataaaattagccgggcatggtggcacatgcctgtaatcccacctactcgggaggctgaggcaggagaatcgcttgaacccgggaggtggaggtggcagtgagccgagatcatgccattgcactccagcctgggcaacaagagcgaaactctgtctcaaaaaaaaaaactagccaggtgtggtggctcacacctgtaatcccaactactctggaggctgaggcacaagaaacgcttgagcccaggagacagagttcacagtgagccaagacactgtcactctgggtgacactctgtaaaaaaaaaacaaaaaacaaaaaaaaaaaccctaaaaatcccaagtgtatacatgtgcatctgtatagagtaaaatgtggaatattacagatgaatctattaatattacttacctcaaaaggaggaagaagatacatttttaatattttccttatgtatccatttcatttcatttgtaacactaagcacgttgtacttttgtaacttaaaaactactttaaaaaaagtacttgtgcaatatccatataatggagttttatttgggaataaaaaggaatgaagtaccgatacacgttacaacatagatgaccctgaaaagcataatgttaagtgaaataagtcagttacaagaaaccatatattacatgcttccatttatatgaaatgtctagaataggcaaatctataggggcagaaagactagtggctgggacatggaatgggatgagggacagggagtgtctgctaattgctacgggtttcctttttgaggtgaagaaaatgttataaaattgattgtggtgattgttgcacacacacctctgtgaataaactaaaaaccattaaactgaaaaacactttatatggatgtcccaaaaaggtgtttttaaaacaccatccccattaacatttgttttattcaccatcaaaagactagtacttgatatctttgaaaataatctgaagaatgtgtcagagactctaaagacaattccaaaaatgaaaaatccagaatgtatacagtctgaagaaactactttaaagaggacatcacgtttttgtttttttggtgttttgttttgtttttgaggagtcttgctctgtggcccaggggctcactgcaacctccgactcccgggttcaagtgattctcctcctacctcagcctcccgagtagccgggattacagacatgtgccgccacatctggctaatttttgtattttaaagtagagacggggtttctccatgttggccacgctggtcttgaactcctgagctctagtgatctgcctgcctcggtctcccaaagactgggattacaggcgtgagccgccccgctcagccgacatcacgtttttcgatgtgtaaattctcctatgtttaaaaaatatttctacaacttaaataaacttacatcatagatattttccagttcaacactacagatctgattaatagcttttcaataactgcaaaatagtccataaaatgaatgttccatctgggggcagcggctcacgtctgttatctcagcactttgggaggctaaggcaggcagatcacctgaggtcaggagttcaagaccagcctggccaacatggcaaaaccctgtctctactaaaatacaaaaattagttaggctaatttaggtggtggcgcacgtctgtaatcccagctactagggaggctgaggcaggagaatcgcttgaacctgggaggcagaggttgcagtgagccaagattgtgtcactgcactccagcctgggagatagagcgagactgtctcaaaaaaaaaaaagaaagaaagaaaaagaaaaagttccacatgtatttggtgtaaattgaataaattaccataagtggcattgatggatattcaggttactccatttttttctactgtaaacaatgctgcagttgtatcttggcacataaatctttataaattaattgttttatttctgtaggatagattcctagacataggattactttagtgacatatatatataataagcaatgtgaaatgcatacagagtatactgaatcacatttcagagctctaatttctctgcctcctaaagttggactgaagtttatgtatcttttgacttgtttacttttaagattcttgtgaccaatttgcattaaatagctggggttttttgtttgtttctttgtttgttttttgagacggatcctcgttctgttgcccaggctggagtgcaatggcaagatctcggctcactgcaatctccacctcccagattcaaggattctcctgcctcagcctcctgagtagttgggattacgggcccccaccaccacatccagctaatttttgtatttttagtagagacagggtttcgccatgttggtcaggctggtctcgaactcctgatctcaggtgatccgcccgcctcagccatccaaagtgctggaataacaggcgtgagccactgcccccggcctaaacagctatttcttaaatgcttttcaatgtgcaatcaatacacggaagaaatgcaaatataaataaaaatctggcatctggaaatatcctccccgcgctgaaaaatctggctagcaccaacgacgcaaattcttaataaaatccttacttttttaagtaaaactttttttcttttttcttatttcttaagtaaacattttaaattgaaattttttttctgtacagagaaagttgaaacatccattcctatgtttgggatgagaaaagataaattatttatgttattggaaaacagaagattacagactgtcaataaacttttacttttaaatgaataaataatacatgacaattcttttcacatgagagaacgtctgcttctatttcctcctaaaatactgtggcggctgggcatgtcaacagcgccgctggtgtagtggtatcatgcaagattcccattcttgcgacccgggttcgattcccgggcggcgcataggcgttttgcttctcgctcgctaaaaaccagatagcttgaagagtctttatatatctttccaaaagaggaaagatttaggctttttactgtccctgaaggtttccactccctcataattcgcggtcgaaacactcgaatccgcagccagaagacaaaaaagttcacgcaaatcgtgaagtagttaatacttgcgcctgcgcagtctgaggcgtccctcgcgtcgggtggaagagcggctgcgcaacaagtgaacctatggattaaggtgtagccgggcggcccggaggttgagagtgcaagattattctgcgcctgcgcggcccgggtaactttgctggctgctcctaggctcccggctcgccgccatcttgtattggggtttcattgttcccgctgggccgggcggtttagtgtaattgccgccggaggaggaggcggagtaacctctggtcagccgagaaaccccactatcctgtagccataaccgcttaaacgatttgggaggtagtgaagggcagggagctggacctggaggcgccgccgcgacagcagcagccatggaggacgagatgcccaagactctgtgagtctggggcagcgatgagggaggcgggatggtggtcgtcccggagggaaggcctcggccctgcgccgctcccagcctattgttctccgtggacaccgcgatatcgtggtttttgtttccttagcatgcacctggatgcttacaaccaagacccaatctgtgaggacgaggtgaagggagacggggctcaaccctctcaattaatcccttcactttagcaacaccattgcatgacctttgctctcgccacgggccctctgtggtcttagacctggagaaaagactttaattcagacctctttttagaactcgtcgaaccttccttttgtcctatgctttctttccttttcccgcttctccccctttttgattaacctcttcttatctttacagccgtctccctttaattttacttttgatttcctactgaaattcttcctttcattttcttctcggtgataagattttttttcctcctcgagggtgcttgtactcattttcagtgcagtaaactttattcttgcagttgccaattggaaaaaagccaagcatttttctttaacctctggctttccttctgtagcacccaccgaccaaaaagcctaaccagacaccccaaggatttggaaatctcacccagaaggaatatatcaattgaggggaaatggatttaatattatttttatagtcgtttactactgttgtgattgacatggtgttgaacgagcgggctgtaaatgccctaacatatttacagagaatttttagagatagcgttaaattaccggagcgtggatattttctttgtcgtgtggcttccccaactgcgttctttgtttttcgaggtattatcggatgagttgatcctgcctttgttggcatttctcggaagaagaaaagctcaatgagttcttgacatagcttt

SEQ ID NO: 885 - DNA, 6000 bp, Homo sapiens
gaaggtcagaaaaatatgctgtgacttcctgagcctatggacccataactgtcaccccacaaccccgctgagaacactttgttcacaaggtatacgccagctgggaagtgaaatttttctgatgagggtgaggctgaatgtctgaggcccctggctgggattcaagggcttattttagccattgcaccacacacaatttagagtgagttggggccaggcacggtggctcatgcctgtagtccttacactttgggagaccgaggtgggtggatcacttgagcccaggagtttgagaccagcctgggcaacatggcaaaaaatataaaaattagccaggcgtggaggtgcgcgcctgtattcccagttacttgggaggctgaggtgggaggatcacttgagcccgggaggttgaggctgcagtgagttgtgattgcaccactgcactccagcctgggtgacagagtgagaccctttctccaaaataaataaaataaaaaagagtgagttgggctaagggagggtatggtgagatgccagaggaatgggtttgtttctactgaataaggggaattatattcgggtaaggcctgcagaggcccccacctgagcagggtgttgggccccgtgcagtcctcctgggggatgctgtatccaacctcatgacccagggtcaggtccatctcatcagcaacccgcagagccaggctccgggctgcaagagggtagggctgagtaacagtaacctgtcctttctggaaccctctggccagcgcaaactctgcacaccactgagggatctgggatagaagtagggaaggagagccagtgaggaagatgtaggacttcagtcagaagtgctcagggaactatggccactttaatctttccttatttggggagtcccctggtctttcaccagcctccagggccaacctaacccatcccatctctcttcgttcaccttcctcatgaccccacgcagcccagtccccccttgcccagggaaaggccactttccctttgtcctccctttgtcctccctttgtccactcccagaatctgcctgcccccacaacccccaccacacctgggtgctcttgccagaaccaggctccccagacaccagcaccactccagtggggttactctccaactgctccaagaaggtaaagcgagcagcccagatgggcaaggcttggcgctgcttcagcagctcatagtagcgggaagagaagggaagcccatcaaaggggttcacagccagttcagactccccaggacttgggccatactcttctgctagcctgagaggctgagaggtcatggtggctctctggcaggacctgcagaaggcagagcagccagtaaggtcatatttggtgaccgacaccatcttcccacctcagccctgatccttaacctctaccttcagttgatcatgctctggggcccacccttcccagcatttcctgccaggaaacagtgctaggtattttgataaagggctactgagagttagtcgacagtccctatagtcaggtagtagaaatctacctgagactattaccccgttggcaggtagtagaaatcttacttaggcaggggtcctcaagggcagtagaaattatgtgagacctagtaacctgtgggaaagtcctgaagggaaaaggataaagaatatagggggtggggagaggaacagcagagtcacagggatcctggattcaaacctgcttgcagctctaggacgtgtcaggacggcagtcagctccagacccacgtagtcaccaccaaccctgaccgtgtgaagtacaaaggtaaattccggctctacctcagggatgggctcaaacttcaaatcctgaagcctgcttttggggtggggctatttgctccaccttatttaacctagtcaggaacctatggaaaacaggctccagctaccacactgagcatgtgtgaactctatagatgatgtgtagtgtgcttgtgaaaggcatgctgggacttgtagttttgcagcagcttcctccaaaacctgggctgatcacccaagctgggtcttcagttcagttacacttccttaatttatcactcatcacttggcatgaggaggtgattttagacagttgcagtctgactacccccttcaaatgtacgagaagactctcacccccatcccccgcagccaaggaataaggaacccactcacagggcttttgagaccgagagagacaacagatgccttgaatgaaaaccatgaatttaatgtgacattgggggagcctcatccttccctttttaccacccacccatccagcctgttgtgagttgggtgagggctgcccccagtctccgtcctgcggctctgggtgccatcctgttcctttgagctcagtcagcctcctgggctcgtctctctgtgaatctcctgtgggacatagggagagatattattcaggctttgccgtagtagctccataattccattctccaatttgccacatcctattaattgtcctctaaccccctcaccttcttgcgtattcatatagtgcttgcttgcgctcctgcaggctctcctgccgggcccaggaagacttggcaaatgttagggctgttggctgaggggtcaccgggccagagctgggaaactgaggtgatcacaatgtcagagggcttgcggagtcatcatcattaaacacgcatcgaatgcctactttgcaagagaggcactatgctagggtctcaggatcaaaaaagaaaggtcagggataagggagtacatagcctgcccccaactcaccccaacacttggatctgaccatttcctgggtctcaccttggaggcagaggctgtgggtagggactgagttcccttggtgatgtcttcaggcatgaaagctacggccccctcaagcagattagtgatagtcaagtctacacagccagtcttggctggggagaaaagagaagggagtccactccctacttactttcttccttcacaacccacttttcctccctgtgcccatctcccagtgtggggccaccctttcccatacccaggtctctctggatgacacccaatggcacatggggcaaaacttccttgactctctgagccagagttgccagttgcacatcaggagaaggaccaggggagggagggaaagaagactgggctgtggaaaaaggaaaaaaagaaaaaagaaattctggtaagtagagaactagaaggagaggctaactagcacagaaataggggaggaatcacagtaggccgaaaaaaaaaaaccccaaaagctgtaatgtatagagaccacatacctgactgggggcgcaatctggggtgtctttgtcgcttcatgtgctctgctttgtcagctggagtgagccgtgtccctgtctggcccaattccttggccaccagctagggagaattggaagactggaagtgtcaagatctcaagctttcctccctctcctcctaagcagggaccccgcctccaccctgtctgtgcacccgaccacctgttgtacacggagtgcaaactcctcattcgcttcccctagttggcgatgaacaggacgaagccacctgcaaagaaacaatccagggctatgttgtgggcacccagggtagaggctgtcaccattccccactttggtacctctttgcatggtgggtgggaaaatagtaaatactgtaaatactttgtgttgcctctgtggtagaaccttgatataaagatctacaaatggacagggcagaggccactaattccttgaccttgaggtgagcctctccccagcgaccaaaatgtgaggacagttaataccttacttgatacaccgtgaaagggacgaaaagtgaccacagcagttctgagacccaggaggcatctgacaccgtctgaggggagggcatgagatgaggcctaagccagggccagggatgggaaatttccccttcaagccccagagattccctgttcaacacacactcaccacagagaccaggggtctctgaacttgcagggtaagaggttgtaccacatcttggatagaaaatggccaggaactagaagaggaaggagaaagtaggatgggaatccagccagcctagtcagcagctcacacctgccttataacaggcaactgtcaaactctacaagcacataattgaagaatgaagggattcaggagaaagaacttaaagtggacagaaaggaaatgaactggagatgatggggtctaagggccgaagaaagttgtaaaaactcaagggcccacaagcttgaccacctacccagctggcgccccatacctgtgctaaacccacctgaagcgcaggagcccctcccggccattggtggcctcttcctcagggaatagcagcagaggagtggggggaagcctcgtggaagcacagaatctcttgagtgactccaccaactccccccgcccattcatctccatgaagccccgagaccagcacacaaagctggggggactattgagtagaggctgggaaccaggagaagagaaagcaagaagaaaaatattgaggaaaatgaaaaaaaaaactgacatgttgggtagaggatcggggttaggggtaaggctcagtatcctccatggggaacgcgagtggggacaggggggccttcagctgggccccagggaaccgccccgtggcgctctcggcctcgctctcactcacggtgctacaggtggtaagcaaattgactatgttgtggtcgaaaggtgtcacatggttggaaatgaggaccctgacactgtgatcccggagtccggagtcctcctgccgggccacgagccctagcaccgcacacatggtccgcactacgaatctggggacacaggaggtggtgactgtgtggcctcgggccagacccagctctgacactccccgaacgcccgcgtcggaacctgcgaaggacgctgtctggcagcgcgcagctgaccaggaagacgtggatcccgagaaagaggcgcaggacgaggaggcagaacccgactggcgcgtagagcagcagcacgagcagtaggaagcagtcacccggaagcctgggggcgagaggcgaagtggtcaggcgccgaaggccgagagcacgcggggatcggtctcttcccgccgggtctcttaccggtgcgagtcaaagagccgctccggccccggccctgagggaagctccataactgctgcttcaggagcgcccggccgtcgccgccgccgccattttcgcgcccggccgcaggggctcttgggaaggcggagtctttgggcatccgcccggggtgaggggacccgaagtcctgaggcgcgccggaagggctagcggtcccagcataccccgcggccccttgggccgtctcacaactcgcgtccggcggagaccacaattcccggcattcgtggggcagggaggagtcggcctcccggaatcctggtcccggcgtgcacttctgaaggacttcaggtaccggcgtgccccgcgtcctactgtccgcctgctcgcgtcctgggtgccgcctctgagtagggcgggcgaggaggcagccaaggcggagctgatggctgcgccgagggcggggcggggtgcaggctggagccttcgggcatggcgggctttggggggcattcgctgggggaggagaccccgtttgacccctgacctccgggccctgctgacgtcaggaacttctgacccccgggcccgagtgacttatgggacccccagtctctgggcccggttgtctgttggggtcactgaaccccgagcatgcctgacgtctgggaccccgggtccccgggcacaactgactgcggtgaccccagataccaggacccgggaggcctcagagaactctggaacccgttcgcgcgcgtggctggcggtggcgctgggcgctgggggggcagtgctgttgttgttgtggggcgggggtcggggtcctccggccgtcctcgcc

SEQ ID NO: 886 - DNA, 6000 bp, Homo sapiens
gctcagcccgctcagccaactggccctatggtcaccggcgtctgctccgattctcctcccagatccacaacctgggacgagctgacttcaggcccaaggctgggcgccactcctgggtgtggcacgagtgccatgggtgagagggtagggagtcaagtagaagggcaagaccacgggggatggggcaaaccttctgggggcagagaaggaaacagaagttcccttctccccacaggcattaccacagcatggacatcttcactcactatgatatcctcaccccaaatggcaccaaggtggctgagggccacaaagctagtttctgtctcgaagacactgagtgtcaggagggtgagttggggactgaagtgaaccacatggtatccattgcacagcctttccttacactgacatatgccaatccctccagatgtctccaagcggtatgagtgtgccaactttggagagcaaggcatcactgtgggttgctgggatctctaccggcatgacattgactgtcagtggattgacatcacggatgtgaagccaggaaactacattctccaggtacctggagtctggggcttccagatgggtgagtggggggagcgttaaagacacctttgaattcgaggattgtcgctgggttaagtggcctttttctcactcacaggttgtcatcaacccaaactttgaagtagcagagagtgactttaccaacaatgcaatgaaatgtaactgcaaatatgatggacatagaatctgggtgcacaactgccacattggtatttgatgggaagagcaacccaggaagattaggggatgggagggaaagacgttcattctcttttccatagcttgtttctccatcttcccaccttcctgtagagctctcagtccctccacttctacccacccttctccacagtgcatctatctccctccctctgtgcagggcgcctcccaaattgcctgtccactctgcaggtgatgccttcagtgaagaggccaacaggaggtttgaacgctaccctggccagaccagcaaccagattatctaagtgccactgccctctgcaaaccaccactggcccctaatggcaggggtctgaggctgccattacctcaggagcttaccaagaaacccatgtcagcaaccgcactcatcagaccatgcactatggatgtggaactgtcaagcagaagttttcaccctccttcagaggccagctgtcagtatctgtagccaagcatgggaatctttgctcccaggcccagcaccgagcagaacagaccagagcccaccacaccacaaagagcagcacctgactaactgcccacaaaagatggcagcagctcattttctttaataggaggtcaggatggtcagctccagtatctcccctaagtttagggggatacagctttacctctagccttttggtgggggaaaagatccagccctcccacctcattttttactataatatgttgctaggtataattttattttatataaaaagtgtttctgtgattcttcagagcccaggagtcagtgctggtggttggagggacctgcccccactggttcatttaaccctctgtctcggtgccctcagaacctcagccagaaaggcaaggaggaaatcagagcaggagcctcatactcttggtgatctattcattctgtgacctcaggggtcacatataaggtcagtgtttctcgtccccgccggatctgcactgccaactgggattgggttcgaacagcttcataaacatcttcagcattttgtaccatctgctccccaatggccaaaatcacatcaccaggccgcagaccagccctatagagaaaaatggacagagagaaaggaaggagtacaaagcctagttcaaggacacatgcacaccttgcccatccccatatcacactgcagcctctccctcaccggtgtgcaggggagcccaggatgactttatggatgagtacaccatgctgaacatcgggaaagcttggttctcgaagctgtagttcagcaaggatgctgaaagtacacagatcaccctattagccaaacccaggcattctccccatcctgagttccacctcaagtctctcatcaacacattgataaatatatggacaggacatgggctaggtactacaaaatacaatggcaactcactttctgtcttctagcaataaagtgcaacatgtacataaaagatgtacaccacatgagggcaccaaatgacaaacagtgttaaatcaatagcactaatgtcattctagaatactaagagaagctttaaggggaaagaacttaagttgagcctaaaaggatggatctgatattaaccatataaaacaagaacagcataaataaaaaacatgggagtaggaaatcaggttggctgagtattcatataggaaggtattacagccaggtctagaaagttgatttacagacagatggaaaatggcccttaaatgccaagttaatggattgaaggcttgaaatcaaagcagtaacaggatgaaatcaatctggtgacaggtgtacaaagtggagtgggataagaaagtcaagatgatgaagggagacagctcttgtgattatttcaagtgtgacacagttcatcttagataaagacagaaatgagaacaaagctcaatagaggtgcccccctctgattacactggtcacattacatgtcactgtccctaaagctcatacctgggactcagggtcagcatcatcaccccaatgtagcgccgctgggacccactgattccggaggaggaatctgtgacagagggacaaatgagccccacccagctacatccttccttccctgccctcttctcccagtagaccaccctccaggaagtcccactgaatgcccttcccctatttccaccacattaaaggaacccgtttccccataaggcaggctcactcttcttttccccacgatgcagaaactctcgaagacgatcagaagggatggcaaaggagattccagctgtgaccttcatggtgttcactccaatcacctccccatcctgcagggatacagcccccagttccctagcctaaacaaatagtaggggatgggggcacccgaacaaaagtaccagcaagtgttggggagatctggttggatattgagagatagccaacaaagaactgctcagaaacttgaccaaacatccttgaattaggggaaacctacccttcccacactgacctggggcagggattcttggaaggaaggatgtctcactcaccaggttaaccaggggacctccagagtttccaaactgtaggacaaggagaaaacatgaaagagatctggggattctaagtctgggggcataccaggatgtaggtactttctccaaattctcttctttctcagcccatgaataagtggccacatttttgcagcctaagctctatataggctcatccaccatatatcagttggtgcttgtaccacacagcctctcccccctcccccatcatttgtcatttctctcctatcaggacgcacatcaatagctgcatcagtttgaatgtattccacattggtttgggggagtcccaggtctctggctggacgctgagcagagctaacaatgccggatgtgatcgtgttctgcagtgcaaagggacttcccatggcaacaacaaactccccttgccggacatcagctgagcgtcccagaggcagcgtggggagaggctcctaagggagaatgggtaaaagagacctgtcatctgaagatgcgagcaaataagcagctccaaccagacctggcctaccccagcccccaccttagtctgaatcctcagcgttgcgatgtctgccacgggatccacagctgtgaccacggcctcatacgtgtcgccgcttagcagtctcacacggactctgcgccgatcagccaccacatgggcgttggtgacaatgagcccatcggcagccaccacgaatcctgagccgttcgagatagggacctcgcggcccaagaaagggtgcctgaaatggagggaaagcacagataagaggaggctctgacccctcctacccgcccgccctccagcctgtggcttcagtgcctcccggtctacccccaccattaccggtccaggatctcgatatagaccacggcaggtgctgtcttctccaccacatctgcgatgaagttgtactgactccggggagaagcgggcggcgggctagggacggcggcgaggacggccggaggaccccgacccccgccccacaacaacaacagcactgcccccccagcgcccagcgccaccgccagccacgcgcgcgaacgggttccagagttctctgaggcctcccgggtcctggtatctggggtcaccgcagtcagttgtgcccggggacccggggtcccagacgtcaggcatgctcggggttcagtgaccccaacagacaaccgggcccagagactgggggtcccataagtcactcgggcccgggggtcagaagttcctgacgtcagcagggcccggaggtcaggggtcaaacggggtctcctcccccagcgaatgccccccaaagcccgccatgcccgaaggctccagcctgcaccccgccccgccctcggcgcagccatcagctccgccttggctgcctcctcgcccgccctactcagaggcggcacccaggacgcgagcaggcggacagtaggacgcggggcacgccggtacctgaagtccttcagaagtgcacgccgggaccaggattccgggaggccgactcctccctgccccacgaatgccgggaattgtggtctccgccggacgcgagttgtgagacggcccaaggggccgcggggtatgctgggaccgctagcccttccggcgcgcctcaggacttcgggtcccctcaccccgggcggatgcccaaagactccgccttcccaagagcccctgcggccgggcgcgaaaatggcggcggcggcgacggccgggcgctcctgaagcagcagttatggagcttccctcagggccggggccggagcggctctttgactcgcaccggtaagagacccggcgggaagagaccgatccccgcgtgctctcggccttcggcgcctgaccacttcgcctctcgcccccaggcttccgggtgactgcttcctactgctcgtgctgctgctctacgcgccagtcgggttctgcctcctcgtcctgcgcctctttctcgggatccacgtcttcctggtcagctgcgcgctgccagacagcgtccttcgcaggttccgacgcgggcgttcggggagtgtcagagctgggtctggcccgaggccacacagtcaccacctcctgtgtccccagattcgtagtgcggaccatgtgtgcggtgctagggctcgtggcccggcaggaggactccggactccgggatcacagtgtcagggtcctcatttccaaccatgtgacacctttcgaccacaacatagtcaatttgcttaccacctgtagcaccgtgagtgagagcgaggccgagagcgccacggggcggttccctggggcccagctgaaggcccccctgtccccactcgcgttccccatggaggatactgagccttacccctaaccccgatcctctacccaacatgtcagttttttttttcattttcctcaatatttttcttcttgctttctcttctcctggttcccagcctctactcaatagtccccccagctttgtgtgctggtctcggggcttcatggagatgaatgggcggggggagttggtggagtcactcaagagattctgtgcttccacgaggcttccccccactcctctgctgctattccctgaggaagaggccaccaatggccgggaggggctcctgcgcttcaggtgggtttagcacaggtatggggcgccagctgggtaggtggtcaagcttgtgggcccttgagtttttacaactttcttcggccc

SEQ ID NO: 887 - DNA, 6000 bp, Homo sapiens
tggccagcgcaaactctgcacaccactgagggatctgggatagaagtagggaaggagagccagtgaggaagatgtaggacttcagtcagaagtgctcagggaactatggccactttaatctttccttatttggggagtcccctggtctttcaccagcctccagggccaacctaacccatcccatctctcttcgttcaccttcctcatgaccccacgcagcccagtccccccttgcccagggaaaggccactttccctttgtcctccctttgtcctccctttgtccactcccagaatctgcctgcccccacaacccccaccacacctgggtgctcttgccagaaccaggctccccagacaccagcaccactccagtggggttactctccaactgctccaagaaggtaaagcgagcagcccagatgggcaaggcttggcgctgcttcagcagctcatagtagcgggaagagaagggaagcccatcaaaggggttcacagccagttcagactccccaggacttgggccatactcttctgctagcctgagaggctgagaggtcatggtggctctctggcaggacctgcagaaggcagagcagccagtaaggtcatatttggtgaccgacaccatcttcccacctcagccctgatccttaacctctaccttcagttgatcatgctctggggcccacccttcccagcatttcctgccaggaaacagtgctaggtattttgataaagggctactgagagttagtcgacagtccctatagtcaggtagtagaaatctacctgagactattaccccgttggcaggtagtagaaatcttacttaggcaggggtcctcaagggcagtagaaattatgtgagacctagtaacctgtgggaaagtcctgaagggaaaaggataaagaatatagggggtggggagaggaacagcagagtcacagggatcctggattcaaacctgcttgcagctctaggacgtgtcaggacggcagtcagctccagacccacgtagtcaccaccaaccctgaccgtgtgaagtacaaaggtaaattccggctctacctcagggatgggctcaaacttcaaatcctgaagcctgcttttggggtggggctatttgctccaccttatttaacctagtcaggaacctatggaaaacaggctccagctaccacactgagcatgtgtgaactctatagatgatgtgtagtgtgcttgtgaaaggcatgctgggacttgtagttttgcagcagcttcctccaaaacctgggctgatcacccaagctgggtcttcagttcagttacacttccttaatttatcactcatcacttggcatgaggaggtgattttagacagttgcagtctgactacccccttcaaatgtacgagaagactctcacccccatcccccgcagccaaggaataaggaacccactcacagggcttttgagaccgagagagacaacagatgccttgaatgaaaaccatgaatttaatgtgacattgggggagcctcatccttccctttttaccacccacccatccagcctgttgtgagttgggtgagggctgcccccagtctccgtcctgcggctctgggtgccatcctgttcctttgagctcagtcagcctcctgggctcgtctctctgtgaatctcctgtgggacatagggagagatattattcaggctttgccgtagtagctccataattccattctccaatttgccacatcctattaattgtcctctaaccccctcaccttcttgcgtattcatatagtgcttgcttgcgctcctgcaggctctcctgccgggcccaggaagacttggcaaatgttagggctgttggctgaggggtcaccgggccagagctgggaaactgaggtgatcacaatgtcagagggcttgcggagtcatcatcattaaacacgcatcgaatgcctactttgcaagagaggcactatgctagggtctcaggatcaaaaaagaaaggtcagggataagggagtacatagcctgcccccaactcaccccaacacttggatctgaccatttcctgggtctcaccttggaggcagaggctgtgggtagggactgagttcccttggtgatgtcttcaggcatgaaagctacggccccctcaagcagattagtgatagtcaagtctacacagccagtcttggctggggagaaaagagaagggagtccactccctacttactttcttccttcacaacccacttttcctccctgtgcccatctcccagtgtggggccaccctttcccatacccaggtctctctggatgacacccaatggcacatggggcaaaacttccttgactctctgagccagagttgccagttgcacatcaggagaaggaccaggggagggagggaaagaagactgggctgtggaaaaaggaaaaaaagaaaaaagaaattctggtaagtagagaactagaaggagaggctaactagcacagaaataggggaggaatcacagtaggccgaaaaaaaaaaaccccaaaagctgtaatgtatagagaccacatacctgactgggggcgcaatctggggtgtctttgtcgcttcatgtgctctgctttgtcagctggagtgagccgtgtccctgtctggcccaattccttggccaccagctagggagaattggaagactggaagtgtcaagatctcaagctttcctccctctcctcctaagcagggaccccgcctccaccctgtctgtgcacccgaccacctgttgtacacggagtgcaaactcctcattcgcttcccctagttggcgatgaacaggacgaagccacctgcaaagaaacaatccagggctatgttgtgggcacccagggtagaggctgtcaccattccccactttggtacctctttgcatggtgggtgggaaaatagtaaatactgtaaatactttgtgttgcctctgtggtagaaccttgatataaagatctacaaatggacagggcagaggccactaattccttgaccttgaggtgagcctctccccagcgaccaaaatgtgaggacagttaataccttacttgatacaccgtgaaagggacgaaaagtgaccacagcagttctgagacccaggaggcatctgacaccgtctgaggggagggcatgagatgaggcctaagccagggccagggatgggaaatttccccttcaagccccagagattccctgttcaacacacactcaccacagagaccaggggtctctgaacttgcagggtaagaggttgtaccacatcttggatagaaaatggccaggaactagaagaggaaggagaaagtaggatgggaatccagccagcctagtcagcagctcacacctgccttataacaggcaactgtcaaactctacaagcacataattgaagaatgaagggattcaggagaaagaacttaaagtggacagaaaggaaatgaactggagatgatggggtctaagggccgaagaaagttgtaaaaactcaagggcccacaagcttgaccacctacccagctggcgccccatacctgtgctaaacccacctgaagcgcaggagcccctcccggccattggtggcctcttcctcagggaatagcagcagaggagtggggggaagcctcgtggaagcacagaatctcttgagtgactccaccaactccccccgcccattcatctccatgaagccccgagaccagcacacaaagctggggggactattgagtagaggctgggaaccaggagaagagaaagcaagaagaaaaatattgaggaaaatgaaaaaaaaaactgacatgttgggtagaggatcggggttaggggtaaggctcagtatcctccatggggaacgcgagtggggacaggggggccttcagctgggccccagggaaccgccccgtggcgctctcggcctcgctctcactcacggtgctacaggtggtaagcaaattgactatgttgtggtcgaaaggtgtcacatggttggaaatgaggaccctgacactgtgatcccggagtccggagtcctcctgccgggccacgagccctagcaccgcacacatggtccgcactacgaatctggggacacaggaggtggtgactgtgtggcctcgggccagacccagctctgacactccccgaacgcccgcgtcggaacctgcgaaggacgctgtctggcagcgcgcagctgaccaggaagacgtggatcccgagaaagaggcgcaggacgaggaggcagaacccgactggcgcgtagagcagcagcacgagcagtaggaagcagtcacccggaagcctgggggcgagaggcgaagtggtcaggcgccgaaggccgagagcacgcggggatcggtctcttcccgccgggtctcttaccggtgcgagtcaaagagccgctccggccccggccctgagggaagctccataactgctgcttcaggagcgcccggccgtcgccgccgccgccattttcgcgcccggccgcaggggctcttgggaaggcggagtctttgggcatccgcccggggtgaggggacccgaagtcctgaggcgcgccggaagggctagcggtcccagcataccccgcggccccttgggccgtctcacaactcgcgtccggcggagaccacaattcccggcattcgtggggcagggaggagtcggcctcccggaatcctggtcccggcgtgcacttctgaaggacttcaggtaccggcgtgccccgcgtcctactgtccgcctgctcgcgtcctgggtgccgcctctgagtagggcgggcgaggaggcagccaaggcggagctgatggctgcgccgagggcggggcggggtgcaggctggagccttcgggcatggcgggctttggggggcattcgctgggggaggagaccccgtttgacccctgacctccgggccctgctgacgtcaggaacttctgacccccgggcccgagtgacttatgggacccccagtctctgggcccggttgtctgttggggtcactgaaccccgagcatgcctgacgtctgggaccccgggtccccgggcacaactgactgcggtgaccccagataccaggacccgggaggcctcagagaactctggaacccgttcgcgcgcgtggctggcggtggcgctgggcgctgggggggcagtgctgttgttgttgtggggcgggggtcggggtcctccggccgtcctcgccgccgtccctagcccgccgcccgcttctccccggagtcagtacaacttcatcgcagatgtggtggagaagacagcacctgccgtggtctatatcgagatcctggaccggtaatggtgggggtagaccgggaggcactgaagccacaggctggagggcgggcgggtaggaggggtcagagcctcctcttatctgtgctttccctccatttcaggcaccctttcttgggccgcgaggtccctatctcgaacggctcaggattcgtggtggctgccgatgggctcattgtcaccaacgcccatgtggtggctgatcggcgcagagtccgtgtgagactgctaagcggcgacacgtatgaggccgtggtcacagctgtggatcccgtggcagacatcgcaacgctgaggattcagactaaggtgggggctggggtaggccaggtctggttggagctgcttatttgctcgcatcttcagatgacaggtctcttttacccattctcccttaggagcctctccccacgctgcctctgggacgctcagctgatgtccggcaaggggagtttgttgttgccatgggaagtccctttgcactgcagaacacgatcacatccggcattgttagctctgctcagcgtccagccagagacctgggactcccccaaaccaatgtggaatacattcaaactgatgcagctattgatgtgcgtcctgataggagagaaatgacaaatgatgggggaggggggagaggctgtgtggtacaa

SEQ ID NO: 888 - DNA, 6000 bp, Homo sapiens
ttctgctagcctgagaggctgagaggtcatggtggctctctggcaggacctgcagaaggcagagcagccagtaaggtcatatttggtgaccgacaccatcttcccacctcagccctgatccttaacctctaccttcagttgatcatgctctggggcccacccttcccagcatttcctgccaggaaacagtgctaggtattttgataaagggctactgagagttagtcgacagtccctatagtcaggtagtagaaatctacctgagactattaccccgttggcaggtagtagaaatcttacttaggcaggggtcctcaagggcagtagaaattatgtgagacctagtaacctgtgggaaagtcctgaagggaaaaggataaagaatatagggggtggggagaggaacagcagagtcacagggatcctggattcaaacctgcttgcagctctaggacgtgtcaggacggcagtcagctccagacccacgtagtcaccaccaaccctgaccgtgtgaagtacaaaggtaaattccggctctacctcagggatgggctcaaacttcaaatcctgaagcctgcttttggggtggggctatttgctccaccttatttaacctagtcaggaacctatggaaaacaggctccagctaccacactgagcatgtgtgaactctatagatgatgtgtagtgtgcttgtgaaaggcatgctgggacttgtagttttgcagcagcttcctccaaaacctgggctgatcacccaagctgggtcttcagttcagttacacttccttaatttatcactcatcacttggcatgaggaggtgattttagacagttgcagtctgactacccccttcaaatgtacgagaagactctcacccccatcccccgcagccaaggaataaggaacccactcacagggcttttgagaccgagagagacaacagatgccttgaatgaaaaccatgaatttaatgtgacattgggggagcctcatccttccctttttaccacccacccatccagcctgttgtgagttgggtgagggctgcccccagtctccgtcctgcggctctgggtgccatcctgttcctttgagctcagtcagcctcctgggctcgtctctctgtgaatctcctgtgggacatagggagagatattattcaggctttgccgtagtagctccataattccattctccaatttgccacatcctattaattgtcctctaaccccctcaccttcttgcgtattcatatagtgcttgcttgcgctcctgcaggctctcctgccgggcccaggaagacttggcaaatgttagggctgttggctgaggggtcaccgggccagagctgggaaactgaggtgatcacaatgtcagagggcttgcggagtcatcatcattaaacacgcatcgaatgcctactttgcaagagaggcactatgctagggtctcaggatcaaaaaagaaaggtcagggataagggagtacatagcctgcccccaactcaccccaacacttggatctgaccatttcctgggtctcaccttggaggcagaggctgtgggtagggactgagttcccttggtgatgtcttcaggcatgaaagctacggccccctcaagcagattagtgatagtcaagtctacacagccagtcttggctggggagaaaagagaagggagtccactccctacttactttcttccttcacaacccacttttcctccctgtgcccatctcccagtgtggggccaccctttcccatacccaggtctctctggatgacacccaatggcacatggggcaaaacttccttgactctctgagccagagttgccagttgcacatcaggagaaggaccaggggagggagggaaagaagactgggctgtggaaaaaggaaaaaaagaaaaaagaaattctggtaagtagagaactagaaggagaggctaactagcacagaaataggggaggaatcacagtaggccgaaaaaaaaaaaccccaaaagctgtaatgtatagagaccacatacctgactgggggcgcaatctggggtgtctttgtcgcttcatgtgctctgctttgtcagctggagtgagccgtgtccctgtctggcccaattccttggccaccagctagggagaattggaagactggaagtgtcaagatctcaagctttcctccctctcctcctaagcagggaccccgcctccaccctgtctgtgcacccgaccacctgttgtacacggagtgcaaactcctcattcgcttcccctagttggcgatgaacaggacgaagccacctgcaaagaaacaatccagggctatgttgtgggcacccagggtagaggctgtcaccattccccactttggtacctctttgcatggtgggtgggaaaatagtaaatactgtaaatactttgtgttgcctctgtggtagaaccttgatataaagatctacaaatggacagggcagaggccactaattccttgaccttgaggtgagcctctccccagcgaccaaaatgtgaggacagttaataccttacttgatacaccgtgaaagggacgaaaagtgaccacagcagttctgagacccaggaggcatctgacaccgtctgaggggagggcatgagatgaggcctaagccagggccagggatgggaaatttccccttcaagccccagagattccctgttcaacacacactcaccacagagaccaggggtctctgaacttgcagggtaagaggttgtaccacatcttggatagaaaatggccaggaactagaagaggaaggagaaagtaggatgggaatccagccagcctagtcagcagctcacacctgccttataacaggcaactgtcaaactctacaagcacataattgaagaatgaagggattcaggagaaagaacttaaagtggacagaaaggaaatgaactggagatgatggggtctaagggccgaagaaagttgtaaaaactcaagggcccacaagcttgaccacctacccagctggcgccccatacctgtgctaaacccacctgaagcgcaggagcccctcccggccattggtggcctcttcctcagggaatagcagcagaggagtggggggaagcctcgtggaagcacagaatctcttgagtgactccaccaactccccccgcccattcatctccatgaagccccgagaccagcacacaaagctggggggactattgagtagaggctgggaaccaggagaagagaaagcaagaagaaaaatattgaggaaaatgaaaaaaaaaactgacatgttgggtagaggatcggggttaggggtaaggctcagtatcctccatggggaacgcgagtggggacaggggggccttcagctgggccccagggaaccgccccgtggcgctctcggcctcgctctcactcacggtgctacaggtggtaagcaaattgactatgttgtggtcgaaaggtgtcacatggttggaaatgaggaccctgacactgtgatcccggagtccggagtcctcctgccgggccacgagccctagcaccgcacacatggtccgcactacgaatctggggacacaggaggtggtgactgtgtggcctcgggccagacccagctctgacactccccgaacgcccgcgtcggaacctgcgaaggacgctgtctggcagcgcgcagctgaccaggaagacgtggatcccgagaaagaggcgcaggacgaggaggcagaacccgactggcgcgtagagcagcagcacgagcagtaggaagcagtcacccggaagcctgggggcgagaggcgaagtggtcaggcgccgaaggccgagagcacgcggggatcggtctcttcccgccgggtctcttaccggtgcgagtcaaagagccgctccggccccggccctgagggaagctccataactgctgcttcaggagcgcccggccgtcgccgccgccgccattttcgcgcccggccgcaggggctcttgggaaggcggagtctttgggcatccgcccggggtgaggggacccgaagtcctgaggcgcgccggaagggctagcggtcccagcataccccgcggccccttgggccgtctcacaactcgcgtccggcggagaccacaattcccggcattcgtggggcagggaggagtcggcctcccggaatcctggtcccggcgtgcacttctgaaggacttcaggtaccggcgtgccccgcgtcctactgtccgcctgctcgcgtcctgggtgccgcctctgagtagggcgggcgaggaggcagccaaggcggagctgatggctgcgccgagggcggggcggggtgcaggctggagccttcgggcatggcgggctttggggggcattcgctgggggaggagaccccgtttgacccctgacctccgggccctgctgacgtcaggaacttctgacccccgggcccgagtgacttatgggacccccagtctctgggcccggttgtctgttggggtcactgaaccccgagcatgcctgacgtctgggaccccgggtccccgggcacaactgactgcggtgaccccagataccaggacccgggaggcctcagagaactctggaacccgttcgcgcgcgtggctggcggtggcgctgggcgctgggggggcagtgctgttgttgttgtggggcgggggtcggggtcctccggccgtcctcgccgccgtccctagcccgccgcccgcttctccccggagtcagtacaacttcatcgcagatgtggtggagaagacagcacctgccgtggtctatatcgagatcctggaccggtaatggtgggggtagaccgggaggcactgaagccacaggctggagggcgggcgggtaggaggggtcagagcctcctcttatctgtgctttccctccatttcaggcaccctttcttgggccgcgaggtccctatctcgaacggctcaggattcgtggtggctgccgatgggctcattgtcaccaacgcccatgtggtggctgatcggcgcagagtccgtgtgagactgctaagcggcgacacgtatgaggccgtggtcacagctgtggatcccgtggcagacatcgcaacgctgaggattcagactaaggtgggggctggggtaggccaggtctggttggagctgcttatttgctcgcatcttcagatgacaggtctcttttacccattctcccttaggagcctctccccacgctgcctctgggacgctcagctgatgtccggcaaggggagtttgttgttgccatgggaagtccctttgcactgcagaacacgatcacatccggcattgttagctctgctcagcgtccagccagagacctgggactcccccaaaccaatgtggaatacattcaaactgatgcagctattgatgtgcgtcctgataggagagaaatgacaaatgatgggggaggggggagaggctgtgtggtacaagcaccaactgatatatggtggatgagcctatatagagcttaggctgcaaaaatgtggccacttattcatgggctgagaaagaagagaatttggagaaagtacctacatcctggtatgcccccagacttagaatccccagatctctttcatgttttctccttgtcctacagtttggaaactctggaggtcccctggttaacctggtgagtgagacatccttccttccaagaatccctgccccaggtcagtgtgggaagggtaggtttcccctaattcaaggatgtttggtcaagtttctgagcagttctttgttggctatctctcaatatccaaccagatctccccaacacttgctggtacttttgttcgggtgcccccatcccctactatttgtttaggctagggaactgggggctgtatccctgcaggatggggaggtgattggagtgaacaccatgaaggtcacagctggaatctcctttgccatcccttctgatcgtcttcgagagtttctgcatcgtggggaaaaga

SEQ ID NO: 889 - DNA, 6000 bp, Homo sapiens
ctctgtgggagacctcgcatctgggggccccagctgagacagaaagccttccctgtgaacctttcattccctgaatggtggcccagtgtcaaggaagtccctggcttagaatggagacggagacagagacagagagtggctccaaaaggaaaagttcctcactgggtgggacttttgcaggggagcagacgagaagcaaagccctgggttttgttggaggaggggagagcattggctatttcacccttggcctatatggggctgcactgatgaccacaccacctgcaataggggcacagcctctgtggctctggaggtatttggaaaggcagtctcacttcctagttgggcctgccttcctcttcctgtgaggactctgcagctttcagaggtcaggaggtctgggataggggtgctgggccaaggagaggttgctatgccccaccctgagctgccaccctcacttgctccagtgggcagtcccctcaccatggaagtggcgctccacccggatcagcttggacatctgcgcctcccaggctgttgggaggtcaggcatgggaatctgaactatgagtcatcaacaactcagtggactacagatttaaaaaataatcaagcatttcacacccattggactagcagaaaattataaagtctgacgctaccaagtgatgaggaacaatggcgactttcatgtgctgctggtaggggccggggaaggtccaggtttagcctgaagcttaaacaatcaggaggaccatctttataagagaatacaaaattaggcagagtcttggaaggggcttgagtaagtaggggtcttgaacttaattaaacatcagcttcccagtaaatctgctcctggggtgtgtaaattggaattactcttttggacggcaatgtgataacacctgggaaaatgacaatgtgcatatcccctgtgacccaacaagtcacatcctccaagtgtctctgggagacatttccaacaggtaactacagaggcaaatatgagaatgttcttagcaatgctgtctgcaatagctaaaggcagcaaattggaactatccaaagtgtctattaacagaagactgggtaaacaaagtcaacatgtataaatctcagaacataatgttgcctggaaagcatgttgcagaaggatacgtactgtatgctggcattttcataaagtgcgaaaacatgtaaaacaatgccatgtgtagttcatatgtgtgcagtaaaagtctaacctgtgcttggaagtgaacaccacattcagcctacaggtggccctgaggacggagggagagagagaataagataacagaaggatgtctaggaggcttagatgccatctgaaagcttcatttccttaatacataacagcaaacaaggcaaaatattaagatttgacaaagttgggcaataattatgtaggtgtctgttaaagtattgtatatgttcttctgtggcatttgaaatatttctattttttgttttttaaacttgaggtgaaattcacatatcatcaaaccaatcattttaagttgacagttcagtggcatttagtacattcatggtgttgtgcacccaccaactcaatctaattccaaagcattttcattacccccaaaaagaaaccacatagcgattaaacaattgctccccttggtccctggcaaaccaccagggtttgtgttctgtctctatggatttatctattccagtattttatataaacggaatcatacactatatgacattttgtgccttgtgtcttttgcttagcatagagttttcaaggtttatcaactttgtagcacgtatcagtacttcattcctttctatggtcaggtagtatccattgtttggatatgtcgcactttgttattcagttcattgctgatggccactgggctgtgtgttattgtgaagactgctgctatgaacatgcatgtgccaatactaaagtccctgcttggaatcctttggttatatacccaggagtggaattgctgggtcagagggtaattttttgagggaacaccaaactgttttccacagtggctgaaccatttcacattcccgccagtggcataccaagggttccaatttctccacatccaatacttgatgttttccgttttttggatagtagccatcctaatgggtgtgaagtggtatctcattgtgatttctttctttctatttatttaatttatttacttattaatttatttttttgagaccgagtctcactctgttgcccaggctggagtgcagcggcatgatctcggcttactgcaacctctgcctcccaggttcaagcgatgctcatgccttagcctgctgagtagctgggactacaggcatgagccacccaagccgggttttttttttttttttttttttttgtatttttagtagagatggggtttcaccatgttggtcagtctggtctcgaactcctgacctcaggtgatccacccacctcagcctcccaaagtgctgggattacaggcgtgagtcaccgcaactggcctcattgtggtttcaatttagttttcctaatgcctgatgatgttaagcatctttttatgtgcatattggccatttgtgtatcttctttgtagaaacctctgttcaagtccattgtccattttctaattgggttgtctttttgttgtcgagttgtaatattccataattaaaaaaacctctcgagtagctgggaggctgaggcaggagaatggcgtgaacccgggaggcggagcctgcagtgagccaagatcgcgccactgcactccagcctgggcgacagagcgagactccgtctcaaaagcaaaaacaaaaacaaaaacaaaaactctcccggggtggccagcgccttctcaggccctttaattctccactccttccacacatcaaatatatacagcttcgtatttacagtccatgcagaggagaactgagaggcttggggtcagctttctcctcttctctcccaggcacctgcgagcccacccctaatctagagcatgtggaagatgcctggagatgactatgcattgcgggtctcctgggaagtgaggaagggaggtggggaacaggggtgaggtggagaagtgactttctaagtcagctgagagaagcgttctgggcgagggggagttgtttcttctggaagccccgctaccggcaggccacaaagccacgctggaagagcaagctgccagtagtagatggttccaaggtttcccacgcccctgtaatttctgcagcattggcgggttgggtgggagtctccggtcacctttcccgcagatcagatcgccccgtctaactggactgttcctactctcaggggcactccttcttgtatgctgaacttctaaaaggaggccagcggggggctggctctctgtaaacggtggggctgcgttcattggcgtccagggtttcttctaaatgtaactgctttgattccgcctatccctaggatttcaagtcaccggttccacccaggtttgggttcgactggactttcaccctaagttcaatggtagccctgctcccaggccgccgcagccctcttagcctctgcccgcaagccctctttggatgaactgacctgctccctttggtattcacaccctccccctccaatcaggcaataacaacctggggtccaatttttaaacagccaggctccgacattttctttcccgcccaactctccacgctgacacttctgagggtggggtgccggaaaaggtgtccctcaggcggtgacggaccgcacccacaggacatacagggcacacccctcccaggtgaaggccagcggcccccggggagttgaggctgagggaggtcacttcggcttcgcgacaccgtgagcgcttatcaggagttctcagtaggaagcgctttcctgcagcctcaggcagagaccgtgcgtgcaaggcgggaccgaccgcaggtgcagaggccccgggcctgcccaaggtcagtcgaggcgcgcggatcgctctcgccgccaccccccaccccccaccccccatctcctccacccccaccccgcacacggggcagaaggactgcggccaagcaaacgatggcctcatttccagatcgaattggtcgcaaatacgttccctcgccagaaactttaaaaggccagaagaaaataaaccggattcagctccctctcatctccaaatctcggttggtaatactaatgtttctcttgctgatttttttttcttttttaacgaaaccttctcccttgtaaaagctgcgcacttctacccaaccgcgcaaagcgcggcgggagcttcggtggcgctgcgcgcgtcaagtgggccccgcgcgcagctttgggaccagcgaaccaagagccgtccccccctgccccgctgcctacatctgaccccagttgggaacccagtttttcctccatagtcctgtagactgttcccctcattctgttggtctagaagggcacaaaggaccggaggtgggaggggacttccctggcttagtccccgccctgcgcctgctgccccgatgctcccagaacctgcgcagctagcggatcccgtccgacagctgtgctgggcgcccgagagagcgcacggctcagcccaccccgtcccttccccggccaggagccactcacaaactcaaagatgaagagcaagtcgggcaaggtggtgaagaccgagaagccactgggcagggtgctgccccccgtcgccgctgcgggggccatgacggcgtgctggcgtcggccttgggacgggacgagcgccgctcagactccgcgcagacctctcgctggctccgcggagcccagtggcctgggcgcccccgcgcgcgggttaagagcaggggagcccggggcagaagagggaggagccccggccgccgcccaaccccgccccccgccccacgccccgggagacccggcccgagcgccgcgggcaccgccctgaacctcttcgaggccccgctgcgggcgtccagagctggggactgtgggtctgactcctgcgttccagccgtgggtgccacctcttgcgggaagcagggcaaaaccactttggtcaggcgctcctcgtgcctttctcccttcgtaggtgaccagcatctcgtaagaatgataaccatcagtaaccgggaccccaaaccttctcatcaaggcacctctcgggtcaccattactttaactttgaatttgggtctccttcatttttccgctggatgcgttaatgtgcgcgacccacagctccaggcggcggtttcctggcggaactggaccaccgccacaggctgggggtctgcagtgggggatgggaccggccgcggccgccggccccttccgcgtccactgagccggcgctggttcggcgctgggatcctgcaccgggcctctctgcttggtgctgcgcgtctgcctgagagtaggaggttgctcccagctgtgccggccccagcagaaggctgctggtggtggtgctggggcaggtcggccttgaatccatgcgacaggaagggacgttaccagaagagattcatcgctttctcttggtctgggcagcccgggccttttgagggtgggaccgctgctacccccacccccaggttctttgcctgcctgttgactgccggtgtttcatgttttgtttctctgtttcactattttttattttttgccttaaaaaaaaaagtattaccatgcagcagttgcccatttattttaatttactattaatagtgtgattgctgtgtttcctcctacaaacactgaagcctgaaatccgcccgagtccggattctcgcctgccaaaagggaattggccccgcaacctccagcttagactcccaactcttctttctttccattggcagctgctgcaggcaggacaaggggctccccttctctccagtggggccttcacctctccctgctgcacaattcttcctccttcccag

SEQ ID NO: 890 - DNA, 6000 bp, Homo sapiens
ccaggactcacctgcactgtccccttggcctggcacactccctccctcttcctgcacatccacattccatgcaacctcacaggccttcctcaagttccgccgcagcatcagtcctgttctcctccccttccagaacttgcccccatgcctgttccttctgccctggactcctgtggttgtttacattctgcctcctccctgctctatcgccttcctcagactcactgttgatctctgtatgtgcacttgaagcctgcagtgtgtggtgcgatgccagaccctcctccaggagacagcaaggggcctggtgtgtgctgttccagtgtcgggaaggctctctcccttcacctggtaaccactgctcaccaatccaaagggcccttcctcccacaagcttccctataggccaggctgggccggtgctgtacctgggctccctgcagtgtgctatgcttgattaagatctgcctcccaagcctcataataagcttcaaagaggcaggggcccctcctccatggcaaccccatcacccagcgcttactgaacttgggctggaggcaggaggctctactgagtttactgttacatctgcagagcgggcacaggggtaccacccaagaggttctcagaaacagggccccactgtgcagcctgcccccaccccaactttgttctagaacagttggtccatgtgccacctactatgatctgaatgtctgtgtcccctccccaaattcctatgttgaaatcctaacccccaagatgatggtatcagggctgaggcctttgggaggtgattaggtcataaagatggaggcctcatgaatggtatcagtgtccttagaaaagtggccccagagagacccttcacctcctccaccctgtgaagacacagcaagaaggtgccgtctgtgaaccagaaagtggaccctcaacagacacggaatctgcaacaccttgatctaggatttccagcctccagaacagtgagaaacaggctcctgctgttgacaagcctcctggtctaccgtagtttattacagcagcccgaacagactaagacaccgtctctgagcactttgcctgcagtcatggacaaagcatgcccagcacaggccctgaccaggtgcctctcagcctcacgtgctgtccctcttggaaagagctctcctagggagcagggactctgtctttcctactcacacaccctctaccctccatccccatccacaagtcacccagacaatgccagcctgttttgtgctcagaatatcatgaggactttgtcggacagtggcagagtgccacatctccctggttctagaaaacatgatcctacaagagggtggggaaaagagcacatgcggatcattgtccctggaggcagtgggcacacggagcccatggcccatcaaaggacagtgccctggtgagcagccaccacttcagattttccagtttgtggattttgtgcagtagacacagagcctgcctgctggaatcaagaggcctagtcaccagccatgtggcctgcgcacattacctcccattcctagcctgtatgttgggtgacacccaccagcaagcctctgtgggattaaatgaagccatgcaggcaaagtgcctgtggcagtgctgggactcagcaagccctcagtaacaggttcccctcctgcgctgacgccatggcagctgtggctgccattcccccatccgccagcaggtgccctcactgcttcatgccttctatggaacccagggctgtgggtgactgtgtctgtgagaaaaataaaatccctagggggaagtgcgcgttcagggtagctctctgaactcatgtcggcacccggcctcgccatccataaatggggatgatgacccccacttccttgtgttcccagaggtgaaggtcccaagccctgtccaccagggcaggtgcctggggccacacctgagatgaccatgaagactggatttgggaggctgccgatgtctgcatggagctggcatttgactggcaattgcccatcttgagcagggttttcatcgagggctcggagctttagaggtgcagcgtcactcaggttcaaggtgctcagcaactctgtgcccttgggcagctacttaacacttctgagcctctgttagctcatcagtaaaatgggagtcatcttacctacctcaaaaaccaatgcacctactgttacggatgggcaactcctgcccattaatctttccctgaacacgtccctctccccacaatctcctccctccccctgaacacacacaaactggaggtggtaacctcttccttccccaggctggctctgcaatggcaactttccaattcctactttgtggaaacccacccaaggccacgttattaatatttgacagaagccccagacccaccctcttattcacacccactgggaagaccaaggatactcactgagttattattggctgaaattattttttcatatcctgctggaaaccaaaatatggtcctgggcttctgataagtatcaaccacctcattcaccagcaggtggcccagagcacctgcagaagctgtgctggggaatgaagacaggcccatctttacttaccaatgcctctctcttaccaatgtctctctctctcaccaatgcctctgttttacaaatgcctcctctcaccaacgcctctctctctctctctcacacaccagtgcctctctctcaccagtgcctctctctgtctcaccaacgcctctctctcaccaatgcctctctatttaccaatgtctctctattaccagtgcctcactcctcaccagtgcttcttacatccaaacagggcacttccatgtcctcctctggtggtcaagcacagacaaagctggagtcatccaccattggctaaggtttaatgagcactcaccagaggctgggctctgcttgggtgctgagcatatgctagggtggggaaggagaggggcagatgggggtggctggaggatgccctgccgagggtagagtctggtcaggaagatgaacgtcgagcggagaactccaggtgggaggagggggtcacagagatagggacaaacccccttgaccctggccgggctgccttcctcatcctctgaagcctctttcagagattgctgcccctctgccttatcaaaggagggctgggactgctgagctccactgagttgcccctgggagcgagctttccccaaaggctcaggcccaagtaggaatgagttagcaacaaaggcttgaaataagtaggaaatcaccaaaccaaaccacaaacaaaagccctccaggccaggtaaggacattattaggagttgataggatcttcttgttcttaattagtatgtgctgataggaaatctccaagcagctttcgctggactgcctgagggtcatctcacctctcttcaggctgcggcttcctgtggccaccttgctttaaggcttgttcccaggacggtctcctggggaggaagaagatgtcctctcagaggccagcaggtccaactaacgagctatgagatgcccaaggtggatgaggacctgggctcctaaagtcccacagcccattgtgtccagagagatgctgccctggggacccgacacaatggcaccttggttgcagccgtccgggctggcagctcacagaggcacagtggggttttctcatttcaaatgcctggcccctttccagaggcacttagaatggccagctgatgggcgtgctacttttgctttggaaaatgcgtccacgaatatacttctctccctagggactgggaaggaggaagaattgtgcagcagggagaggtgaaggccccactggagagaaggggagccccttgtcctgcctgcagcagctgccaatggaaagaaagaagagttgggagtctaagctggaggttgcggggccaattcccttttggcaggcgagaatccggactcgggcggatttcaggcttcagtgtttgtaggaggaaacacagcaatcacactattaatagtaaattaaaataaatgggcaactgctgcatggtaatacttttttttttaaggcaaaaaataaaaaatagtgaaacagagaaacaaaacatgaaacaccggcagtcaacaggcaggcaaagaacctgggggtgggggtagcagcggtcccaccctcaaaaggcccgggctgcccagaccaagagaaagcgatgaatctcttctggtaacgtcccttcctgtcgcatggattcaaggccgacctgccccagcaccaccaccagcagccttctgctggggccggcacagctgggagcaacctcctactctcaggcagacgcgcagcaccaagcagagaggcccggtgcaggatcccagcgccgaaccagcgccggctcagtggacgcggaaggggccggcggccgcggccggtcccatcccccactgcagacccccagcctgtggcggtggtccagttccgccaggaaaccgccgcctggagctgtgggtcgcgcacattaacgcatccagcggaaaaatgaaggagacccaaattcaaagttaaagtaatggtgacccgagaggtgccttgatgagaaggtttggggtcccggttactgatggttatcattcttacgagatgctggtcacctacgaagggagaaaggcacgaggagcgcctgaccaaagtggttttgccctgcttcccgcaagaggtggcacccacggctggaacgcaggagtcagacccacagtccccagctctggacgcccgcagcggggcctcgaagaggttcagggcggtgcccgcggcgctcgggccgggtctcccggggcgtggggcggggggcggggttgggcggcggccggggctcctccctcttctgccccgggctcccctgctcttaacccgcgcgcgggggcgcccaggccactgggctccgcggagccagcgagaggtctgcgcggagtctgagcggcgctcgtcccgtcccaaggccgacgccagcacgccgtcatggcccccgcagcggcgacggggggcagcaccctgcccagtggcttctcggtcttcaccaccttgcccgacttgctcttcatctttgagtttgtgagtggctcctggccggggaagggacggggtgggctgagccgtgcgctctctcgggcgcccagcacagctgtcggacgggatccgctagctgcgcaggttctgggagcatcggggcagcaggcgcagggcggggactaagccagggaagtcccctcccacctccggtcctttgtgcccttctagaccaacagaatgaggggaacagtctacaggactatggaggaaaaactgggttcccaactggggtcagatgtaggcagcggggcagggggggacggctcttggttcgctggtcccaaagctgcgcgcggggcccacttgacgcgcgcagcgccaccgaagctcccgccgcgctttgcgcggttgggtagaagtgcgcagcttttacaagggagaaggtttcgttaaaaaagaaaaaaaaatcagcaagagaaacattagtattaccaaccgagatttggagatgagagggagctgaatccggtttattttcttctggccttttaaagtttctggcgagggaacgtatttgcgaccaattcgatctggaaatgaggccatcgtttgcttggccgcagtccttctgccccgtgtgcggggtgggggtggaggagatggggggtggggggtggggggtggcggcgagagcgatccgcgcgcctcgactgaccttgggcaggcccggggcctctgcacctgcggtcggtcccgccttgcacgcacggtctctgcctgaggctgcaggaaagcgcttcctactgagaactcctgataagcgctcacggtgtcgcgaagccgaagtgacctccctcagcctcaactccccgggggccgctggccttcacctgggaggggtgtgccctgtatgtcctgtg

SEQ ID NO: 891 - DNA, 6000 bp, Homo sapiens
gctggctattccccagccaggtagaaatctagcagaagtccccagacctctctggtcactcttaataacagtccagtcactttgggtcacagaaaaggtgtcattttagtcattactctgtccagttcactgtaactgtcaaaactgcaaactgattgcgggtgtctccccaccccaaccccaacccgtgatgtgactgcacttctgttcgtgtttctgaggcacagaggaggaagggcatgcccctggagggctgggcggcattcctcacaccctcactcacaaccctgcctcctttgtggcctggggaggagggggctgagtagatgatctcacaaccctcttcaggcacttccttcacaagtcctgaatgggtagggggtctctcctggcactctgtgggagacctcgcatctgggggccccagctgagacagaaagccttccctgtgaacctttcattccctgaatggtggcccagtgtcaaggaagtccctggcttagaatggagacggagacagagacagagagtggctccaaaaggaaaagttcctcactgggtgggacttttgcaggggagcagacgagaagcaaagccctgggttttgttggaggaggggagagcattggctatttcacccttggcctatatggggctgcactgatgaccacaccacctgcaataggggcacagcctctgtggctctggaggtatttggaaaggcagtctcacttcctagttgggcctgccttcctcttcctgtgaggactctgcagctttcagaggtcaggaggtctgggataggggtgctgggccaaggagaggttgctatgccccaccctgagctgccaccctcacttgctccagtgggcagtcccctcaccatggaagtggcgctccacccggatcagcttggacatctgcgcctcccaggctgttgggaggtcaggcatgggaatctgaactatgagtcatcaacaactcagtggactacagatttaaaaaataatcaagcatttcacacccattggactagcagaaaattataaagtctgacgctaccaagtgatgaggaacaatggcgactttcatgtgctgctggtaggggccggggaaggtccaggtttagcctgaagcttaaacaatcaggaggaccatctttataagagaatacaaaattaggcagagtcttggaaggggcttgagtaagtaggggtcttgaacttaattaaacatcagcttcccagtaaatctgctcctggggtgtgtaaattggaattactcttttggacggcaatgtgataacacctgggaaaatgacaatgtgcatatcccctgtgacccaacaagtcacatcctccaagtgtctctgggagacatttccaacaggtaactacagaggcaaatatgagaatgttcttagcaatgctgtctgcaatagctaaaggcagcaaattggaactatccaaagtgtctattaacagaagactgggtaaacaaagtcaacatgtataaatctcagaacataatgttgcctggaaagcatgttgcagaaggatacgtactgtatgctggcattttcataaagtgcgaaaacatgtaaaacaatgccatgtgtagttcatatgtgtgcagtaaaagtctaacctgtgcttggaagtgaacaccacattcagcctacaggtggccctgaggacggagggagagagagaataagataacagaaggatgtctaggaggcttagatgccatctgaaagcttcatttccttaatacataacagcaaacaaggcaaaatattaagatttgacaaagttgggcaataattatgtaggtgtctgttaaagtattgtatatgttcttctgtggcatttgaaatatttctattttttgttttttaaacttgaggtgaaattcacatatcatcaaaccaatcattttaagttgacagttcagtggcatttagtacattcatggtgttgtgcacccaccaactcaatctaattccaaagcattttcattacccccaaaaagaaaccacatagcgattaaacaattgctccccttggtccctggcaaaccaccagggtttgtgttctgtctctatggatttatctattccagtattttatataaacggaatcatacactatatgacattttgtgccttgtgtcttttgcttagcatagagttttcaaggtttatcaactttgtagcacgtatcagtacttcattcctttctatggtcaggtagtatccattgtttggatatgtcgcactttgttattcagttcattgctgatggccactgggctgtgtgttattgtgaagactgctgctatgaacatgcatgtgccaatactaaagtccctgcttggaatcctttggttatatacccaggagtggaattgctgggtcagagggtaattttttgagggaacaccaaactgttttccacagtggctgaaccatttcacattcccgccagtggcataccaagggttccaatttctccacatccaatacttgatgttttccgttttttggatagtagccatcctaatgggtgtgaagtggtatctcattgtgatttctttctttctatttatttaatttatttacttattaatttatttttttgagaccgagtctcactctgttgcccaggctggagtgcagcggcatgatctcggcttactgcaacctctgcctcccaggttcaagcgatgctcatgccttagcctgctgagtagctgggactacaggcatgagccacccaagccgggttttttttttttttttttttttttgtatttttagtagagatggggtttcaccatgttggtcagtctggtctcgaactcctgacctcaggtgatccacccacctcagcctcccaaagtgctgggattacaggcgtgagtcaccgcaactggcctcattgtggtttcaatttagttttcctaatgcctgatgatgttaagcatctttttatgtgcatattggccatttgtgtatcttctttgtagaaacctctgttcaagtccattgtccattttctaattgggttgtctttttgttgtcgagttgtaatattccataattaaaaaaacctctcgagtagctgggaggctgaggcaggagaatggcgtgaacccgggaggcggagcctgcagtgagccaagatcgcgccactgcactccagcctgggcgacagagcgagactccgtctcaaaagcaaaaacaaaaacaaaaacaaaaactctcccggggtggccagcgccttctcaggccctttaattctccactccttccacacatcaaatatatacagcttcgtatttacagtccatgcagaggagaactgagaggcttggggtcagctttctcctcttctctcccaggcacctgcgagcccacccctaatctagagcatgtggaagatgcctggagatgactatgcattgcgggtctcctgggaagtgaggaagggaggtggggaacaggggtgaggtggagaagtgactttctaagtcagctgagagaagcgttctgggcgagggggagttgtttcttctggaagccccgctaccggcaggccacaaagccacgctggaagagcaagctgccagtagtagatggttccaaggtttcccacgcccctgtaatttctgcagcattggcgggttgggtgggagtctccggtcacctttcccgcagatcagatcgccccgtctaactggactgttcctactctcaggggcactccttcttgtatgctgaacttctaaaaggaggccagcggggggctggctctctgtaaacggtggggctgcgttcattggcgtccagggtttcttctaaatgtaactgctttgattccgcctatccctaggatttcaagtcaccggttccacccaggtttgggttcgactggactttcaccctaagttcaatggtagccctgctcccaggccgccgcagccctcttagcctctgcccgcaagccctctttggatgaactgacctgctccctttggtattcacaccctccccctccaatcaggcaataacaacctggggtccaatttttaaacagccaggctccgacattttctttcccgcccaactctccacgctgacacttctgagggtggggtgccggaaaaggtgtccctcaggcggtgacggaccgcacccacaggacatacagggcacacccctcccaggtgaaggccagcggcccccggggagttgaggctgagggaggtcacttcggcttcgcgacaccgtgagcgcttatcaggagttctcagtaggaagcgctttcctgcagcctcaggcagagaccgtgcgtgcaaggcgggaccgaccgcaggtgcagaggccccgggcctgcccaaggtcagtcgaggcgcgcggatcgctctcgccgccaccccccaccccccaccccccatctcctccacccccaccccgcacacggggcagaaggactgcggccaagcaaacgatggcctcatttccagatcgaattggtcgcaaatacgttccctcgccagaaactttaaaaggccagaagaaaataaaccggattcagctccctctcatctccaaatctcggttggtaatactaatgtttctcttgctgatttttttttcttttttaacgaaaccttctcccttgtaaaagctgcgcacttctacccaaccgcgcaaagcgcggcgggagcttcggtggcgctgcgcgcgtcaagtgggccccgcgcgcagctttgggaccagcgaaccaagagccgtccccccctgccccgctgcctacatctgaccccagttgggaacccagtttttcctccatagtcctgtagactgttcccctcattctgttggtctagaagggcacaaaggaccggaggtgggaggggacttccctggcttagtccccgccctgcgcctgctgccccgatgctcccagaacctgcgcagctagcggatcccgtccgacagctgtgctgggcgcccgagagagcgcacggctcagcccaccccgtcccttccccggccaggagccactcacaaactcaaagatgaagagcaagtcgggcaaggtggtgaagaccgagaagccactgggcagggtgctgccccccgtcgccgctgcgggggccatgacggcgtgctggcgtcggccttgggacgggacgagcgccgctcagactccgcgcagacctctcgctggctccgcggagcccagtggcctgggcgcccccgcgcgcgggttaagagcaggggagcccggggcagaagagggaggagccccggccgccgcccaaccccgccccccgccccacgccccgggagacccggcccgagcgccgcgggcaccgccctgaacctcttcgaggccccgctgcgggcgtccagagctggggactgtgggtctgactcctgcgttccagccgtgggtgccacctcttgcgggaagcagggcaaaaccactttggtcaggcgctcctcgtgcctttctcccttcgtaggtgaccagcatctcgtaagaatgataaccatcagtaaccgggaccccaaaccttctcatcaaggcacctctcgggtcaccattactttaactttgaatttgggtctccttcatttttccgctggatgcgttaatgtgcgcgacccacagctccaggcggcggtttcctggcggaactggaccaccgccacaggctgggggtctgcagtgggggatgggaccggccgcggccgccggccccttccgcgtccactgagccggcgctggttcggcgctgggatcctgcaccgggcctctctgcttggtgctgcgcgtctgcctgagagtaggaggttgctcccagctgtgccggccccagcagaaggctgctggtggtggtgctggggcaggtcggccttgaatccatgcgacaggaagggacgttaccagaagagattcatcgctttctcttggtctgggcagc

SEQ ID NO: 892 - DNA, 6000 bp, Homo sapiens
atgactgtctctgagggagcaaattatcatctggttgagcagaggaagctccaggaagttacatagctggttcagggtctcagaagttgaagcccagccaggctttggaagcaggtcccctggtcctggtggccctggaggtttcttcctggaggcaatgccagttcccattccctgtgggcatgtgggagcgaggccctatctccaaggtgacttgaaccaagtgtccttactgtccctgtggcagggatgacagattgggggtgctaggagttcttccagacccttcaacctggccacccaacagaaggcctcatggtagattctgccaaacaaatgccagatgggccaaggtgtctaaggtcccaggtggctgctcagggcagctccagctggcttgaggtgtacaaagggagagccaagtggctggggcaagagcctgcccaactacctgaagggacaaacaatgtgagttaacatttatttacggagttctgagcataagtcaggaagcactttccatgaattaactgggaggcaggcattgttatttacctgcctgacagttgagaaagctcaggcacacagactggatgtgggcggagtggaaagggcaacgctcatccgaatgaatcagccgagaacagtgccactcaggccacatctgagtcttctggaatcagcctgaggccctgatctgggcggatgtggacagcatcccccttccctactctccctgagccagagtcgtccatcgcttctagcctgagtgccaggagctgaaccaggaggctagtggccaacctggtgcacacagcacatgctgccggaataaagctccttctccgtggtcccagcccttcctagcatatgctgggtgtgcccgtcctggggtggtccacactcatccgtcttacaaatgctgaccgagaactgcagctcggatgaggagggatggagggggtgtgcagagggtggggccccgtccgagcccttggcttctgcccacgagtgaagcagaatttagggaagaggtggctgagcccctacccacactaagggctggagtgggagccaaggagtcaggcgctgaggttagaggagggaggtttcagagaggcgagctgagtccaaggggtgcggtcggccgccctctcttcacttcaagctgcaaggaaaggggctttaaagaaagccgccagagagcttcaccgtgtcccctgcagtttaataaatcccttggactgatgcctcacccactgcaaagtctagagggcagtcaggctggctgcattgaaggcggagctaaggagagggctggcggcccaggtgagggcctcctgtgagagacagcatggagtctcctaggtccagtcgaaggaggctgcccagagagtgaaccgacctcagccaagaggaggcagagctgccactaagtattgggggcttatgggtcccctgaggcccatgtgaaacactctagtcaggggaccatggggccaggctcttaggacccttggaggagcccacagagaaagagggacagctctcaacctctgcaaacccagagcgcagctcagccagaggctgccatgcccactgcctgccccaagctgccacccccaggcctgagctgggtggggagcaggagagttgatgatggcatgggcttcgatgggggctgagcctgtgttttgtgatgtgaagtgatgaggaccatttgtattttcttaccaagatgcacccagctggcgaggctttctctctctctctctgtctctctctctctctcccccctgtacccctcagctctctctctctccccctgtacccctcagccagggcccaacaaaaaatagggcctaaggaaaagagccctgggctggggctccacagagttgcgtttggaggcctggggaggagggacttgaatttgggcctggaatgtgggatcatgagcaacaatggaggaaggcgcagaggcccccaagacctgtgggcatgagcaccatgagccgctcgcccggggaaggacaagaatgaaggccctggtcagctgaaacagcccacgactgcctcctgaaacactgtgacgagagaaaacccgaccttcatccgggcttgaaatcatcccttcctttcccacttccaaactccccccagcctcagtttctccccacagcccctatgtgaggaaaccacagtgggaaacacagggctgaagcgttcctagtggacaagaccaggtccttccacagcctccttaaccttctgtgggtctgatataccgcagagaatactgggaattgccaaggccgtctctgggaagtctgcagatgcccgtgtgcccacaacaggtccgcctctgaggcccatgtgggagtccagccccctttctcctccccttctcattcctgtgttccccacaggcccaggggagggacccagctggaagcacttggggccctggataggccactgaggaaggggggtgtggtggcagggtcacatacgccccacatctgtatgaggggtgtccacccaggtgctagctgcagtgggaggttcgcaaggcccgaacagccggtgggtccagcagagcagggcagttgtcccaggcccgcggtgtcacggctggtgaactccgaggacagcgcatctgagtgtgggatgtcagcgagtgtgccaagcaggggcgagcagctcttgggggtgctgctgtgatgagtgggttcctctgctcctgactcctccggccaggccgtcaggaagaccagcccatcacggcagtgcagtcaccaagtttccaagctgctgtgtaagccgtgggcatagaaccgccagcgggatctcagcatccacggtgctcactctaggaagaaggcaacaggctttgggacctggctttaccactccctagcctgtgacttgggccagtcttttagcttttctgggtctcaccattatcatctgtagagtgagataattacacttttctcccaaggtcactatgaggactcaaaatgctcaatgcgtccctgcttgcggaggcgaggcttgctcagagtcaggagggcaggactgtctcaggcagtgaaaggaggatggggctgggcacggtggctcatgcctggaactccagcactttgggaggcagaggcaggtggatcacttgagccccagactttgagaccagcctgggcaacatagtgagaccccatctctacgaaaaaatacaaaaattagccgtgcatggtggcatgagccttgtagtcccagctacttgggaggctgaaataggaggattgcttgagcctgggaggtcaaggctgcagtgagccatgatcataccactgtactccagcctgggtgagagagtgagaccctgtctcaaaaaaaaaaaaaaaaaaaaaaaaagcagatgagctcccaggatgccggccctgagctggcagccatgaaggcgcttgcctccctccacttcctagggtgcagtgtgggtggggcgggggcagctagggagtcctccgggctctgccgagccccttccccagtgtgaagtccagcctgttctgaagtcgcacagggccagacacctgggctgccacctcccctctggaaacagtcctccttgcctcggtgggtcgacagctccaggctattttcttcccctgaggatctgaaagttggaggtaattggttggctcaaaaaaaaaaaaaaaaaaaaaggaaaagggcatgcaagcacaattgtgcaggctgcaaaggagggaggcatcctagggcttcgtctccatgggaactactggcacaggctggctcctctgggctccaaaaagggaaacttggcaaaggtttcaggcacctggctcctgagtggtttgcttgggggccaagcaaatgcccaggagctgcccgcccaagggacaggacacagccccctctctcagggatgcctgggagccctcggccccatccttcaccctcacaccccaggagatcccgtcaggtcctcagccaccctggatgcatcctgacttgggagctgggaggggacccagcacagctggagagcatgagcaggtcatgctttggggagacacccgtgcttcgaggccctcggatgggtgaatgggaggtagttaataagggacagatgaaagaggtggaaggaccctgagtgtcaccctgctgatgtagccctggtggctgttgctgtttctaggatgtgagccccagaccagcaccttgcagaccagcacctcaggccaggaccctgagagaggacgcttcagatgctgggtgcagtggctccctgctgtcctgggggccccttgggctgagatcatcataagggtggcactgtcctgtgtctgtgaagagtggcaggcgggactggggcagtgggggtgtcctggcttgttctggaaaatacctccaggaatgatcccttccttttccacttccacagtccctcctgggcactctgggttcaactgctgctcctccccacttcttggggcagaaactcctgccctgaactcccctctccccagccccagctccctgcaccctctacccccattcctccttggtgaccaaaaagggcaaggagcagagaaagaggcagcgggcaggggaggcacagagagccgctggtgacagggtaggggagaggccaggagagccagacagaggcttggacaggctctgagagaccaggattaggggccatggagagagagagagaaagaggggagagagagagagagaaagaggggagagagagagagagagagaaagagagaaagggagggagcgaggaggcagaggggtggagcgatagaagccggcagggaggaaggggtgggcagggggagggcgagaagccgccgttgacaattacgtctgggtccaagcaaacatgaggcagctgccagccggcctgggcagtcttgtctgcctcggctgtgaagtggggaggctggcaacagttttcttcagcgcccaggatgcagccggctaaggtaggtgctgggggaatggggtcttgctctggaggggggtcggggggaggaatggaggcttctgggggttgctctggaccaggaagcctttttctttgacccttgtcccctcttgttccactttcctttggggaaagtgagcgttggggcgtcctggctggcgctggggtgtcctggctggtgttggagtgtcctggctggcgttggggtgtcctggctggtgttggggtgtcctggctgggaggctgaactcctagggctccctttggatgggagaggtttataagtgtttgcggaagaaaagctggacagaggaggagcttggggtcagcccacgactcatcctgctcagttaggtccctgggtcaggtgccagcgtggctgacactgagcccgggccccacagccttcaggtttgggggaggggtgagcctgggagggagtcacttgtgcttggaggttggtcaatgaacgcatcttctaatcaagcaatcaagtaacgaatgagtgcccacttcctctgaaagggctaggagcccctaacaagagcacttcccacacattccctttcagtagggctgtggggaggtcagagagagaatgcaaggaaaacgcctggcacagagtttgagaaacagtggtggggaacagggaagggtgaagaattaaaggaggaatgagggaaggagaaataagctggccctccagcctctagctgactctcaaaaggtctggcctgatgccctgtgagctgctcacacattcaggatagttcaggtctggctgctcataacagaacgccccaaataacagtggatggaacaaggttagcggggtttctctctcatgcagaagtccagaggggcagtggagggctggcttggaggccgcctgatcagcagcatttcaggcctgccctgtatcacccctgaggttaccttaaggtgcaacataactgctggagctccagcca

SEQ ID NO: 893 - DNA, 6000 bp, Homo sapiens
accccaaggatgatgaggcataaactggacaaagacagggaggtggaaaagtgttcacagttcacggaagagcatgtgcgaagaccctgagatgagagagtgctgggctcattctggtagctgcgagtgtgaccacagccacacgagaaagagagaggaggggcccggccatggggggcaaggttgaattgaaatcacaggctttggagctggactgcttgggttcaaatcctgactctggtttatcagctgtgtgcccttaagcaaagcattaaccactctgtgcttcaacttcttcctcctttccagttcctaccttatcagaactgtgaggaatgaagagataagtcatgttgaaacacctggtacatagtaagtgctttagctgcttggattaggggccttcttaggactgtggtctttgttccgtgagaagtgcagaatgcattagttaggaccctgttggctgcaggggacagcaactcaactcacattggcttaagccacagttggcggattgattggttcatatgtccgaaagatacaggtttagatgtgtcatggggcacgcagcgttgccagctggacttgatctctttgtcttcatttttagctgtgttttctcctgaggtgactccgttctcaggcccgctgttcccacatggtggcagcctggccacttatctactataatcgcctgcttttccccggggccagtctcatggaggactctcactatcctggctcccgtctggtggccatccctgagccaatcactgtggcagcagaggggtggtatggagtggaaaagagaaattgacactgattgagccaacctccaaagtcactgcactgaggctgggaaaggaaattggggtgtggtcaccagccacacaggcaaacatggccattgctgaaccaggaggcccctggtagtttccagttgggaaagggcacggtctgatttttgtcttgagatgatcatgctggttgctgaaccgagaagaggtaggaggagaaccacagtggaggtggggagaggcactggggacccatgttgggagtccaggagggagaacaatgctgtggctgggctggtggcagtggggcagagatggacgaggaggcacagggcgagagtgtggtgacaggctggacggggtggggacaggcagatattccaaggtaagagccagggttttggctgaacagctgagatggggagacttgggaagtggcaggttgggagaggatgaagaggtcagctttggaggtgctgagtttgaggagccttgagagtgtgaaattccattcctgggcattcttgtctggtttctatgaaatatgggaagaataaataaattgaataatgcctgctttgcccagtagaaagcattagaactaaactagaataaggcaggcctcccccagccccactccggagagttgggactggaccagtgtgctgagctgttttcacggaatgggtccctcaaacagcatgcatccagcccagacccgcccttatgagtcaggagacctcatgaaatccctgggcagctaggtggtcaggaacagttagcatgggacatccagggaatgtcggtcaaactgacagagtcccaggccttgggaaccaccagtacagctgtggtaacaagatggaagatgccggggcagagagccaaaatgcagggaggaagagtgtggcccaggcaggtgtgtgctagttcataggcaaaggcagtcaagacagggctggtagaatctgggttggcttcttggagacagaactggatggcagcttcaatattccagccatggttgtgacctcaggtgtggggtgcctgtccaggtttggagtgaccccccaccccgaccccaaagcaatttcctctgaaaacttcctaaactagagcaagatgcaggacacccctgtctcctagtcatcctgaggacttcaggagagggctcagggcccagccttctccaatcaccccaaggaccagtgaactgctccctccacattgcccctcaacttgtccccacctctggggcagtccttccctaactccccgccctgaagaggtttttttgcatgtccctcacctccagcctgtgctttcctcaaagcaatgagtgctacccatacacagcatactgccacatggaggcacttgggatgtgctggggaccaaggaaatgcacgccagggcagacagtcgcctgggaaggcacttcatgggtggcggggtgggggggggcacatggggcttcagggctcgcctgctggcttccttctccaagtcccagggaaggggagtgtgataagaccctcagcccagcctcagtgggcctacgctggtgagtgagcctgggagtcagctccccatccattaggcccgtagcccaggtggctaatgccacgtggatactctgctctcaggcctcgtatccacttaggcgttgttaatattttacacggcacagccagaggatcgatgtcttgtttatagctcagggtttataggcagtcatcgaagctctcactgggaactgggaagatgctcagaagcatccagggaaacagaggcagagaagagggttggaggccagcctcaggacccccaagatggcctcctttgcatgctcagttctctgtctcatctgacacgtgccaccctgtgaagctgggcacatgcagctctgagggtgcattgtaggggccactggagcccctgccacgtgccagcctgcatctcattccatcctttcaagcccccggagaggctggattattgttcccattttatggatgaggaaactgaggcttagaggggttatgtaccactacacttttacaggtcactaatggaggctgagccggcactacctgggcacaggctggatcttgttcagcacttaagtgtgtaaattacattgcaggaggctctttaaccttaaaagctctgctccaacagagctgttttctctggggattgttagcctctctgcttaggacttttgcctttggtcagtggagaatcaccacatcccaattaactagaattaaaagctatgcatttacagttctttaaaactaacgccaacggctcagacatttaactaggcatgtgatacagtgaagctgcactgcgcagcccctctcccggtcatttcccaccagaaacaggctggtgtcacgggaaagtccccgctccggactccagcaggcctggctgtccctgtgcccctcacgtaattagccctctagcctaggtttcctcccccgtaaaatggaggaagaggaaagcccacggggggagccctttaagaatcacacgtaagctcaaaggcttggcacacgtaggcgcgctccagggggccctcgcagccacgcgccgcggctcccaccccacccaggcagcgagctctgtgcctgggaccaagcaccgtgttacgctcaacatcagctgaatgaatggccgagtgagtggcagaggctccctagatggaagctgcaattgctcaggccgtgagtccaaacaggactcgcgcttataggcgtggagcggagctggatttctcccttggctaacacagcgggaaggatgaggtgcgggccgtagccgcgctgccgcgctgagtccgtccggcggggatgcccacagtgcgccgcgcccgctggagggcagcagagggccaggctcccggctcaggtctccggcctcgcggctccaaggaccccgggctccgcccggccacgcctcgtcctcccctattttctccttccttttcgcggctttccctcctctaccagacccggcaggaagaaagccacccacaaacgaataagcatgcccttgccctgcccgtgcgtggcactccgcatccgcttagctcttccccgccgcccgaaggcgggcgtctccccctctctgcggagcaggcggcggcggctgcgagtccgtgactcgaccaaggtcacgcagcaaagtcagcgaccaagctctgttccgcagacgccagggccaaagcccacactttccctaaagccccgagtgcacgcgcgtttccagaacgggagaactttggagaccaacttctgcattttcaaagggggccagcctgggcccagtttaatctccggcggaggaccggggttgcgggaaatgcgccggggagtgagggcttcccggatcccccgccgccgactccgcgcgggccagcggcgcggggcgggccgggatcagcgcctccccgggagagcgcagccgccgccccctcctctcgggctcccggcccctccccagcccctcggcccccatcctgcgcgtgggagaaaccgccgaccgcgcggcctccaggggctggcggagcagcggtggcgacgcgccagactccgtcctgggctggcccgtgccgggcggggcggggccggctccctccgcccttcccgggcaggcgcgggggggccgcagggacgcctcccggagtggccgccgcgcctaggccaatgagcgcgcggggagcggcgatggaggctggggcggccgggagcgcccgggacccccgccgccgcgccgccgccgccgcgcccccgcgccccggcgcccgcggggctggagagggggcgacagaggcgcagcgcccgcgccgggcatggaggcgccgctggcccgcgctggccgtccgcgctgcgtttcgcgccgccgccgccgccgcgcctcgaagtttgccggctgactcggaaagttgcgctcgggctcggccgccgcgtccggtccccgcgtccagcctccggcctgacccgctcgccgccgccgccgccctccacggggccccggcccagccaacccagcagccccgcctgccgggggcatgtgagccgtcgccgcccccgagaggccgtgcgggctgcaggggccccggtgcctccgaggcagcgcgtgggcgaggggtgcgcccgggccccagggccccaggcagcccggcttgccatgggcatccagggcatggagctgtgcgccatggccgtggtggtgctgctgttcatcgccgtcctcaagcagttcggcatcctggagcccatatccatggaaggtaacgcgtggccacttgccccttcgccgcctccgccgcagaccagtggtctggagggagggaccagtacccgcacgccggggtgcactggtctggcgaggagcggcctgggccgccgccccctcccggctccggagggttgggcctgggactaaggagacgtagtcccaggaagccccagaggggacgaagccgcagcgcttgggctgggtgtgagtgaggcgcctggtgacaccttgagcggacagctcctgccatcctaggcctgcagtccgggcgcccctggtgagcacaccggcttgggtcgccctgtagcgggaggtggcgcagggtgcagatgacaggaaggaccctcagcccagggcacctggcagccggcggtggggagagatttgaggcctctgccctgtgatggggcctcccctttcgccccgcacctggtatccagttacccctccccaagcaaggttcaagcccatgggatcagtaaccaaacccgcaggcgccacatttctgtctcaataaaatattaactgaggagacagacccacacttggatcagacactgacggccccctggggcccttccatggtacacctggttctgaaggggaccctgaagccagggatgtagcttttcccctgttcaaagaggccctgcacctctggccgtggggaaggggctagctcgtcctgttctcgtccctgttgccctctccgaggacatgggcatcctgcctgccccagcactctgctgaccttgccgggctccaactctcagtactgagacccagaggcctgagaatgagagagagcgagcttgcccctgcctgggagctgcccagcagcccctcgggcatggggaagtgccccaagttcctgcgaagggctgctgag

SEQ ID NO: 894 - DNA, 6000 bp, Homo sapiens
tggtgaagcctcaggctgcttccactcatcgtggaaggtgaaggggagctagtgtgtgcagagatcacgtggcaaaagcacagaagaaagagagagaggacggaggtgctaggctttttttaacaatcagctgtcttgcaaactaatggatggagaactcactcattcccacgggaactgcattaagccattcatgaagaatctgccctattacccaaacatctcccattaggccccatcttcaacactgaggatcaaaattcaacatgaggtttgggggtcaaacaactgaactacagcagcattcaggattcaaagtgcttgaagtctatttgctcctaaataaaagtttatcagaagtatctcatttctatctctgtcttcaccacttcatcagctccctcctcaaatagttaaccatttccaaaaattcctggtttccttttcctattatcctttttataaaattaagcaaatatgaatatacacataaatgttttttttttttttttttttttttgagactgggtctcgctctgtctcccaggcccaagtgcagtggtgcagtatcgactcattgcaacctctacctcctgggttcaaatgattctcctgcctcagcctccccagtagctgggattacaggcatgtgccaccacgccaggctaattttttatatttttagtagagacagggtttcaccatgttggtcaggctggtcttgaactcctgacctcatgtgatccagcttccttggcctcccaaagtgttgggattacaggcatgagccactgcgcccggctgacataaatgtattttatttcaccttttattttacacaaaaggcagcgtgcttatatacattatttctatacaaaaaaactaagtagtagaatcattgttttaatttgatttcttttagacttttagtaatcaaagtttttttccatttttaggttataaagaaattatgccatgtgttctcctagtacttttagtttttactttttattctgatatacactgtgaagtatgtatccaattttatctatttccaaatggttatccagttgtccgaacaccatttatttaaagtccatcccagcagattgagataccgtctcgtctaagcatacactaatgtttatatgtactgggctctatttctgggcttgttctgaacttgctgtgctgctctcttgatctctttgtctatttatgtactaacaccacattgttttaaggtttagtagggctagctctcccttctgccttgtgctattcttgataaaaattttggagtcaagctgcctagcctcaaaaaataatttgttggatttttgacatcgtgttaaattttacatattgacttggagaaaattgatatctctatgatgttgagtcatactatccaaaaataaaggatgtttgtccatttgttctagtctacttttgtatcttcagaaaagtttttaaatttaactaatgcaggttttgcctacttctttgtttccaagagctttttcttttctgttgttattgtaattggagtccattttgtcttgtagtttgttattgtaaacacggatgaagactatttttgtgttaattttatatcctgctcctatactgaattatcatattgttagtatgaatttaagactcggttccgctgagttttccaggatgctatatcatccacaaatagaaatagtttattttttctaattcgtatatctctgatcttttctcataagctgtaattattttctccacagccaagaaggatggaaagatgaaagaagtccctgagggaggtgagaggatctggagcacaggtggaaagaataacaaaagaataattttgacaaaagcaagagggatggggctgggcgtggtggctcacgcctgtaatcccagcactttgggaggctgaggctggcagatcacgaggtcaggaaatcaagaccatcctggctaacacagtgaaaccctgcctctactaaaaatacaaaaaattagccgggcgtggtggcaggcgcctgtagtcccagctactcgggaggctgaggcaggagaatcatttgaacccgggaggcggagcttgcagtgagccgagactgcgccactgcactccagcctgggtgacagagcgagactctgtctcggaaaaaaaaaaaaaaaaaaaaaaaaagaaagccaatcactgggatgacaagtattcccaaggaagaagcctttaattgggtgctgcagccgaggagacaaggagacgagacaggagatcagtctcaaatccatctccccgactgactaaaactaggggtttatatagcagggaagaaatgtaacatggtgtaagaaaacaagaagagggaagggcaaggatgcatctggtgaggtcatctgttgagtttcagttctttgatactttttctgagaggcctgaaggtcctttcctaaggaagaaactcagattaaacagatacaagtttcaagctttaacagcagaagggtcaatgtctatgtttatccaaaaacaactgtctgtgggactattgggccagatttcataactactgtctttcccaataatctatattattgttaaaacaaaactttaagaatgcttttgttcttggctgggcgtggtagctcacacctgtaatcccagcactctggctcacgcctgtaatcccagcactttgggatgaggagctcaggagttcgagaccagcctgaccaaaatggcgaaaccctgtctctactaaaaatacaaaacttagcccggcgtggtggtgcatgcctgtaatcccacgtacttgggaggctgaggcaggagaatcacttgaacccaggagggggaggctgcagtgagctgagatcttgccattgcactccagggtggggaacaaagagagactctcaaaaaaacaaaacaaggccaggtgcggtggctcacacctttaatcccagcactttgggaggccaaggcaggtggatcacctgaggtcaggagttcgagaccagcctggctaacacagtgaaaccccgtctctactacaaatacaaaaaaaaaaaattagccaggcgtggtggcgcgcacctgtaatcccagctattcggaagctgaggcaggagaatcgcttgaacccaggaggtggaaattgcagtgagccgagatcacgccattgcactccagcttgggcaacaagagtgaaactccatctcaaaaaaaagaaagaaaaaagaaagctttcaggacaccaggccatttcctgggtctgttgtcttaggtctgtttggtaaatattctgtgactaagcatgcgtaaccttctgggaatacaacccagtaggtctcagcctccttttccccatcccctattcaggatggattggctttggttagaatgcctctgaccggatcatgtggggaagagcaactgtagaatagctgagtcctggaaaacaggcctcagggaacagcaaaggctggggatgaggaaaggacaaaacaccacctgctctgttgctgtgcaggactgagcaagaagcacaggatcaaactcaaagttagttccagtcctgattttggtggtaagacccaaggaaaattcattaacaaacattgtgctgccagatacattaataaatccctaaaagggcctgtaattcagttgaaatgagtgagaaaaatcttaaggatccttataaattaaataaaaactccttgctctcaagcaatcatttgattcactctatatcaacgactgtgcactttagcatcacctgaggatctttaagaaagtatctgtgctaggcctcatttccaaggatttaatttgtctggggatggagccccaggacattcctagtttttgagggcttccaggtgattctaatgcatagccacggttggaagccctgcgcctatctcacaggtgtgtgggtctctactctctgtgtccgcttagttgccaggaggcagcaagttagcccacgtgtgcaagatgcttccttccataccaggtaggaatattgctctcttaaacttggagtgtgcctgggcagaagctctggagcccaatacctgcattttacaagtcagattgctgctttttgctcagtgcctgtgtgcctgcatacatgggtctcctgatactcaggcacggcagatgactttcacctttgttttagtgttttgctcactgctgcatctgcagagcctagaatggtgcctggtacacagcaggctctcaatgtcttattaatgagttgccttttccaaggctgaagtgatcgtgggtgaattccagaagaccctgcatcatttttatttatttatttatttaagacggagtctcgctctgtaacccaggctggagtgcagtggagagatctcagctcactgcaagctccgcctcccccgttcaagcaattcttctgcctcagcctccagagtagctgggattacaggcaaccaccactacgcccggctaatttttttgtatttttagtagagacggggtttcaccatgttggccaggctgatctcgaactcctgacctcaagtgatccgcccgcctcggcctgggatcacaggcgtgtgccaccgcgcccggcctagaggcaattttctatttctgacttgttaggctagtcagagcgagacgtctttacaggtttgggccggcagctggaaaaggcacacggccccgggctcctcctccacccagccccacccctcctccgctgaagaccagccctaataaggcagccaccagaattagaaccaggtcaagtgcactccgagcaggacagtaggcagatcctatctggcgcatgcgaacgcttctgtgccagttccttgaagagcaggcgcagactcaaggctgttgcttccgcccttactccccgccgctcgtccctgggcggggcgaaggctgggctgggggaagaggcgtggcggcgctgtgcgcgtgcacaaaagagagctgaggggcgggggcgctgcggcacagctggtttgagcaactgaactggaaacaagatgcaggtgagctaggacgggtctcgggtctgggggctgcggcccgttcctttgtctcgttaggcccgggcgggcagtggacgcccgccctgggggaagctccggcgccgcaggcacgagggaggcccggcgcgtccaggccctgcgcaggcgcagtgcgggaggcgggcgtggtcccaccaggacccacggcctgggcgtccccgcctcggtgtgccgggtcccccaaacctcgtcctccgggactatgtcttctcgcggtctctacccacccgggcctgtgaaggtcttgccggatcccgcctaacaaaagttacctcctctcctgaactcccctaaggcacacctgggcagaggtgttaggaagcggagggtccggcctggggtcttccgcacgtaaagcagcgccacagccggtgttcctggctccactgagagccaggtgagggcttagttacaccctcttcccccgagccctgggatccgcttggggcgtgttccctatctgaccgctcgggttccagagctccccgcgagggtccctctgtttcgtccttttttttttttttattaaaataggtaaaataaattatttttctgtagctgcaatttactagcggaatttggttaaagcctaaggagaatgaatgaaaacaccatggaaatgggcactattgtgggtgaaaacctatgccaactaaattttgtcactgtccaaagatcccgcagtggtcagaaattctaatctctgcttagtggcagatggagaggagagggtgcgggttttgctggggagggaggcattaggggctggaggggagggcgtgtctgccaggagccagacactgttttttttttttttgagaccgggtcttgctctgttgcccaggctggagtgcagtggctctgtcacagctcactgcaacctcgacctcccggggctaagcc

SEQ ID NO: 895 - DNA, 6000 bp, Homo sapiens
cctgggcaaatgggaagtgctgtggtctgggtgtctgtgtctcccctgaaattcatatattgaaatcctaagctcctaggtgatggtatttggaggtggggtctttgggaggtgattaggtcatggaggctagagatggagcctcatgaatgggattagtgcccttgtaaatgacaccccagacagcggcctcaccccatctgccatgggagatgaccagacactgggtctgctgggcaccttgatctcggacttcccagcctccagaactgggagaaacaaatgtctgttgttgaggcctcccagcctacaatatttttgttatagcagcccaagctaaggcaggtagccaaaggaaagccaggcttttgtttaatcagtagcagggggtcagtgttcaaagtttagttaaataactaaatgcagaatctcattctccaatagggtacaatcaacgcaaagcccagctctttcctctgcctttgacctggagctgtcccatctgaatttatgctgggggaggacagatcacccaagcttgacaatggttcacatagcatttcatctcccggtatctaggtgacaccctaaaggccctccctctgtgcaaatactcccccagacttagtctctccctttcctcattttgctaaggatagtggcccattttacttctaaaacaagtttccatcattttcaaatcatgatatacttggaatagaatccatacccttttgtccagcccccacgtggaatgtggtctctaccacccttcctgggctgggctcagctgcctcccaggccagctccctgctttgtggccacagtttcctgtcagtttcctcagcacacctggctctgggccccacaggacctttgtacaagacctttggtccatctgaaacaccttctgcccaactctgcaggactgccttcttccttcgcaagtcttggtcaactttccttctcaacaaccaaagcaccgcccctcacacccccttacccccacatcagcttgctggtgtccgccgtatcacccaattccattctcatattttaggcacatttgcaagcctaggaaggtgtggttcctaagagagactttaaatcacaaatatttatattcctgttttttctgcctatggaactgtgaccacatgagtagcgggtgctctgagatgatactttaaaaactagctggccagtgctgaggagggcagagccctgtgaggttaccactgacagagctggggacaaacgcattttaggaaagcaaagaagccaggccaggtcagtcctgggagccactgtgccacgaggcaggggcaacgttcttccagaaaacagtcccagttgtgggacaaatttgaagctgcaaactctacactatagacagaactgtgatcattttattctgaataacttagtgggtgtcaccatgagcataaaaacatttcatcaaatatacacacactgtgttaggatttgagcaatgtcatttcctggaaggttttctgagatagacttcacctgcaggtaaccagaagtttacttgctgtggtgagttgttaggtgaaaccaattatatgtcagggcccagctgccagacaggagcatcttgcttttggagtgtttgattcccctgccactttttgagacagtaattagtagcaggaaactgtcaccagccaactgataatcccctcacatacaaacacaaataatccaggcatcctgtgcacccttgcttatcacggccaagaagtacttttcatctccatttcataacttgattactctatgcctccccaaacagagcataagcttcttgaggccagcgattttgactgttgttctcattgtgatctacccagcaactggaacagtaccggcacgtagaagacgtgacgtgcatttgctgcatgaataaacacatgaacatgatggcataggagaatgctactttgatggggtacatgggtatcaaggattttctttctgctcacacaacatgagatttgtaattaagacacagatttaaggtgagtccggtggctcacacctgtagtcccagcactttgggaggctgaggcaggaggatcacttgaagtcaggagttcgagaccagcctggccaacatggtgaaactctgtctctactaaaaatacaaaaattagatgggagcagtggcacatgtctgtaatcccagctcctcgggaggctgagaatcgcttaaacctgggaggcagaggttccagtgggccaagatcacgctactgcactccagtctgggcgagagagcaagactctgtctcaccaaaaaaataaaagacacaaatttaaaatcacgatgaccagaatatggctctgtttcactcactggaaattatctgatctgcaagataattcttaccaacccctgagtgttttttacagggatgggagtccattgactctctaaaatcacttgcgaagttttgttgctgcggagctgagagctggggccagcctgcctgttgtgcccctccataagactcctggccatgcatttgagcacacctcatgaagggggcaggtggctggccgggctgttatgtgtagcaagcatgtgttctaaattacaattcatttgttctaaattacattcatcatttctaaatttgttctaaatttagaacacagccccaggagacccccttcacccaaccatgttctgcagtcttgattcattttcttacttaaaaaatgctattgataacctgttgctatttctgcctcagtctcttaggaaatgtataaaacagaaaatcacatatcttcaaagctctggagctttacatgatgaagataagcaatgatttctcatttcattctttctcttaatcaactgaattaattatatactcattttcatttggatatgatgactaggcagacttcaagtataaccatccataaccttgcttaatgccatgatgtttggatttttttcaaagagaggaaaaaactcccttggcttctattacagcatccatattttgtgccattttaattttttcttgtgtcttttttctctctctttgggaaatatcagtatcattccttttggtaaattttaaatcaccacttaatttccaatagaaaaaatgttttagttacacctaaaataatcccaaacctcaaacacactgtgagcacaccagaaagtaaaaattatatggagtagaacagattagcccagaatacctcccattcattttcccaggttcctaatttaataatttcagtgactttaatttatcacagaccctcagtctgaactcggcatgagcagggtagacaaccaaacctgaaaattcaagttaaaattcttgtttgggagcttatattatctagattaatcatccacaaggatcaagtcagctaagtaactctggttcagcttaatctctgtggaggcagaattagtcctttacagtctaggtccttgccccagccccatacatttctgtctgcttttttcttttcttttcttttctgttttgagacagattctcgctctgttgcccaggctggagtgcagtggcacaatctcggctcactgcaacttccatctcctgggttcgaacaattctcctgctttagcctccacacatgccaccaccggctaatttttgtatatttttttttttttttttttttgagacggagtctcgctctgtcacccaggccggactgcggactgcagtggcgcaatctcggctcactgcaagctccgcttcccgggttcacgccattctcctgcctcagcctcccgagtagctgggactacaggcgcccgccaccacgcccggctaattttttgtatttttagtagagacggggtttcaccttgttagccaggatggtctcgatctcctgacctcatgatccacccgcctcggcctcccaaagtgctgggattacaggcgtgagccaccgcgcccggcctaatttttgtatttttagtagggacggagtttcaccatgttggccaggctgatcccaaactcctgacctcaagtgatctgcccgcctcagcctccaaagtgctggggttacaggtgtgagccacggagcccagactgtttctttcttaagctcttactttctcatgtgtgagttaccttgtaggtttccaaggcagaggggacaagatggaaaaggagaacacagaaatctagcctggaggagctgctctgttcctgtatttatctgtgtaggtgtgaatgagggagaaaatgacaagagaatgacattattttaaggctgttttcccccccccaatcatttactttttgagaaataattgcccaatactgaaaggtatgtcctttcaaaatgttgatgtttcaaatggcttcctaattacctagttatacggggggtgtgtatggttatctgaagttacatgggtatacactggtggtgtgaggtgtccagagagaggaaaggaagagcagtcctggtggctcaaaccctgagggatgtgcgggggatgggtgagaatgtgaacagacatgttggaagctgaatccgtgcagtggcacccatgcctgtagccatctcagtggggggtccttctacgaacaagctttgattaatgatattttaatgctagtttagctttttagcactcccacgcctaaaggctctgatagaagcaaggcccccacccctgcaaaaaaaaaaatccatgatttttacgcattccaacagatctcttaaggggcagacggccggagagccaggtgtgccagggacctatggcagcagggctgaacgtgcccgctccagcctctccagtgctgggagagacctctagatggtgcaggtgagtttgcaatgagggaaagcccctcggcaaggactgagtttccaaacttgcagacagggcagggagcggtcaaggaagagttcccgggaagccctttaaacggaaaggaagcggggctagtgtcagagaggtgtgccaggtcccaggcagccctgctggcccctaaggacatagagtacctgcttctgagagggctgccacggtggccacctgtgaagcctgtcacccagaactggatggtacctgactttcttcatagacccatcttctgctgggactgaagctgacctccaacagaagccaggtaagccctggtcctttcctctggttttctaaactcttcagctgtggccgagacggaggtgtcatgggctgggagagaggctgggtgcatttttgaaatgcatgtcatttttgggttgcgtttgaacaagctttaccgattgcagtatgtctgcgctaccagttctaagacctgagattgttcctttgttttagaaaaacatcagaaaccctgttttgctgttggttgcacatttggttagggagacaaattctgtgtgtgcttcacaggctttaagatttgggctactgaagcaacgggttcctccagggagcgtgaaaagtatgtttctcaggtttgcccctgtgcccggctcactggggaaggcaggcgcggcagggactctagctgggctctgtacctgcctccaactctgcgtacccgctgtgacctaagagaccttccaagtggggtttccagtcgtgtctgagaccccccatatcctggcctctgtgttggtggcgggggagcggggagagggagagaaggaggggagtgggtacctatttgtgatgattgaggttttcatttccagccaagaggttcctctcaacactctgacagaccgtggggtgggttgggctcctagacaggagtcggctctgattcagtcggctctgattcccagcctcctgcagcagccaagctttgagatgtcagctcagggagaagcgggtggctgggcagggaggtcagcaggcgaggttcccactgggtttccctgcccatgttgtgctgggtcagcaacaagagggacagttaaaatcaacaagcagggcag

SEQ ID NO: 896 - DNA, 6000 bp, Homo sapiens
tacctctggccctacgttctgtttttggcaccagatagataaaacccatactctattttacactcattcaaatcattgtatttcccccaccggtgaatatattaccaaagttggttgagtttcataatgcaaacccaaagggaaaattatcttgaataatcatatgacaatatgtggaaagtttaggggctgtgtacgccacctcatggttttgaactgtgtggttaaagacgttgagagttgacagattagtcagggatttttcaagagtattaattacaaactttgaaatcttggtcagtgaaagttcattttagtgcatcttgcaaatacgatcaaaggtcttttcagtactgatttgatgatgcttaaccacagtgtgtgaagaatgaagtttttcattagaaattactggtgtaatagagcacattttcagggaagatgtattgttggactattacaattcatgctcttcccccaccatatccctaccctctatattccccatcccctatttcctccaccttcctccttgggacctcactgaaaacctgaaatgctctgaaaacctgaaatggcgttttggactgctgcaagggaaactgtgatcttaacaacatcagtgcggctcagacatgaccaccatgtgagggcaaaggtggggctggtgtaagtgatgttgttaaacctgtaaaaataaaccatgaaaacctggggatttactgtgatttggggagtgaaacaaatttaccactggccgaaaacttgaaaaatggagtacaatgtgtagatcagaagaaaagaaagccgtccctctgcccttgtgtagttttagaaaaacaatcttattagtttggtagctttttttcctgaaaataaaaaaaaaaatacattggcacctaagccatggaaaatgaaataaaaatacaccagtgcagcttccaaaacactgacttgcatctccctctcctatccgccgggaatgtcttatccctgccttccagtggctgccagaaccaagggcatccgcggcgttccttggcattggcgttaacagcagatggattttccgcagcggccaggcggaagatgcctagcattggtccgccgtctcactgtactgaatttcaagaatcatggcctactgccagccaggtcaggaccgaaggcgctagtctggggagactggagcaggtctctagtggttcacctgttcggaggctcttcctgttcagttccctctgcgcgccagagggtggcaccccaggcactccagaggtggagaggaggggacgacaggggaggcaaagagagaggagcggagggaaggaccagggaggaaggaccaaggagggagctttaataaattctcagaccttggtctcgagttcccggctaatttgggggcaaagccgaccgaccccacgtccacgcccacccccttacgggaaaagccggggtttccactgggctaggtgtcagagttgggaatgtctaaaacaaaaaaggcttccgagggttattcatggccaacagtttccacaggagaatccaaagggaaactagtttccggggccgctgtgtgtgcgggtgcttggtgggctgaaagctgctgtcactagatggctgtaagtgtgccaacatctgacctgtcccattgtgttgtgttttgcagttgctggatttgtgcgactcggtgaaggatgatgcccggagggtgatctcgacctttaacattccacacacctacctccacgcaccaatcgccggaatctccaacccgcgggccgcgtgggctttctaccctgcaccgctgcagccgcggccacgggaagaggcgcgctcccggcggcccaagctgggagccaagctctaacgggtgtggcgggaagtgtggtggcccgccagcagctgccacgacgctcgctccaccgacgcccagagctgtggccgaggccgggggctggcacccgctgggccgccactctcggggattttggtggcaaagcggaggtcccgccgaggctggcgaggtgcgcggctggctgctaggaaagagatccagacggtcgcctggtgcgctggatccctgtgccctttccctgaaacccagcctggcctgactgcaacctctcccaacttcagtgccggatcccctagacaatcagggtgggctccccgctgcgagcgcgccccacagccgggtgccgccaaaggtctcctgctgttagcggtgactcacattcccagtgatttagaaaaactgtggtgccgagtgaaagaaaaaaaaaaaagcaaacacccttagacaaaagaaaaaagctccactctttccgcgagcgggaaaaaaggtttggttcagcaagtgatgctatttcagtgaatcagacgctctggggctctgcaaggaaacgcacggactgggagaaggaagtgggagcctagagttttgctctcggcaaaacaagaactcggcttgtcctcccaggccggcggtttccgtacggcaagacaaggcgcggaaaacatttttaccatctgacgctgtagtctgtcctttagaagagaataggtgaaaagtttaataaagaaattaagcgatgtggaagtcgttcccgctgcttgcagagggtggggaggcgggcctgggcaatttcggaactaggagagaccacgtcggcaaagcctgtggtcccgaacaagggccatggatttcccatttctcagatcccggctgcccgacttcattcttgtttctttcagcacaagccatcctcccttctccctccctccacgtctcttggcagagacagaaagggacaccgctctgcccgcgtccagcgcgaaggaggtgacctaaaacccatgggcccttctcacactgcgttctctgcgctccggcccagttccgggaggacctcccgacggcgcgggagaaggctgtaagggctcttggcccccgacgcggcctgggtctcgggggacgcatgaacccgccacctctggccggcttccttttagtgccccaaatagcagcgcttagcccgttgcttcccccgactcttgtttttcaaagtgttcacagggtcgcgagagcgagcgacgcgggggcggcgaggctgcaaggctgcacaggaacagacgacaagaaatagggctttcttctgcgtggttcttttccggtccctgtctgagtcgcccgaccccgcggggagcgcggagcattgcggcgtgcggcgggcttcgggctctcagcccgcgcagcaagttgtgttgcttttccccgggtgcgacgcgggacggccgcgaagagcaaagttcgtccgcggtaggaacttcgaggcccggttaggaccgatctccggcctccgagtctacttagccgtgtccacgctcgtgccttttccctcttgcagcgaaataactgggcggggcccgacgcgcgtcctccagcgactccgggaacccaaggcctccttcacctcgctcaaaattcacccgaaaatgcgctgagactttggcatggggctgcgctgtgtcccactgacgttacagaagcgcttatgaatttaaaaactgctccaggcggccggacggcgggacaacgcctcctcacttgctcctctacggcaaggccccttccttctccctgccggctgcggtggtgtgtagggtggtccctttacagagtttccttaatccatctagcctgacctcacctgcgggatgttccatttcccgatccacctcccacacccccgctgcagttgtctagaagctggggctggggaactgaggcgcgggaggagcagacaggagggccggggttggggcgccagccacgcgttgggagagcagacccgggtgcagactcagaggactggagaggcggcatggagtttggtctcctgggaggtagagtgaggtgctgcggactccagggaggaaagggatgggtggggaggcgggaggggaggagggacggggtattttgcgctcccgcaccgcggcccgaactcagctgttctgccttcactggcctcagccagtcgagggagctcctacgaggttatctgcgagcccagcaaatcttgggggtcctagccaaatgcagtgcgcaacgttctctctcacttggaggccgccattcacctcgtttttttttttcctaaaaggatttttttttctgagtgcttttttcatttccctattttacctgctttgcacatgcctcccgccctcacccgggaggcggcgaagacgcccactgggaccgcgcctggccgttttctgggcgcgtcctgcccccacggcctctgtctcttagggcgactgggcgcggaagaaaagctggagagcccctgcggggtggcaggaggagggtgcctgagtcccgcgagaggcccgggcgaggaagatgcgcagcctgctgatccgcgtcccgcccggcgccagggaccctcagagggaggagagctcaaagacctcgccccgcgccttcgcgaggaccaacccagtccccgcgcctgccccagagcggcttagaaactcagggcacagtgagagcgcagggcgcctcccgaggcttcacaccgccggccgggccagcggaggctgtgaccggagcgccccctctgtgccgcgcacgccgcggccgccgccgggttggggtaggtgagcgggaggctagggtacacttcggggtgggggatgggcgcgcacatggccgccagcaggcagagttactccggtaaacacgccagggacggcggcgcgcgcgggaggcaacccagcggggcaacccccgcctttacctgtccgagcctgcacgcgccggcggccgcggcgccgaggggggcggagcttgccagcccgcgcgccggggcgggacctagcgggggcggggtccgcagtgattgggcgtaggagcggggccgccagccagagctgggctgcagggccgcgcaggtttcacttcgctccgcgcagccgcctggtctgcagtttgttggagctctgcgtccagcgccgctgccgctgccgccgccgccgccgccgccgccgccgccgccgccgccgccactaccaccacttgattcttgcagccaccctgcgaaccctgccacactgcgatcgcatcatcgcggtattcggttcgctgcgttcccgccgccaccgcctcggcgccctttcttggcccttgttcccccaaatgtctgactctgactctcggactgagaaacgcaaggtaaatacctccaaatcccggggcgcgggcctggcaccgaaggaagactagcgctggagcccgaacggcaccacctactgcccgcttcccgtgcacgtgcgagcggagacgcttgcatcggcgccgcttgtcgccggcgggaggtggggatccgtgtggatcgggttccctctcgggcaggttctctttaaagaaaagtcgttcacgcggaacctgcaggctcttggccgaagtgcggcttgggacgggatgctgcgcgcgggcctggtgaagggtcgtaggtccgggcaggaggagaggcagcgcgtgcctttcggcgccggcccgggagctgaggacctgctcgtagtatcgggctgtgcgcccagctggaaagtctcgccgccggctccggcgccctcagagtagcggccgcgcagtgtgagggtgtttcgtgtcttggttttttggggcgcgtgggcctgttgcggaggatttgcggaactgcggtggtgatttaactgacgagacacggcttttccttttactcattcaggccaaggtttcggggccactgctgcgttcgctttctcaagcgtacctggggcccctgcttgctctgcaggagtcctgcggcctgtgccatccgcacgattccctggcagcgagaaatctaggtcctcccctgaccacctggaccgcgcaggggactagtcgcggccggcagaacctgctcggtccctgggccgggctatcttagcggctcacgcatg

SEQ ID NO: 897 - DNA, 6000 bp, Homo sapiens
aaaaaaaaaaaaaaaaaaagaaagccattaactcccatctgtgaattccaatgtgccagggaacaagtataaaatttaagacatttactaacatgacactagggagcattcctccatatcctgacttttctcaactcttatttccaattgtactgactacactttagtgtactgactacactttaatttccattaaaaacacatatggcataaaacactcatccaaaaaggcactcagtaaaccaacacatgtgagtgattttgataaaaataatcagttattcactaaggtatcatttgtcaagttaatcctcccagagtgtaaggagactaaaattgaggaaaagtgaaaaaactgtatctgttgccccacagagaaatatattccttgaacttgtcttcagaaaaatcagagacataaaaggaaaatatgaaaacagtgttaatacaaacactcaactactatacattcctcctaagacttgactttctcattagaacaaagttttgcaaaacaaaacttcaagacacactgatctctaccccaagttgctgagcaaaaaactgctttgcagctaaaggagcccctggctaaggcgaacctctttataacctcacatttgtgttccactagttcaaaccaatcataatgacttctttgtggaaaatgtattttgcaataaattatcaaaagcttcattgaagaacttcatggatagggttgagtaaagaatactaaacaaagtcaagagaaccacttatcaactcagcattatttcagtggtcttcaggcatgaactaagactgtagaatgtccagagaaaattatggactacataaattgtaaattttatgcttcaatttaagaaactcacatctggctaagtcctttcctcccccaaccccaactcatcctctcccaaaacaaatctcccaaaaacttaacactgaaaacttacctcggtacattaactttaaacaaactcctcgtaacttctcatttaatcctatgcattaaactcttcatcacaccatctactgaaatgcagctaatactataaaattacacctcaggatccactactttacttcacaggtataaccattagctgtgcataattatttagattatgatctttgaagccctgtatatttcatctcaagtaacagtgcttaacttataattagcttgtaaaatagtatttatcaacaaaaaaagcatttgtgcctgtctttacattaaaaaatacactatctcacccactattcccagttccagggaaggagaaactatttccatgcattaacccatcacctacagagaccaatgtatgcattttgcttgaaagggaactggttagagaaaatagcttaataaccacaagtgtgaagcttttgttgtgaaagtgtgaaaagctaataccttccagagggtctttaatgcacgtgtgtttcacgatacacaccataaagccctgttaactcatttagtaagcaaggatgttatagtaagcgagaatgatcatatatatgggggagcattttcatgagtacaacaaaaactacaagccaagaacttctaaggctgaaatgagttcacgagcagtagtaacagcaataataaaacttccagcccctttccctaaggagggaccctaaaaaattacctcctggcatttggcaagagacgtgcagccagcatgtgtagctgctgggatgtctgtcatttctccccaccacctcacaggtgtgcccaacctctgacaagtgaccaccactctgaggttctttccaattctataacatgggcaaaggcctgcctgatttacctcactgaagcctatgaagacagagctggatggtatttagaaatgtcattttgttccagtgtctgttctgatgggtttgttgagttagccttcatcatgaggtacaatctaaattataatagactctgtactgggtttcctaattgataactctaccaacttacttctatcttgttcatgtatggcaagctaatctggacaaatggtcaatgtgattgactactgatcaagacatgaaccttttccattggtggggaacagcaagtcgatcaacacagactcagcccctcaccaaggttacccaaagtatgtacccaaagtcacatgctgtaggttcaagggccaaatcaagtctgcagatgtttcttttcagcttgtacaatgttttcaaaatctgaatcagctgtcaatgttgaaacagggtatctggcatcaattttgcattcctaggttatcttgcaatataggaaaacccaccctgagaccacatgccctcacagccacaattaggtgtggcccaaacatagaaggggcaaatactctccaatttaccagtctccaccaggtcagttccttccatgattttgctgtgggcctctgtggtatttatgttagccactcttggttcaaaccctactactgcctttaatccctgaaataaaaacctacaacctaatctgattagtactatgtccaaaccctctgagcaataagcacaaagaggaatttaggcagaaaacaaaccattttcatggttctatgttggtactgctttcatgaactagttcatttttttaaaagtgttattttcaaaaatgattgtcatctttctttacacttttgattattaagctattttctgtaaatgatcagttccctttcaagcaaaatgtcattactatgtaaagcctggtggttaaaacacactttagcttaatgaagacagacctgaaagctaatgtttggacctcaactcatcactgccacaaaagttagtaactttgtaaaaatgttgatgtgggccatgcgcggtggctcacgcctgtaatcccagcactttgggaggctgagacaggcagattacaaggtcaggagattgagaccatcctggctaacacggtgaaaccccatctctaccaaaaatagaaaaaattagctgggcgtggtggcacgcgcctgtagtcccagctactctggaggctgaggtaggagaattgcttgaacccgggaggtggagcttgcggtgagctgagattgcaccactgcactccagcctgggcgacagagcaagactcatctcaaaaaaaaaaaaaaaagttggtttgatagtttgacacatcctccattcccatctaaagatggaataaatcagttacggggttttaaaaggggattttaaatgccacacacagccttcaagcagattcaaccatccacacgtcaactgcctcttacccaggcattgcttacccattgcactgagatagtggttgaaggcctggcaaggaggacttggggtttgtgttgatttgtcacaactcatgggtgctgggctcctgtctgtgtcaaaagagaaatacccactggaggatcgagacagcagggaggatcttctcataaagatgaaaagcggggatctggtagcaaaagggccagggctggcaggtggggccagcgggccctgagggctgccgtgggggcagctgtccccttcacctccgtgattgccttcaggattaccttgtggctctgtctgtagggaggtaggggccccaggtctgagctggggaggcctctccgcaggctgcaattgtctaccttctcggtcacactcagaacttacatcagaaggttgctttgccatttggtctttttttctgcaagtaaaataaaaactaagattattttaagcaaaaaaaaaaatcgatgaataaacaaattagctctcacctagcgattaaaaattcttagggttaatcccaaatactttgttctatacttttctgacaatctcccaaataaaaaaattgcacctaaaataataaaggtgtaatttttttttggtagagggtacccccaaacaaaatacagtaacaatgtcaacagcttgcggaactggtgcacacacacatgcgtttccagagaagcagctaatctgaagtctattcgtgtgtgctctttgcccaggacagacttcttcgagtaagtcagaaactcccagcggctctgacttcccggggttaggtaggacgccggagcacaggagcgggcgcagatgcagcgattgcaggcggctggccgcgttccctgctccggccccattgtttgccgaaaatgctgagggcagcaagtctggggaaggtctggcagcggccgtcagtcgtagtaagtgcgtcacaatagagtttgtaactccagcgcggctcggcccggctctggcgctctctccgcccgtgctccctccctcccgctcccgtaccgcacgccgcaccgaatcagacagaacttctctgaggtgcacaccgtgaggtgcacatctctaaatggggagggggcggcggagggcgacgaagcgaacgcctgcaaggtctacaactaggtccgcaggctaggcgacaccggtgcgcgccgcgccgccttcatcccacagaccctcccctcagaaggcaatcacaccgaaactcacgtccgcgccttcccttcagagcgcagcgtccgggccagggaccaagccccgcggcgtccggcccgcgcccttcgccgaccgggcgccccctgaccgtcaccacgaaagcagcgcaggagacaaagcccgggactcgggttcagagtccccggcgcagcgcaaagcccgcgccttcccgccagcccgccgccgcgctccgccgggcagccgagggctccgcacgccgcgcctctggcccgcgctgccccggccgcagccgccgggaacatcctccgcctcctcccgctcctcccctcgcgctctgcgcccgccgccgccggcaccgccgacctccccgcgccgctggcgccgggtgcccgcgttcccaattggtccgcgcgcggtcgctccgcgccgcagccaatcggcagccgcggtgggggcggcgcctacgggtcaggccgccaaaggcgaggcgattgttgacaaactcgcctccgagcgctgctctggccgtggtcgtggcggctgccgcttcgtcggaggatttgagggccggctggcccggccaccctgcccatccctgtgctccttccggacacaagccttagcagctcccgccgtcctggacagccagtcacctggagacaaagcaggacttgcgccgcgcccggacccgcagggccatccccaggcccagtcctcgccacttgtccttgttttggcccgtcgggggcagaccctaacggccgtcaccgccctggctgtggcaactattctcctccaacaacttcctctctctcctggtgcgccgcagacacgagtcaaagccgaagagccacccctggccgcggacgcgcacgtccgcgaccatcgagtaaattcacaccctccgccctggcgtccgtcgggccctccaccagcagcgccaaccctggggcaacaggtcccagagggcacggcgccgccagcctgcaccgcgaaccgggtcgggtgtgctcgggcatgcgtgagccgctaagatagcccggcccagggaccgagcaggttctgccggccgcgactagtcccctgcgcggtccaggtggtcaggggaggacctagatttctcgctgccagggaatcgtgcggatggcacaggccgcaggactcctgcagagcaagcaggggccccaggtacgcttgagaaagcgaacgcagcagtggccccgaaaccttggcctgaatgagtaaaaggaaaagccgtgtctcgtcagttaaatcaccaccgcagttccgcaaatcctccgcaacaggcccacgcgccccaaaaaaccaagacacgaaacaccctcacactgcgcggccgctactctgagggcgccggagccggcggcgagactttccagctgggcgcacagcccgatactacgagcaggtcctcagctcccgggccggcgccgaaaggcacgcgctgcctctcctcctgcccggacctacgacccttcaccaggcccgcgcgcagca

SEQ ID NO: 898 - DNA, 6000 bp, Homo sapiens
acctccacgcaccaatcgccggaatctccaacccgcgggccgcgtgggctttctaccctgcaccgctgcagccgcggccacgggaagaggcgcgctcccggcggcccaagctgggagccaagctctaacgggtgtggcgggaagtgtggtggcccgccagcagctgccacgacgctcgctccaccgacgcccagagctgtggccgaggccgggggctggcacccgctgggccgccactctcggggattttggtggcaaagcggaggtcccgccgaggctggcgaggtgcgcggctggctgctaggaaagagatccagacggtcgcctggtgcgctggatccctgtgccctttccctgaaacccagcctggcctgactgcaacctctcccaacttcagtgccggatcccctagacaatcagggtgggctccccgctgcgagcgcgccccacagccgggtgccgccaaaggtctcctgctgttagcggtgactcacattcccagtgatttagaaaaactgtggtgccgagtgaaagaaaaaaaaaaaagcaaacacccttagacaaaagaaaaaagctccactctttccgcgagcgggaaaaaaggtttggttcagcaagtgatgctatttcagtgaatcagacgctctggggctctgcaaggaaacgcacggactgggagaaggaagtgggagcctagagttttgctctcggcaaaacaagaactcggcttgtcctcccaggccggcggtttccgtacggcaagacaaggcgcggaaaacatttttaccatctgacgctgtagtctgtcctttagaagagaataggtgaaaagtttaataaagaaattaagcgatgtggaagtcgttcccgctgcttgcagagggtggggaggcgggcctgggcaatttcggaactaggagagaccacgtcggcaaagcctgtggtcccgaacaagggccatggatttcccatttctcagatcccggctgcccgacttcattcttgtttctttcagcacaagccatcctcccttctccctccctccacgtctcttggcagagacagaaagggacaccgctctgcccgcgtccagcgcgaaggaggtgacctaaaacccatgggcccttctcacactgcgttctctgcgctccggcccagttccgggaggacctcccgacggcgcgggagaaggctgtaagggctcttggcccccgacgcggcctgggtctcgggggacgcatgaacccgccacctctggccggcttccttttagtgccccaaatagcagcgcttagcccgttgcttcccccgactcttgtttttcaaagtgttcacagggtcgcgagagcgagcgacgcgggggcggcgaggctgcaaggctgcacaggaacagacgacaagaaatagggctttcttctgcgtggttcttttccggtccctgtctgagtcgcccgaccccgcggggagcgcggagcattgcggcgtgcggcgggcttcgggctctcagcccgcgcagcaagttgtgttgcttttccccgggtgcgacgcgggacggccgcgaagagcaaagttcgtccgcggtaggaacttcgaggcccggttaggaccgatctccggcctccgagtctacttagccgtgtccacgctcgtgccttttccctcttgcagcgaaataactgggcggggcccgacgcgcgtcctccagcgactccgggaacccaaggcctccttcacctcgctcaaaattcacccgaaaatgcgctgagactttggcatggggctgcgctgtgtcccactgacgttacagaagcgcttatgaatttaaaaactgctccaggcggccggacggcgggacaacgcctcctcacttgctcctctacggcaaggccccttccttctccctgccggctgcggtggtgtgtagggtggtccctttacagagtttccttaatccatctagcctgacctcacctgcgggatgttccatttcccgatccacctcccacacccccgctgcagttgtctagaagctggggctggggaactgaggcgcgggaggagcagacaggagggccggggttggggcgccagccacgcgttgggagagcagacccgggtgcagactcagaggactggagaggcggcatggagtttggtctcctgggaggtagagtgaggtgctgcggactccagggaggaaagggatgggtggggaggcgggaggggaggagggacggggtattttgcgctcccgcaccgcggcccgaactcagctgttctgccttcactggcctcagccagtcgagggagctcctacgaggttatctgcgagcccagcaaatcttgggggtcctagccaaatgcagtgcgcaacgttctctctcacttggaggccgccattcacctcgtttttttttttcctaaaaggatttttttttctgagtgcttttttcatttccctattttacctgctttgcacatgcctcccgccctcacccgggaggcggcgaagacgcccactgggaccgcgcctggccgttttctgggcgcgtcctgcccccacggcctctgtctcttagggcgactgggcgcggaagaaaagctggagagcccctgcggggtggcaggaggagggtgcctgagtcccgcgagaggcccgggcgaggaagatgcgcagcctgctgatccgcgtcccgcccggcgccagggaccctcagagggaggagagctcaaagacctcgccccgcgccttcgcgaggaccaacccagtccccgcgcctgccccagagcggcttagaaactcagggcacagtgagagcgcagggcgcctcccgaggcttcacaccgccggccgggccagcggaggctgtgaccggagcgccccctctgtgccgcgcacgccgcggccgccgccgggttggggtaggtgagcgggaggctagggtacacttcggggtgggggatgggcgcgcacatggccgccagcaggcagagttactccggtaaacacgccagggacggcggcgcgcgcgggaggcaacccagcggggcaacccccgcctttacctgtccgagcctgcacgcgccggcggccgcggcgccgaggggggcggagcttgccagcccgcgcgccggggcgggacctagcgggggcggggtccgcagtgattgggcgtaggagcggggccgccagccagagctgggctgcagggccgcgcaggtttcacttcgctccgcgcagccgcctggtctgcagtttgttggagctctgcgtccagcgccgctgccgctgccgccgccgccgccgccgccgccgccgccgccgccgccgccactaccaccacttgattcttgcagccaccctgcgaaccctgccacactgcgatcgcatcatcgcggtattcggttcgctgcgttcccgccgccaccgcctcggcgccctttcttggcccttgttcccccaaatgtctgactctgactctcggactgagaaacgcaaggtaaatacctccaaatcccggggcgcgggcctggcaccgaaggaagactagcgctggagcccgaacggcaccacctactgcccgcttcccgtgcacgtgcgagcggagacgcttgcatcggcgccgcttgtcgccggcgggaggtggggatccgtgtggatcgggttccctctcgggcaggttctctttaaagaaaagtcgttcacgcggaacctgcaggctcttggccgaagtgcggcttgggacgggatgctgcgcgcgggcctggtgaagggtcgtaggtccgggcaggaggagaggcagcgcgtgcctttcggcgccggcccgggagctgaggacctgctcgtagtatcgggctgtgcgcccagctggaaagtctcgccgccggctccggcgccctcagagtagcggccgcgcagtgtgagggtgtttcgtgtcttggttttttggggcgcgtgggcctgttgcggaggatttgcggaactgcggtggtgatttaactgacgagacacggcttttccttttactcattcaggccaaggtttcggggccactgctgcgttcgctttctcaagcgtacctggggcccctgcttgctctgcaggagtcctgcggcctgtgccatccgcacgattccctggcagcgagaaatctaggtcctcccctgaccacctggaccgcgcaggggactagtcgcggccggcagaacctgctcggtccctgggccgggctatcttagcggctcacgcatgcccgagcacacccgacccggttcgcggtgcaggctggcggcgccgtgccctctgggacctgttgccccagggttggcgctgctggtggagggcccgacggacgccagggcggagggtgtgaatttactcgatggtcgcggacgtgcgcgtccgcggccaggggtggctcttcggctttgactcgtgtctgcggcgcaccaggagagagaggaagttgttggaggagaatagttgccacagccagggcggtgacggccgttagggtctgcccccgacgggccaaaacaaggacaagtggcgaggactgggcctggggatggccctgcgggtccgggcgcggcgcaagtcctgctttgtctccaggtgactggctgtccaggacggcgggagctgctaaggcttgtgtccggaaggagcacagggatgggcagggtggccgggccagccggccctcaaatcctccgacgaagcggcagccgccacgaccacggccagagcagcgctcggaggcgagtttgtcaacaatcgcctcgcctttggcggcctgacccgtaggcgccgcccccaccgcggctgccgattggctgcggcgcggagcgaccgcgcgcggaccaattgggaacgcgggcacccggcgccagcggcgcggggaggtcggcggtgccggcggcggcgggcgcagagcgcgaggggaggagcgggaggaggcggaggatgttcccggcggctgcggccggggcagcgcgggccagaggcgcggcgtgcggagccctcggctgcccggcggagcgcggcggcgggctggcgggaaggcgcgggctttgcgctgcgccggggactctgaacccgagtcccgggctttgtctcctgcgctgctttcgtggtgacggtcagggggcgcccggtcggcgaagggcgcgggccggacgccgcggggcttggtccctggcccggacgctgcgctctgaagggaaggcgcggacgtgagtttcggtgtgattgccttctgaggggagggtctgtgggatgaaggcggcgcggcgcgcaccggtgtcgcctagcctgcggacctagttgtagaccttgcaggcgttcgcttcgtcgccctccgccgccccctccccatttagagatgtgcacctcacggtgtgcacctcagagaagttctgtctgattcggtgcggcgtgcggtacgggagcgggagggagggagcacgggcggagagagcgccagagccgggccgagccgcgctggagttacaaactctattgtgacgcacttactacgactgacggccgctgccagaccttccccagacttgctgccctcagcattttcggcaaacaatggggccggagcagggaacgcggccagccgcctgcaatcgctgcatctgcgcccgctcctgtgctccggcgtcctacctaaccccgggaagtcagagccgctgggagtttctgacttactcgaagaagtctgtcctgggcaaagagcacacacgaatagacttcagattagctgcttctctggaaacgcatgtgtgtgtgcaccagttccgcaagctgttgacattgttactgtattttgtttgggggtaccctctaccaaaaaaaaattacacctttattattttaggtgcaatttttttatttgggagattgtcagaaaagtatagaacaaagtatttgggattaaccctaagaatttttaatcgctaggtgagagctaatttgtttattcatcgatt

SEQ ID NO: 899 - DNA, 6000 bp, Homo sapiens
gcagagacagaaagggacaccgctctgcccgcgtccagcgcgaaggaggtgacctaaaacccatgggcccttctcacactgcgttctctgcgctccggcccagttccgggaggacctcccgacggcgcgggagaaggctgtaagggctcttggcccccgacgcggcctgggtctcgggggacgcatgaacccgccacctctggccggcttccttttagtgccccaaatagcagcgcttagcccgttgcttcccccgactcttgtttttcaaagtgttcacagggtcgcgagagcgagcgacgcgggggcggcgaggctgcaaggctgcacaggaacagacgacaagaaatagggctttcttctgcgtggttcttttccggtccctgtctgagtcgcccgaccccgcggggagcgcggagcattgcggcgtgcggcgggcttcgggctctcagcccgcgcagcaagttgtgttgcttttccccgggtgcgacgcgggacggccgcgaagagcaaagttcgtccgcggtaggaacttcgaggcccggttaggaccgatctccggcctccgagtctacttagccgtgtccacgctcgtgccttttccctcttgcagcgaaataactgggcggggcccgacgcgcgtcctccagcgactccgggaacccaaggcctccttcacctcgctcaaaattcacccgaaaatgcgctgagactttggcatggggctgcgctgtgtcccactgacgttacagaagcgcttatgaatttaaaaactgctccaggcggccggacggcgggacaacgcctcctcacttgctcctctacggcaaggccccttccttctccctgccggctgcggtggtgtgtagggtggtccctttacagagtttccttaatccatctagcctgacctcacctgcgggatgttccatttcccgatccacctcccacacccccgctgcagttgtctagaagctggggctggggaactgaggcgcgggaggagcagacaggagggccggggttggggcgccagccacgcgttgggagagcagacccgggtgcagactcagaggactggagaggcggcatggagtttggtctcctgggaggtagagtgaggtgctgcggactccagggaggaaagggatgggtggggaggcgggaggggaggagggacggggtattttgcgctcccgcaccgcggcccgaactcagctgttctgccttcactggcctcagccagtcgagggagctcctacgaggttatctgcgagcccagcaaatcttgggggtcctagccaaatgcagtgcgcaacgttctctctcacttggaggccgccattcacctcgtttttttttttcctaaaaggatttttttttctgagtgcttttttcatttccctattttacctgctttgcacatgcctcccgccctcacccgggaggcggcgaagacgcccactgggaccgcgcctggccgttttctgggcgcgtcctgcccccacggcctctgtctcttagggcgactgggcgcggaagaaaagctggagagcccctgcggggtggcaggaggagggtgcctgagtcccgcgagaggcccgggcgaggaagatgcgcagcctgctgatccgcgtcccgcccggcgccagggaccctcagagggaggagagctcaaagacctcgccccgcgccttcgcgaggaccaacccagtccccgcgcctgccccagagcggcttagaaactcagggcacagtgagagcgcagggcgcctcccgaggcttcacaccgccggccgggccagcggaggctgtgaccggagcgccccctctgtgccgcgcacgccgcggccgccgccgggttggggtaggtgagcgggaggctagggtacacttcggggtgggggatgggcgcgcacatggccgccagcaggcagagttactccggtaaacacgccagggacggcggcgcgcgcgggaggcaacccagcggggcaacccccgcctttacctgtccgagcctgcacgcgccggcggccgcggcgccgaggggggcggagcttgccagcccgcgcgccggggcgggacctagcgggggcggggtccgcagtgattgggcgtaggagcggggccgccagccagagctgggctgcagggccgcgcaggtttcacttcgctccgcgcagccgcctggtctgcagtttgttggagctctgcgtccagcgccgctgccgctgccgccgccgccgccgccgccgccgccgccgccgccgccgccactaccaccacttgattcttgcagccaccctgcgaaccctgccacactgcgatcgcatcatcgcggtattcggttcgctgcgttcccgccgccaccgcctcggcgccctttcttggcccttgttcccccaaatgtctgactctgactctcggactgagaaacgcaaggtaaatacctccaaatcccggggcgcgggcctggcaccgaaggaagactagcgctggagcccgaacggcaccacctactgcccgcttcccgtgcacgtgcgagcggagacgcttgcatcggcgccgcttgtcgccggcgggaggtggggatccgtgtggatcgggttccctctcgggcaggttctctttaaagaaaagtcgttcacgcggaacctgcaggctcttggccgaagtgcggcttgggacgggatgctgcgcgcgggcctggtgaagggtcgtaggtccgggcaggaggagaggcagcgcgtgcctttcggcgccggcccgggagctgaggacctgctcgtagtatcgggctgtgcgcccagctggaaagtctcgccgccggctccggcgccctcagagtagcggccgcgcagtgtgagggtgtttcgtgtcttggttttttggggcgcgtgggcctgttgcggaggatttgcggaactgcggtggtgatttaactgacgagacacggcttttccttttactcattcaggccaaggtttcggggccactgctgcgttcgctttctcaagcgtacctggggcccctgcttgctctgcaggagtcctgcggcctgtgccatccgcacgattccctggcagcgagaaatctaggtcctcccctgaccacctggaccgcgcaggggactagtcgcggccggcagaacctgctcggtccctgggccgggctatcttagcggctcacgcatgcccgagcacacccgacccggttcgcggtgcaggctggcggcgccgtgccctctgggacctgttgccccagggttggcgctgctggtggagggcccgacggacgccagggcggagggtgtgaatttactcgatggtcgcggacgtgcgcgtccgcggccaggggtggctcttcggctttgactcgtgtctgcggcgcaccaggagagagaggaagttgttggaggagaatagttgccacagccagggcggtgacggccgttagggtctgcccccgacgggccaaaacaaggacaagtggcgaggactgggcctggggatggccctgcgggtccgggcgcggcgcaagtcctgctttgtctccaggtgactggctgtccaggacggcgggagctgctaaggcttgtgtccggaaggagcacagggatgggcagggtggccgggccagccggccctcaaatcctccgacgaagcggcagccgccacgaccacggccagagcagcgctcggaggcgagtttgtcaacaatcgcctcgcctttggcggcctgacccgtaggcgccgcccccaccgcggctgccgattggctgcggcgcggagcgaccgcgcgcggaccaattgggaacgcgggcacccggcgccagcggcgcggggaggtcggcggtgccggcggcggcgggcgcagagcgcgaggggaggagcgggaggaggcggaggatgttcccggcggctgcggccggggcagcgcgggccagaggcgcggcgtgcggagccctcggctgcccggcggagcgcggcggcgggctggcgggaaggcgcgggctttgcgctgcgccggggactctgaacccgagtcccgggctttgtctcctgcgctgctttcgtggtgacggtcagggggcgcccggtcggcgaagggcgcgggccggacgccgcggggcttggtccctggcccggacgctgcgctctgaagggaaggcgcggacgtgagtttcggtgtgattgccttctgaggggagggtctgtgggatgaaggcggcgcggcgcgcaccggtgtcgcctagcctgcggacctagttgtagaccttgcaggcgttcgcttcgtcgccctccgccgccccctccccatttagagatgtgcacctcacggtgtgcacctcagagaagttctgtctgattcggtgcggcgtgcggtacgggagcgggagggagggagcacgggcggagagagcgccagagccgggccgagccgcgctggagttacaaactctattgtgacgcacttactacgactgacggccgctgccagaccttccccagacttgctgccctcagcattttcggcaaacaatggggccggagcagggaacgcggccagccgcctgcaatcgctgcatctgcgcccgctcctgtgctccggcgtcctacctaaccccgggaagtcagagccgctgggagtttctgacttactcgaagaagtctgtcctgggcaaagagcacacacgaatagacttcagattagctgcttctctggaaacgcatgtgtgtgtgcaccagttccgcaagctgttgacattgttactgtattttgtttgggggtaccctctaccaaaaaaaaattacacctttattattttaggtgcaatttttttatttgggagattgtcagaaaagtatagaacaaagtatttgggattaaccctaagaatttttaatcgctaggtgagagctaatttgtttattcatcgatttttttttttgcttaaaataatcttagtttttattttacttgcagaaaaaaagaccaaatggcaaagcaaccttctgatgtaagttctgagtgtgaccgagaaggtagacaattgcagcctgcggagaggcctccccagctcagacctggggcccctacctccctacagacagagccacaaggtaatcctgaaggcaatcacggaggtgaaggggacagctgcccccacggcagccctcagggcccgctggccccacctgccagccctggcccttttgctaccagatccccgcttttcatctttatgagaagatcctccctgctgtctcgatcctccagtgggtatttctcttttgacacagacaggagcccagcacccatgagttgtgacaaatcaacacaaaccccaagtcctccttgccaggccttcaaccactatctcagtgcaatgggtaagcaatgcctgggtaagaggcagttgacgtgtggatggttgaatctgcttgaaggctgtgtgtggcatttaaaatccccttttaaaaccccgtaactgatttattccatctttagatgggaatggaggatgtgtcaaactatcaaaccaacttttttttttttttttgagatgagtcttgctctgtcgcccaggctggagtgcagtggtgcaatctcagctcaccgcaagctccacctcccgggttcaagcaattctcctacctcagcctccagagtagctgggactacaggcgcgtgccaccacgcccagctaattttttctatttttggtagagatggggtttcaccgtgttagccaggatggtctcaatctcctgaccttgtaatctgcctgtctcagcctcccaaagtgctgggattacaggcgtgagccaccgcgcatggcccacatcaacatttttacaaagttactaacttttgtggcagtgatgagttgaggtccaaacattagctttcaggtctgtcttcattaagctaaagtgtgttttaaccaccaggctttacatagtaatgacattttgcttgaaagggaactgatca

SEQ ID NO: 900 - DNA, 6000 bp, Homo sapiens
agaatgtgcactttttggctaagtatgttctattatgtgtgtaaaatcctctctcagttctgagttgaatatcgattcaaagcttaattcacgctgatgacttgaaaatctaatcttgattctactcgagtgtttgtagatatctgaacatctgaaaacagtacagagtgcagcgttcctgtgaattttaatttggtttctggtactacacttgaaattccagtaatgataagatgggaactaaaacagcagctgcccctcggaaatgagggtcgcaccacctcgttcccagactgaggctgcagttgagaatgcttgtgtgtgacatgcccctgccacccagtacacacacctgagtcattagatgtcactttatggcatcgtcacagagaacaactgggttttggagagagaatgtcatgatgtgacttcatttccttggagcactgggatagaggctcttgggttagaagctcttggacattaaagagaaatcagaaggtttagcctgactgatactgagctcattatagattgacaatctctctttttttaaaaaaaaaagtttcctgccgtggctgctgctacagaaagtcctttgtgaaagccccagcctgatttcactatcaaccacttaaccacggtattaatttttcagttgttgaacttttaagattttaaattacttaagactttaaaaatagtctgttgctgagccagaatagtttgttaagaaacatgcatctttgagtagaactaaagtcccttggtgttggaaaatgccctccacactcctccaaaaatggattaagaatacttcatggtattttcccataggtagtaatgttaccagtaagttccgggcttcaaaaaatgatttctaagaagtttgaagattcagtggacacacttttggcaaaaattgcttatatctgacatattgcattataaaagttttgattagtggctttcttttttttttttttttttttgtaacaagtaaagagaaagaaaacatggatctgcctaggaagtcacctctgcctgagtctgctacttgcaggattggagcttttgctgcagattacagctttgaagtcactttacctcaagagcagtttatattttattgtgctttaaaaaaaaaatttagtgccaggtttatggagtgaagtgctttcataaatgctgaaactacattttctgtgggtaaaaatgcagctcatcagaatttcccctttgaagaattttttatgttcacataaaattgccaagttaaaaatttgatctccctacagagtaagagctttcatttcaaataaaaccattttatagaccaggtatcaacatttacggcggtcagacacattgcagatagcaaaataaaatatttatgcttggttcttacttttcttataaactagaaatgtcaacctaagttatctttttgatagctcgagtatgttaggataggaggaattgggttgagtatccaggtaagattacaggagtgagggtggagcagcgtgtgtttggagatttctgtatgccaaaccccacgggctccaggcacgcttttggaagaccataccggtggatccctttgtcatcgtggtggcaaagcaaactgatgctaaaggaaataacaaaacttaattctcgtgctgatcggtgccactgtggggcttacagaccccattcatttgttctggttgatttcatgtggtgtgagactcactaacattgaattagtgatgaagttaaagagaggctttctctatccccatagaagatattttgtcacttaagaaataattgaactttatgttgcactgtactaacagattaaaactacccttttaaaatacaggaataaataagagttaaaataagagtttttatcatatagtctttatagccatgtactactgtgtgcatactagctaggtcttattgcaggatgagtgtttgccattacttttaggtttataaattcaggaaataactgtatttgcatctcaaaaaaacaaactggtttttaaaaaaatagtgataggtgctagttagagtagcccttacagatcagtcttttttgcaaaatgtaatttatagtatctatttccataataactttttaaaactacacctaagtacagttgatagctcttactaatgtagttattgccaattccagtataagcctagtctctaaaccattatctttgcttaatacaactctcctaactctgaaatgctaaagacacatctcagggctccagagcattgccatggtttcttgccttttgcccaccagggtctggttgggaaaccgtctgcaccagagttgcttagggacttgaaagagtacagcctcctgtatctctctctctctctctctcacacacacacacacacacacacacacacacacacacacacacacccgccatttctccctgccagagcttagggatgtgtttatatccatgaatttatttaggctaattaatgttaactactgaacttttctttttgtacaagaaacaggccattcgtttatttgcttctgccaaagccagcagggcatttatctcttaagatgagtaagttgaaattggctaatttgttaaaagctcctacctgctggctaggttgaatgcattcactaagtgctagttttgataggttggcttctgacagagactgccccttgatagtatttggtggtatttgcaattgccagcccaagcacgagccatgtggaagcttctaaaccacagacacaagtcaaagtgttaaagagaatccagtggacttaatttacgagttaggggaaattgacagggggaattatttttgttttgtcttataaaaagtataaaatatgtctccttgtcccaaagaaatttagcagttagttgaaatcaagtggttaatctacaagaaggtaagccccgtgggagcagggcatggcctcctttgttgctatacccagagcacctcctagaacaatgtcaggcatgtgagtgtttgtgtttgttgagtggatttgtgaatatcattgatgtattaagtattgggtaacttggcctgcaatttttaccagtctgccaactttataaaacatcaatctgtagttcacagatgtccttttgataattggtgttttcttcacttctgactccggggctgaaggcagttttctctctcagtcatgtgtagtgagaaacaggtggagcttgaagctcaggagaggtgggtgatggtgtcttgctggctggacgttcacttgtgcatatgggtaggcacacctcctttaggaggactgcatgagacccttgtgcagtgggtgcccaaacaaaacacacttttcttcttcccctaagggcgaactaacttgttaaaagcttctaaatcagggaaagaacacttaaaaagagtagctctttaaggggcagtaagcccaggaaaaggaactatgacatcagcatcacctcatatcacatctacccagaaattttgttttctcccagtttagttcaaaaattaattttaagactttttacagatttgttagaaatatttgtgtgacacaggtacaatcaaagtaaattttgtatgattggatgtattcagaggccatgcctgacatcctgaaagtttccccttcatcagcctttgtgcttctccaccagggcttcctacagcagttcctccctctggtttattcacagactgcagataactctggaggggatcggtgtgtgtccctcttaccccactgccacccccacaggggtggtgtgatattctgcctctcctaggccctcagtctttgtgggattattgttaaattcacttgggtataagatgaggcaagagattgtagaggaattggcaaaaactcttcaaagtgttcacttttaagtgtttttatagagctctgaatcagtatcagttttactggccttttacaaaaataaagacaggaagttatgttccttcgtatggcaaaatcctattatcgtaggtttttacctattttgttctggtgaaaacgtaatatgtgtgtttaattgtgagtacggtgtgcccatttttacagtaagttaacgtaagtcacacgtgaatagcggtggaaatccaagaattttatctcatttcctgtacacgttactgaactgttcacctctgagtgtaatgctttcctggtggcacatggagaatataatcttcctaatgcataatgggatcttttgacaactcacatttttgttctccttcatttttggctgtcacatggcttttaatggtttcattagtaaacagatgaatgtactgggtgtgaatgttagtgacagcttaatgaaagggcagtcctccctctttcttctcctttcaaaaatgcctttgctcttagacccaaaaacatgttttctctccatgtggtgtttgcagacttgagctcatcttgattggctgcattaatattgagacaaaacatgcaattatgctttcatttggccctggggtagccattctgaagacagctgtctgtatcattgtacctgctttcatagaaaccaacttattcaggtttctcagggtttcgcttattttgctttgaatgggacagccatttcacctcatatttttggatgatgtttgaaagttatataggaatatttgccttgtaataagatcagaatgattattttactgaaaaactaaattgttatgttataattatgtttcaagcatatttctttggcagtattttccattttcttgtgagtaacttctggaaatggaagtgtgtatgaatgggttggaatgttttcagttcttgcaattctgaatctccagttttaaaaaaggaaattttattctatatctcttattctttaaccagagttatgtagaagactctgccactctaatctttagtacatggctgtagttgttgaagtcagggagctcccagaaatgtgaaagagtgtgtgagatgggcttgcctctagagacttatctttggaactttcccagtgatctgtggaccacaatgtgatttttgttttgttttgttctgatgcagcttccatgaggcaggctgaacctgcagatatgcgcccagagatatggatcgcccaagagttgcggcgtattggagacgagtttaacgcttactatgcaaggagggtaatgatgttttctttacccgcttttctgctcacaccctccccttccacactatatttttttaaaaagacagtgacttcttgtaactacatgctaattctggaaatgattactgttgcctagttgtgacctttcattgtttctcctttcccatttttcatttgttttatgactaagtaatggcacttaaataaaataatacagtaggaggcagcaaaggaattttatgagcacagactttaaaacaatgctaaaaaagggattatttatagactttgagatagtctagaaatactattaacataggtttcaatccatgtagtgtgtttctgtactccccttgtgcattttaggtcaaagttaaaggtaatttttaaacaacatcttttgtcacttagcgcatgggagcgatgccagcactcatgtaaaagactctcctgcaatttgcagggtggcccgaggaagcagggagccattgcccttgcagagcccattgctgtctttggacatttaattgttgaaatgtattaggaggccgctaatcaatagcctgtaatttgggctgtaaaaactttatattatagataattgccacttattttgagctatgttcttgattttttaaaaattttagcctatgtcatcttctgtagttagtagaagcggtgttttttgtttgttttacctgggggcaatgtaggtgaccatttggacacctttttcacatgggacacttttgtttgtttgtttgtttgtttgtgtgtgtgtttgtttttgagacggagtcttgctctgtcacca

SEQ ID NO: 901 - DNA, 6000 bp, Homo sapiens
agtgttctttggtaggacacaaaagcacgaatcataaaagaaaatgttgataattggacttcatcaaaattacaaacatctgttcattaaaagacactgttaagtataaaagacaagtcacagactgagaggaaatttttgcaaaatacttagctgacaaagggcttgttactaggatacatacaaattctaaaaactcaatttaaaaaaccctcaaaaacaaagaaacaaacaaaaaacagcccaaagacttaaactggcacttcaccaaagaagatataaatagcaaattagcacaggaaaagatgctcaaaatcaccagagaagagggaaatgaaaattaaagctacaatgagataccactacacatctattaagaaggctaaaaattgaaaattaaaattaaaaaacaaccgacaacaccaaatgctggtgaggatgcagagcaacaggaacactcagacattgcttggtgggaatgcaaaatgccaccaccactctggaaaagtttgactttatttttttttcccaaaagtaaacacgtactcaccacatgactcagcaatcttattcctagatattacccaagagaaatgaaaacatatgcccacacaaggacctatacataaatgttctagcagcttaatttaatgatagccaagaactggcaaatggataacagattgtggcacatctatataatggagcccagtcagcaataaaaagaaataaagtactgatatagaattccacatgaataaatctcaaaagctttatgctgagtgaaagaaggtagtcttaaaaagctatgtactggttgggcacggtggctcacgcctataatcccagcactttgggaggctgaggtgggcggatcacttgcggtcaggaattcaagactagcctggccaacatggtgaaactaaaaaatacaaaaattaggcaggtgtggtggcgtgtgcctgtaattccagctactcaggaggctgaggcaggagaatcacttgaacccaggaggtggagattgcagcgagctgagatcacaccactgcactccagcctgggcaagagagcaagacaccaactcaaaaaaatatatatatgtgctgtaggattccctttatatgctattctagaaaatgcagattatagagatagaaatccaatcagtggttgccaagagttggggtggaacacagaatttctgagggtgatgaaaatgtgtatatcatgatgtggtggtggatgcactataacatacatttgtcaaaacaagcagaactgtacatttttaaagtgtgagtttccctgtgtgtaaattataccacaataacctgacaacaacaaaagagagagacgttggactgcatccatcccactccacttcttaccagggagctcccgggagcctctctagtgtctgtcctccctgccctgcctggggtgggctgagcagcacagcgtccctgcagagagaatggagaatgggcaatgcccacacaggggagtggcatggggtgagaaggaaccttagtcccgtcagccctgaccaccagcccatctctcatcactgttcagcagagtgagctcaagttgggtttctggcatctattggcagagccagggccaaaacgcaaggggtggggagtgttgtacaggttagggctgactgaatgatcagccctaatctgtacaacggatctgtgcagtctgagcttccacacagcagcagctgtccttgaccccttcccctcctagtcggcccctccctgaccttcccaggcctgtgggaagtcctgttaagtcccaggccatgtccactttgtataaaatacttaaaaataaggccaggcacagtggctcccgcctgtaatctcagcactttggcaggctgaggagggaggatcacttgaggtcaggagttctagagcaacacagcaagacctcctctctcctaaaaatttttaaaaatcagctgggcgtggtggcacgggcctgtgatcccagctactgaggtggctgaaacagaagaatcgcttgagcccaggagatctaggccgcagagagctgtgatcccgccactgcactccagcctgggtgacagagccagagagaccctgtttcaaaacttttttaattaaaaaattaataaaagatttaacgtgacccttataacagtcacctgagacggacgctgaccccattttacaaatgtggacattgagacacagggaagttaaatccccctgtcagaaaaaggctagcggaggtttaaggccgtgggaacgtgactccagagctgagggctttggaaccccgcctgctccggtagttgtggctggccttgccccacacacatttggttctagctcctttgcttgggtcttcatccatgcagcgaattccttagccacaggtgtccctctgctctctaactcacagcgagctcgctgcccaaagtcctgctccggcttcctgggtggacctgaccgcgttcgggtgcacgtggggcgactcacacctgacaagtaaagcgggtgaggccgcgcctgtgaagggcgcctggctcctccgcaggagcggtgcggcgcggcgcccccggctggaaccaggtgtaactgcagagaccctgggatcgcaggaacggctggcggcaggactgtccctacctcgagaaggtgacggggtttcctgcgctgccagccgatgaggcggccgtgacgcagcccgccgtgcagagtccccgtcggccgacaggcgtgcagagctctgcagaggacccttccgccctctgggcagcctgccaagccgtggcacccccaacccccagcactgggcacttgggagcattgcagccgccctggctcgtaccggtgccggtgctttgggcacctgggctggtttggacatgggtgccccgggcagagtccatttatgcaggtcagaatcagtgtgtggagcctgcatagacttgccctggagcggctgcctgtgctggggtggggaggagtagagggcgagaagttggtggggaagggaagcggcgccaaaagaatacccacaacatcttgcacctggaaggcaaagcagagggcagtgatctctgcagacttgcgggggcgacgcctgaagcaaacagggacatacaagctggtgccttctgtggttgtgcatggggtcttcatgcttcctgtctgagttcccagaagcttgtctctgcttttctaggcagctgccacagcctgtcacaaacagctcctggttctccacttctcatagtctcgatttcaaaatccattgcctcaccctccacctcctctccacctccacccctcctagcacctcctgactgcttgtgttctgtgtctccccactgtctcccaacctggggtggggttgggggggatgtctttcctcctgtctgctctttgatgtccagctgaagtgtcacctcctacaggcagcctcccctggctatgccagcttgtactgattgccctctcctctgaattctgtaagcatttcctatgtgtacctgcccctgggcaaggtgggcctgacttgttagagtgttagagttttaccctgttcctctaggagggcctggtaccaccacagcccagcatggtgtggtgcctcagcaggaggcatctggttacaatcaacacaagctgttccagccaatttaaagaaacttcaggaggaatagggttttaggagggcatggggaccctcctgcacccgaagccaggatgtgccaccaatcataaggaggcaggggcctccttccgctgctccctgggactctctaggtgtccgtggcctcagtccccctctgcacacctgcatcttccttctcatcagcttcctctgctttaagcgtaaacatggatgcccaggacctggcctcaatcttccgagtctggtacttatggtgtactgacagtgtgagaccctactcctctgatcaatcccctgggttggtgacttccctgtgcaatcaatggaagccagcgaggcagggtcacatgccccgtttagaggtgcagacttggagaaggaacgtgggcaagtcttcccaggaacaggtagggcagggaggaaaggggggcatctctggtgcagcccggttcggagcaggaagacgcttaataaatgctgatagactgcaggacacaggcaaaggtgctgagctggaccctttatttctgcccttctcccttctggcaccccggccaggaaattgctgcagcctttctggaatcccgttcatttttcttactggtccacaaaaggggccaaatggaagcagcaagacctgagttcaaattaaatctgccaactaccagctcagtgaatctgggcgagtaacacaaaacttgagtgtccttacctgaaaaatagaggttagagggatgctatgtgccattgtgtgtgtgtgttgggggtggggattgggggtgatttgtgagcaattggaggtgagggtggagcccagtgcccagcacctatgcactggggacccaaaaaggagcatcttctcatgattttatgtatcagaaattgggatggcatgtcattgggacagcgtcttttttcttgtatggtggcacataaatacatgtgtcttataattaatggtattttagatttgacgaaatatggaatattacctgttgtgctgatcttgggcaaactataatatctctgggcaaaaatgtccccatctgaaaaacagggacaacgttcctccctcagccagccactatggggctaaaatgagaccacatctgtcaagggttttgccctcacctccctccctgctggacggcatccttggtgggcagaggtgggcttcgggcagaacaagccgtgctgagctaggaccaggagtgctagtgccactgtttgtctatggagagggaggcctcagtgctgagggccaagcaaatatttgtggttatggattaactcgaactccaggctgtcatggcggcaggacggcgaacttgcagtatctccacgacccgcccctgtgagtccccctccaggcaggtctatgaggggtgtggagggagggctgcccccgggagaagagagctaggtggtgatgagggctgaatcctccagccagggtgctcaacaagcctgagcttggggtgaaaggacacaaggccctccacaggccaggcctggcagccacagtctcaggtccctttgccatgcgcctccctctttccaggccaagggtccccagggcccagggccattccaacagacagtttggagcccaggaccctccattctccccaccccacttccacctttgggggtgtcggatttgaacaaatctcagaagtggcctcagagggagtcggcaagaatggagagcagggtccggtagggtgtgcagagggccacgtggcctatccactggggagggttccttgatctctggccaccagggctatctctgtggccttttggagcacctggtggtttggggcaggggttgaatttccaggcctaaaaccacacaggcctggccttgagtcctggctctgcgagtaatgcatggatgtaaacatggagacccaggaccttgcctcagtcttccgagtctggtgcctgcagtgtactgatggtgtgagaccctactcctggaggatgggggacagaatctgatcgatcccctgggttggtgacttccctgtgcaatcaacggagaccagcaagggttggatttttaataaaccacttaactcctccgagtctcagtttccccctctatgaaatggggttgacagcattaataactacctcttgggtggttgtgagccttaactgaagtcataatatctcatgtttactgagcatgagctatgtgcaaagcctgttttgagagctttatgtggactaactcctttaattctcacaacaccctttaaggcacagatacaccacgttattccatccattttacaaatgaggaaactgagg

SEQ ID NO: 902 - DNA, 6000 bp, Homo sapiens
gttttctttcagggaactttcttttttttctttttttttgagatggagtttcactcttgttgtcccaggctggagtgcaatgacgtgatctcagctcaccacaacctccgcctcctggattcaagcgattctcctgccgcagcctcccgagtagctgggattacaggcatgcgccaccacgcccagctaattttgtgtttttagtagagaaggggtttctccgtgttggtcaagctggtcttgaactcctgacctcaggtgatccacctgccttggcctcctaaagtgctgggattacaggcgtgagccaccgcgcccagcctctttcagggaactttctacaactttataattcaattcttctgcagaaaaaaatttttggccaggctcagtagctcagaccaataattccagcactttgagaggctgaggtgggaggattgcttgagcttgggagtttgagactagcctgggcaacacagtgagaccctgtctctatttttaaaaaaagtaaaaaaagatctaaaaatttaactttttattttgaaataattagatatttccaggaagctgcaaagaaatgcctggtgggcctgttggcctgtgggtttcctgcaaggccttgggaaggccctgtcattggcagaaccccagatcgtgagggctttccttttaggctgctttctaagaggactcctccaagctcttggaggatggaagacgctcacccatggtgttcggcccctcagagcagggtggggcaggggagctggtgcctgtgcaggctgtggacatttgcatgactccctgtggtcagctaagagcaccactccttcctgaagcggggcctgaagtccctagtcagagcctctggttcaccttctgcaggcagggagaggggagtcaagtcagtgaggagggctttcgcagtttctcttacaaactctcaacatgccctcccacctgcactgccttcctggaagccccacagcctcctatggttccgtggtccagtccttcagcttctgggcgcccccatcacgggctgagatttttgctttccagtctgccaagtcagttactgtgtccatccatctgctgtcagcttctggaattgttgctgttgtgccctttccattcttttgttatgatgcagctcccctgctgacgacgtcccattgctcttttaagtctagatatctggactgggcattcaaggcccattttgagcagagtcgggccgacctttcagccctcagttctccatggagtatgcgctctcttcttggcagggaggcctcacaaacatgccatgcctattgtaggagctctccaagaatgctcacctccttctccctgtaattcctttcctctgtgaggagctcagcagcatcccattatgagaccttactaatcccagggatcacccccaacagccctggggtacaatgagcttttaagaagtttaaccacctatgtaaggagacacaggcagtgggcgatgctgcctggcctgactcttgccattgggtggtactgtttgttgactgactgactgactgactggagggggtttgtaatttgtatctcagggattacccccaacagccctggggtacaatgagccttcaagaagtttaacaacctatgtaaggacacacagccagtgggtgatgctgcctggtctgactcttaccattcagtggcactgtttgttgactgactgactgactgactggctgactggagggggttcatagctaatattaatggagtggtctaagtatcattggttccttgaaccctgcactgtggcaaagtggcccacaggctggaggaggaccaagacaggagggcagtctcgggaggagtgcctggcaggcccctcaccacctctgcctacctcagtgaagttcccttgtgggaggccctggaagcggatggagaagaagcgcagtcacctgaaacgagacacagaagaccaagaagaccaagtagatccgcggctcattgatgggaagatgaccaggcggggagacagcccctggcaggtgggaggcgaggcagcaccggctgctcacgtgctgggtccgggatcactgagtccatcctggcagctatgctcagggtgcagaaaccgagagggaagcgctgccattgcgtttgggggatgatgaaggtgggggatgcttcagggaaagatggacgcaacctgaggggagaggagcagccagggtgggtgaggggaggggcatgggggcatggaggggtctgcaggagggagggttacagtttctaaaaagagctggaaagacactgctctgctggcgggattttaggcagaagccctgctgatgggagagggctaggagggagggccgggcctgagtacccctccagcctccacatgggaactgacacttactgggttcccctctctgccaggcatgggggagataggaaccaacaagtgggagtatttgccctggggactcagactctgcaagggtcaggaccccaaagacccggcagcccagtgggaccacagccaggacggcccttcaagataggggctgagggaggcccaaggggaacatccaggcagcctgggggccacaaagtcttcctggaagacacaaggcctggccaagcctctaaggatgagaggagctcgctgggcgatgttgggtgtggctgagggtgactgaaacagtatgaacagtgcaggaacagcatgggcaaaggcaggaagacaccctgggacaggctgacactgtaaaatgggcaaaaatagaaaacgccagaaagggcctaagcctatgcccatatgaccagggaacccaggaaagtgcatatgaaacccaggtgccctggactggaggctgtcaggaggcagccctgtgatgtcatcatcccaccccattccaggtggtcctgctggactcaaagaagaagctggcctgcggggcagtgctcatccacccctcctgggtgctgacagcggcccactgcatggatgagtccaagaagctccttgtcaggcttggtatgggctggagccaggcagaagggggctgccagaggcctgggtagggggaccaggcaggctgttcaggtttgggggaccccgctccccaggtgcttaagcaagaggcttcttgagctccacagaaggtgtttggggggaagaggcctatgtgcccccaccctgcccacccatgtacacccagtattttgcagtagggggttctctggtgccctcttcgaatctgggcacaggtacctgcacacacatgtttgtgaggggctacacagaccttcacctctccactcccactcatgaggagcaggctgtgtgggcctcagcacccttgggtgcagagaccagcaaggcctggcctcagggctgtgcctcccacagactgacagggatggagctgtacagagggagccctagcatctgccaaagccacaagctgcttccctagcaggctgggggcacctatgcattggccccgatctatggcaatttctggagggggggtctggctcaactctttatgccaaaaagaaggcaaagcatattgagaaaggccaaattcacatttcctacagcataatctatggccagtggccccccgtggggcttggcttagaattcccaggtgctcttcccagggaaccatcagtctggactgagaggaccttctctctcaggtgggacccggccctgtcctccctggcagtgccgtgttctgggggtcctcctctctgggtctcactgcccctggggtctctccagctacctttgctccacgttcctttgtggctctggtctgtgtctggggtttccaggggtctcgggcttccctgctgcccattccttctctggtctcacggctccgtgactcctgaaaaccaaccagcatcctacctctttgggattgacacctgttggccactccttctggcaggaaaagtcaccgttgatagggttccacggcatagacaggtggctccgcgccagtgcctgggacgtgtgggtgcacagtctccgggtgaaccttcttcaggccctctgcccaggcctgcaggggcacagcagtgggtgggcctcaggaaagtgccactggggagaggctccccgcagcccactctgactgtgccctctgccctgcaggagagtatgacctgcggcgctgggagaagtgggagctggacctggacatcaaggaggtcttcgtccaccccaactacagcaagagcaccaccgacaatgacatcgcactgctgcacctggcccagcccgccaccctctcgcagaccatagtgcccatctgcctcccggacagcggccttgcagagcgcgagctcaatcaggccggccaggagaccctcgtgacgggctggggctaccacagcagccgagagaaggaggccaagagaaaccgcaccttcgtcctcaacttcatcaagattcccgtggtcccgcacaatgagtgcagcgaggtcatgagcaacatggtgtctgagaacatgctgtgtgcgggcatcctcggggaccggcaggatgcctgcgagggcgacagtggggggcccatggtcgcctccttccacggcacctggttcctggtgggcctggtgagctggggtgagggctgtgggctccttcacaactacggcgtttacaccaaagtcagccgctacctcgactggatccatgggcacatcagagacaaggaagccccccagaagagctgggcaccttagcgaccctccctgcagggctgggcttttgcatggcaatggatgggacattaaagggacatgtaacaagcacaccggcctgctgttctgtccttccatccctcttttgggctcttctggagggaagtaacatttactgagcacctgttgtatgtcacatgccttatgaatagaatcttaactcctagagcaactctgtggggtggggaggagcagatccaagttttgcggggtctaaagctgtgtgtgttgagggggatactctgtttatgaaaaagaataaaaaacacaaccacgaagccactagagccttttccagggctttgggaagagcctgtgcaagccggggatgctgaaggtgaggcttgaccagctttccagctagcccagctatgaggtagacatgtttagctcatatcacagaggaggaaactgaggggtctgaaaggtttacatggtggagccaggattcaaatctaggtctgactccaaaacccaggtgcttttttctgttctccactgtcctggaggacagctgtttcgacggtgctcagtgtggaggccactattagttctgtagggaagcagccagagacccagaaagtgttggttcagcccagaatgagctcacagtgtcgcgggggaagctgtttaagaacaatgttacaccatcatgaacagcagtaagaaagaggctctggcttaacctggcctgataggcctaattgaatgagacagaaataagtcaaggatgctctgatttgaaatcatgaagtacctgatgaaaagaaatggtggtgagataaagctgagaaaattcatctaaagcccaaaattagtctagctctgtgtgtggcctcaggcaagtctttttctcctctctgagtgtgatggttaattttaggtgtcgatttgactggatgaagggatacccagatggctggcgaagcatgatttctgggtgtgtctgtgagatgttctggaggagatgggccactgagtcggtggactatgtggggaagatccgccctcagtgtgggcaggcaccatccaatcagctcgggacccagacagaataaaaaggcagaggacaggtgaattatctgtctctcctagagctgggacacccttctcctgcccttggacatcagttccaggttctcaggcctttggactctgagacttaacaccagtggccctccagattctccagccattagccctgtactgagg

SEQ ID NO: 903 - DNA, 6000 bp, Homo sapiens
acttgagataaacgtttcagattgtacatctaaaagtttgtaccaacttatactctgccaactgtgtatgaagatgaaatttcattgaccaaccccctaaccatttctgcatgttataacttacagaatcatttccaatttggcaaatgaaagttatgtctttgcattaattttctgttttgattattagtgagacttaaatttttcatgtttattgatagcttttctttctctgttcatctactttgttcatttttctgttgaaattattgggcccaagaaataattgattgaaagggaaaaattagtgtggtaaccaatatgtgagttaatgttccagttacatctaccccttcgttatgtacagatgtcaattttttttttattttaacgaaaatgtctatcttgatttggagctgctgattttatcaccttagtgtggcagtgtcactaccaagggaaacgttaatcagaaccagaaagttgtgagaaacactgaaagttatttttaaggagtgtggtttgtgccttaaatgttgagctctgaatagcccataacttgtaatagcaggagcttaattttcgggtgttcttttttttctttttcttttaacatctgtggtgtgttaaatgtgttatctagaatatctctttttaaaattttcatactaatcctgtgagataggaattattatccctacttcatcagtgcatggacagatttagagaggtgtggtaacctctcaggctgcacagcagggttagaggtggctcaggattagaactacagatacgcatcttccaaagtgcaggatcttttttactgcaccttgctgaattccaacaatgttaaactcagacgcagctacaaacaaggttttcgtttgtttctttgctatagttttttgttttgttttgttttatatcactatcaaagaagcagcaagactcagatgacctaccttagactttcctttcgttctggctaatatgaattctttgagactttttggaggtcctataacttctttcttatgtttcctcacttttatacttttatgtcttgaaatatatttgggcagctgcaaaaaagaaacaggcagttattttacttaacagtatcttgatagataaaaggaaccaggagaagccaggtaacctaccttcttttttattttttttatttttatttttattttttgagactgtctttttttatcacccaggctggagagcagtggtgcaatctcagctcactgcaacctccgcctcccgggttcaagtgattctcatgcctcagcctcctgagtagctgtgattacaggagcctgccaccaagcctggctaattttgtatttttagtagagatggggttttaacatgttggctaggctggtctcgaactcctgacctcaagtgatccacctgcctcagcctcccaaagtgctggaattacatgtgcaagctaccgcagccggccggtaacctaccttctgaaatacttatgacaattcctagaagtctaagaactatatttttaaaaagcattatggattttaaaaatgtgctccccattcatcagctccctttcccacccatattctttgaagggaggggtaggtgatgcgccctttttatgtttgcacaatatatgaattcctcatagtatccagggtaaacttttgagcctcatggtcagtgttggaaagatgctcagctaggatcggccttaataaaacaaaaagatccttccaaatcacttgtccttctcttcccttttcaactctgaacttgccactctatttttagctagatcagcttcttatttaggatagtttccttttatttctacattgagaattatctattctttatcatatctgatcatatgtaaatatgtaactgtggattgtggtaaaaatttctgacaagtgagcccctgagaacccttgaggactttaccttttcaattttctttgctactttcattctaaacttgagacagatagttctgtctttttctatctcttcaatcttgtaactgtgtaatatgactattaattgtttattacttactggttacttttaattgtttccttttaacaagtcagagctttcttagcttttagtttggaacttaatgttttttgtcgttaattttttgtatttcatggcatatttcccaaatagattgagtatgccatgtcctcctttcatcactgaactctgctcttttctcatttggttgctatcttctctactttaatagagactgaaaacacaaaactagatttcagtgacttaacagacctccaaaatatgaactctgattattcatgtcagtctttataagaatacatgattctcctgaacagttttcttcctcaactgtgattctagggcaacaacttggttttctgggtatgctgtcactcctattgctctttctgatactggatggtggccattgatgccttctgcttttggggttatagaacgttacaactgaaaggcacattagagatcatctaattgaattctttcttaaacagatcagttgaacacatgaggcccagaggccatattactagaactaggattagaaccccaagtctcctaacttgttccctaaatgccctggactggattagggatcctgtggtgttttttctttacacaggttcacctctccatgctacagagtagtaatccctgcttatcactgcaagatattgctggaaatagtatccttcaggagttgattataattggtaatcatttcctatggaaacaatatttaaagtgtatggtgtattcttgatccagagttaatcatcaaggaaatcatagatttgacaaacaatatattgaacccaagactgtactaattcaaaaaacgcatactatcttccaagtcctataaaatagaccaaagtgtgcaggctgatcaaatacagtgttaagatttgtgctccagtactgatggaggcattgccaagtgaatttctggcaggtgaacatcttatctagagtgagcttgttgagccgggaaagctcaacagccctgttccgtgggcagagatgtcccttgttagctagacacctggtctgccattattagctttctctgtagcttggagtgggtggctattattattcagccttttttttttttttttttttttttttttttttttttttgagcccaggctgtagtgcagtggcgccatcttggcccactgcgagctccccctctcgggttcacgccattctcctgcctcagcctccagagtacctgggactgtaggcgcccgccaccacgcctggctaatttttggtatttttagtggagacggggtttcactgtgttagccaggatggtcttaatctcctgacttcgtgatccgcctgcctcgtcctcccaaagtgctggtattacaggcctgagccaccgcgaccggcctattcagcttttttcagtttccagaatattccatattgagtaaaaatagcactacagaaaattgccccttccacttgagacaacatttccatgtggagtatggccgttcattgttaacacaataggttggaataataacagcttggacactcagctccactttctgatgcagtcaacccccagattaataatttgtattagaaaaagactgttaaagctgggcaggtgactcacgcctgtagccccagcactttgggaggccgagatgggtggatcatttgaggtcaggagttcaagaccagcctggccaacatggtggaaaccctgcctctactaaaaatacaaaattagcctggtgggtggtgagcgcctgtaatcccagctactcggaaggctgaggcaggagaatcacttgaaaccaggaggtggggattgcagtgagccgaggttgtgccactacactccagcctgggtgacagagtgagactccatctcaaaaaaaaaaaaaaactattaaaagaaaataaatgtaacattataaaatacaattatgtttatccacatttgaaatttttaaaagatagccttgattttggtaaagtcagaccttaattctgggatttatgtctttactttcttgattggtagtataatgctcttttttctttttttaatgtgagctattttatttttattcttttaataaatattttaattaacaaatcataattgtatatatttatgaggtataatgtgttgttttgatatgtatacagtatgaaatgattaaatcatgtgaattgacttcttttttgaaatcatagtaatagaggatgctttttttttttttttcaatgttcttccttgacaacacaaaaatttggtgtaacccttggttgggtccccaaattatttttgaaattttactggtcagtgaaatttccaaatctggtaaccaccattatcaggtatgattttatgtgagcataaatataacagctataagaccaataggacctatgtgaatatgcaaattataatacacattaggggcttaattatcagtttctcatttcttcttacaatttagaaagacttcactggcaatatttggataggtggaatcttttggttcaaataagagatttctctcaataaataccggtctagcaaatcctcccgggctagaatggtgatctttaagggcgttcacgagtggagggccactatttccaaatgaaaaagcgtcatcaaatcatcactgcattgatttgcttctagacaaggcattttattttaaaatttcaaataacagaaaatcgagagtgcgacattttatgattattttaaagacacacaggttttaaaaatgcttgagaaatgctaatccggagtggaggtcattctgtaaaaaatagcctgcctcctgcttctgctgccactagatggtacccgggtgcgccgggaagccgtcggagaacgtctcctgggggttgcgctgccgtcgggcaggtggccgagccccgcgggagctgtcgtcggggccgaattcactgcgccaaggtccagcggaaagctggggcatcccggcgaccgcagggtgtcccttcgcaaattcatcaggcgaaggggaggcggaagctcctggccgctgctctgggggagggctccgagctccaacctgcaagtccaggcaaggggagctccccgggggcgggccggggtgccaaggtcctttttggggtggggagcgcgctggggaccgggaatggagttccatcagggcagtgagtgttaccaaacccgttgacaaagtgggggcaggttaatgcacatgcagggccgcgtcgcagcaggaggtatttccacactgcctggtgagggaggactgccgcggtttcctcaggctggtgggtgctgtctggaccgtcttggaggactactgagaggatgggctgggactcgtcctccgaacggcaggaaggctgaacaggtgtgcttctcaagattcacctccaagaaaccttcccgcccctgccccgtcccttacccgcagccccagccggattcagtagtgctccacctctgtgtcccaacgcagctcacagctcctacatgtgtccctgactcagtttaccacactgtcctaacatcctttaacctacaaggccaagttcctttagtgcatgtcttttctctctcctctctccctccctccctgccttgactctttgccaaagagtttggcatgtagtaaagtactctttaaataatgatcttaaaaacttatctaaagacttgccataaagtaattcatttactactgtcaaggagatttgtatattagctatgaattggatgatccatatcaaaattgcatatatatttaagtgtctaaaaaacaaatcataaattggaagaaaatattgactatttagaaaatatctggatgggagattttctaagctttaaagcaaaataaattgcagagtaaaatattgatagacacagtttatgtctatcatgttattggattt

SEQ ID NO: 904 - DNA, 6000 bp, Homo sapiens
ctgtttattggtctggactggaattaaaaaaatcaggctggctgggtgcagtggctcacgcctctaatcccagtactttgggaggccgaggtgtgaggattgcttgaggccagcaagttcaagaccagctcaggcaacatagtgagacaccatctctacaaaaaatttaaaaacaattagccagttctggtggcacacacctgtagtcctagctacttgggaggctgagacagaattgcttgagaccaggagttcaagattgcagtgagccatgatcacaccactgcactccagcctgggtgacacagtgaggcaccgtctctaaaaacaagagcaacgaaaaactcaggctcctctgagttgctctggttatgtaggttctggatgccttgatgtttgataagagagacctgacatggcttcacaatattcaccatgtgtacccaaaaaagaagtggcagaaaatgtcctggagttctctactttgaagctgtgatttggatgttacatagatttacatattgtgcattctcttctaatttcttgaaactcctttgtcctctggtccagaaaggattattaagagtccagaaagccctatgttgttactccaaaaatggaataaatatttccttaataaccagggtgagagtgggggtttcaagtaatgaaattcttccccccacccccctgcacccctctgcaccccctcacccccactgcaaacaatagttagcagtttccactaagagttttccacagtgttgctggaagtgaaagtgaaagctcagggctgactgagtttataaatgcaaaagatgttgccatctttgcccttctttaagcatagtcatttattggttgattgacacagatgtggcaagaggctccctggttccaaggaagacatctctggcccaggagaaactatgcttagagatttcctctgaattgctaaactcatacaaaaaataaaggactttgaggtgtgaaagtgagtagctaaggatgatgctacatttttgacccaagcaatggaagaatggacccttaattggggtggggcagactgcaggaaaagctggtctggggagagaagggttggtgctgacagatcacaggagctcagttttgaatatgttgagttcaaaatgcctctcagatgctgaaatggagatgttaagtaagcaattggttttctgggtctgaagttcaggggataaatatggactgatgataaaaaattgagagccaagggcatttactgataacttttcaaagacgcattaaatagagccacagacttagcaaataaggcagagaataccttgttagattgaatttgagataaacaatgaatacctctttagtataagtgtgtcacaagtatgacatggaacacaagtatattaaaaattaattgctgtttaattccaatttaactgggtgttctgtacttttatcttgcaaaccaacataaaagaagtcctgttgtgagataaaccattcctgatgcatgtatttctggctcttttattaaaaagagaagtgaagacctattttctagtcctcagctctaaaaccctcgcctgttctagctccgttactgtcttcatgtgcatctcccaatgtgtcactcccaactctttgcacaggatatctctcttctgtgtgaacctgaaaggatacctagttttctccaatcctacatgagtatctagacatgaaaatatgggtgaaaaaaacaagaataactcttgattcccttgattgttgcatgaaagcagttggtttttcccaagttcgctgtattttggaagtggttattttcagatgtgattttggagtagtttccttttgaatacactttcatgtttctcttttggggaaatgctttcaggcagtagccaagacccactttgttgtacttttcttggcactacttgcatctcttgccgtaaataaggttaagaggagaggagattggatagaggcaggaataaggaggctgctgagccctgtgggacctgttattctgatatagtttgaagttttagagcatgttcctaagagagcaatgacaagattttggggaaggggcttggatacataaatatcatcctgaagctgtttagttcctgctctagcttagtcttgacctaccaaatgattaatgttatcttcaatttgagatctgtagtgtcctataagtggacaactgcaggcatggatcattaaaaagctcagattatgttgacatatatataaagagtttattttaataaataatagaacaagagaattaattttcaagtataattagtaaacagaacaaaacaaaggaaaaattctaagcataaagagtgtgctatgtattatgccttatcattaaaaaaatttaaattattcaaaaaaatttttgtgggtgcatagtagatatatatatatgtatggggtacatgagatgttttgatacaggcatgcagtgtgaaataagcacatcatggaaaatggggtatccatcccctcaagcattttatcctttgagttacaaacaatccaattacattctttattttaaaatatgtaattattactgactatagtcaccctattgtgctatcaaatggtaggtcctattcattctttccatatttttgtacccattaaccatccccacctcccccaccaaccccctactacccttcccagcctctgctaaccagctttctattctctctgaccatgagtttgatttttagatcccacaaataagtgagaacatgtcatgtttgtctttctgttcctggcttatttcagttaacataatgatctccacttccatccatgttgttgcaaatgactggatctcattcttttttatggctgaatagtactccattgtgtatatataccagatttttgttatccattcgtctgttgatggacacttaggttgcttcctaatcttagctattgtaaatagggctacaacaaacatggaagtgcagatctcttccatatactaattttctttcttttgggttatatccatcagtgggattgctggatcatatggtagctcaagttttaattttttgaggaacctccaaagggttcttcttagtggttgtactaatttacaatcctaccaacagtgtacaaatgttcgcttttttccacatccttgccagcattcattattgcctgtcttcggaatgtaagccattttaaatggggtgagatgatatcattgtagtttttatttgcatttctttggtgatcagtgatgttgagcaccttttcatgtgctgtttgccatttgtatgtcatcttttgggaaaaggctattcaaatcttttgtcaatttttttattggattattagattttttttccctacagtgttattttagctccttatatattctggatattaatcccttgtgagaggggtagtttgcaaatattttctctcattctgtggattgtcttttcactttgttgattgtatcctttaccatgcagaatctttttaacttgatgtgatcccatttgtccatgtttgctttgggcatctgtgctggtgggctattactcaggaaatctttgcacaaactgatgtcctggagattttccccaatgttttcttgtagtagtttcatagtttgaggtgtttaattcattttgatttgactgtttttgtatatagtaagagataggggtctagttacattcttctgcatatggatatccagttttcccaggaccatttattgaagagactatcctttccccagtgtatgttcttggcacctgtgttaaagatgagttcactgtaggtgtgtggatttgtttctgggttctttattctgttgcattggtctatgtgtctgtttttatgtcagtaccatgctgttttggttactgtagctctgcagtataatttgaagtcagataatgggattcttccagttttgtccttttttccttaggatagctttggctattctgggtctcttgtggttccatataaattttaggatttttttttctatttctgtgaagaacgtcattagttataccttatagtatcttcttggttttccattgctttggtcttctaagtcttatatttttcacagtcaatagtcaaaatctcaagatttatccttaccttgttgaagaaattgggatagtatgtttaagaaattgagatatgttcataaatgatacacaaatgactcttttgctaatgggacctaggaatacccaaacactagctgctgagtctcatcttcagttaagaggtgacatctagaaaaaggaggtgaaacaaggcaaagtaactttttcttattacctggagcttttgtccccagtagcatggcaaacttgaatacgctcttcttttcaacaactaaatagcccaaggataaaggtagaggagctgtgataaacccgaaccctggattctaactccaggaaaccattgaaaggctattcagtcctggcaaaatgaagccatagaggctgtggagcaagggacctctatttgcaatacctcgcattagtccaggtctcatggaaactggcaggagttccaggcaataatttcaggggcgactgctaggtgagggaaaaagtagaaagtctgtggaaagaggtggcgggatctcttctaccaaggaagcaggttgtacccttcccacacttgctgtggaaaagaaggaagacatagccatgaccatgagccccttgtttttcttgttctttgaaagctggatccctaaagcatgtgggccacttggttccctgaaacccgaacaatacaaatcactactcctcctacttagggatccagtaaaaagtaaaaggatggaggaggtgggtgggagtatgaaacagacaaggaagaccttatttacatagaagccaacactttgctccttctcaggggctaccattgcctcatgatgtgccccttgaattcactgctctgattggccagccaggctaacacggctctgctgtgtcctgattcttcactttttttcctctagaatagcttctactttctgttgttctcttctgtcttttagacagtaggcatgcaaagatactgtttctttggagctgttttaaattaatctcaagaattcatgggtgattcactaggtatgactcaagagcttggcttattattatttttttaaaacaatttaaatttgccaatgacttaaacatcccaaattagatcaatccactttttcattaaacttttcacttcaagaaaatcattaggatgctcccattttgaaagtgaaacacacattttctcccaatctattttgtcgttgttatctcatggttaataaaaagacagggatggatgctacatctctgcatattgattaagcaccttatacctttttttatgcaacttgataattgactgaaataaagactctatgatcaaaaacgggactagaaaaaaaatctaactcatcaggatatggacatgttcaaatagctagaagaccagattttgaatgttctcaacataaagaaatgataaatgtttgaggtggtggatatgctaattctcctgatgtgatcattggacactgtatacatgtatcaaaacatcacattgtatcccataaatatatacaattatgtgtcaattaaaaaataattaaaaacaacaaatataaattttttttaatgcatacgtatccaagagatgttaattcagaaactggtaatccggattactacagcttaaaaaaaccagattgttttacaacagagccaaaatatattaaagagtattaagtaatcacatctcacaactttatccgatggcattttcctggcctactcccctggaagtgtatcttttttttctctatcatctccattttcgttctccaagagtaaaaattctattctgtggacatttgcttgctctgatagtcatggtgagattgtgttctca

SEQ ID NO: 905 - DNA, 6000 bp, Homo sapiens
atctatacatcatggaatactaatcagccataaaaagaatgaaattatgtcctttgcagcaacatggatggagctggaggccattatcttaagtgaaataactcagaaacagataatcaaatactgcatgttttcacgtgtaagtgggaactaaacaaagggtacacatggacatgaagatgggaaaaatagacactggagactcccaaagaggggcggatgaaggagcctggtggtaagggttgaaaaagtacctattgggcacagtattcactgttcaggtgctgggtacactaaaaccacagacttcaccactatgtattacatgcatgtaacaaaactgcacttacatcccttgaatctataaaaataaaaataatttaaaaataaagaaaagaaaattagtgaaggagtgtaaccactttggaagatggtgaaaacagataatgtaagtactgaaaatagactttaagatttagcagcggccgggcgcggtggctcacgcctgtaatcccagcactttgggaggccgaggcgggcggatcacgaggtcaggagatcgagaccatcccggctaaaacggtgaaaccccgtctctactaaaaatacaaaaaattagccgggcgtggtggcgggcgcctgtagtcccagctacttgggaggctgaggcaggagaatggcgtgaacccgggaggcggagcttgcagtgagccgagatcccgccactgcactccagcctgggcgacagagcgagactctgtctcaaaaaaaaaaaaaaaaaaaaaaaaagatttagcagcagcagttgagcgaagaaacagtttgatatctccttgttaaccatgtccacagaggggtccatatttttcttctttatgaaaccacagctgcctcatgaagtagatgcattgaggacacatattgcaaaatttcaataaaggtcctgaaacacatgagtattttcatagaatggaaattaagaagaaaaaaaaaagaatagaagtgaaaccaagatttcccaaagcaaagatttctgggattaagagatgagacgagatgagtgaagctgagtgtgccatgcacttctgtaggggtaatgtgagtttggggaaggaaaaatgcagtaaaatgagaaaagattaggccttgatagtgcatagcaaattattgtagcatgcctcctcaccatatgctcattccatgataaattcatgttccaagatgaaatgagaaattaagatgcatgggtttggagattctggaaaggataataataaaaggaacctgcatgataaaaaaaaaatcccaaacaaaaaaccacacccaacagatagtctttttcaaagctcaattattacacaccattctctgccttattaatttgggatgttattctgcaatgtatcaaatctttacaatttacagttcctatacctggtttccttgcttatataagatttactcagacaaaatctgttttgctgatgggctatgaacccctcaattatttgttgttgttttcttttggtttatgagaatacaggagtcatgatgtaatgttgctatggcaatgaatatgtacaaatagatgattaaggtggcgggggggatgttaaatcttgaaaaaacacatttgcatgtaaattctttccagtgaaataaaagaatcttgcatgtaaatctttttctgttatgtgcaaaaatatgaaagaaagacgtgttatatcacatcttgaataatgcatttctattgtttatattcaatgacatgaacaactaaatatggtccaaagagtattttttattaatggttcatttcaaaagacattggattaagaccggattaatttccatggacgtgtgtgtgtgtgtgtaaataaagtataattgggacacattataaggactaagatcttttcttggttgccatgagtgtggcattaagaactcaagcatataacgaatatttataatttcctaagagtacactttactagctattaggattcaatacactgagagtagttaacatcttactgcaaagctttcatagtactgatattggaacatgcacaagagggtggggaaaatggtatttaaagacctagtttaaaatattcctacaaataaagtacttagatttttgatgtactaacctttcttgatgttttacagaactttgaaccaataatttaaaagatcctgattcctttattggctggccatatactgactgacaagatacctaactactcttttttttttctatatatatactgttcttaagacaaggtaaggatccttgccatctgttaaggattctttagaccagtactgtccagtagagttgtaatgtgggccacctgtgtaatttaaaattttctggtagtcacactaaaaagtaaacagaaataggtaatattgatttaataatatattttattcaactctatgtccaaaatactatcattgcaacatttaagcaagataaaattattagtaatgtattttttacattcttattgttgtactaaatctttggatctagcatgtattttttatttacatcatatgtcgattcagtctaggcacatttcaggggctcaatattcacatgtggctagtggctaccgtgttgataacgcaccattagactaagaggaaagcattgagtttgtgtagaatattggagttattcaatatttgacttcttggaataataagctttttttttttttttttttggagacggagtcttgctctgtcgcccaggctggagtgcagtggcgccatttcggctcactgcaagctctgcctcctgggttcacgtcattctcctgcctcagcctcccgagtagctgggactacaggcacccgccaccacacctggctaattttttgtatttttagtagagacggtgtttcaccatattagccaggatggtctcgatctcctgacctcgtgatccgcccgtctcggcctcccaaggtgctgggattacaggcgtgagccaccgcgaccggccttttttttttttttttttttttttttgcaaatgagagctttacaacttgcagaggatgttgctttagagacaaaataagtatgtggggagtaaatccctgccattgttgtaatgtgtatggtttaacaatgctctctcatacactaccctttttgatcctggtcaaagttctgggaaatagggaggaattaagttccatttacttttgaggaagcagacccagaaagttcattacattctgctatttaggctcccggtatcatgatctattggcagatcacaatttaaggtgcagttatcaaataattagcaagccaaaccagacaaaatataatgtgtcctagcagtttcttgcctttttaaaaaagcatctgttttgtgggtgtctgaaagggctcagatttgtcccacatctccagttttttgtttgtttggatccaggataaaacaagaacaaagtttttttgtgcttaggaatataagatggtggcagaaaagatcctcaggatgccacccacatctcaaagtccaacaaccatctcatctcccatactgtgatcctttgataataaagtcaattacatacaacatttcaccataggtctttcatagaacttagaacacctagcatataatttagtcctgagctaggtgaagaagcaagaaatgttttactctaaagcaatttttatgacgctatcacttttcaaggaacccccaacagtagtaataacaccagtattgtattcttgctttttcgcgttgttcagattgaaataatcccattcactttaatgttcaggctccataggtgaattgaatttaatttctataaattggtaatgttgccgttgtccttatattttcaggcacaatccaggccttatattttcaggcacccgtttgacagttagcctctagggattaaacaatactcaaacaagtttttcatatactactttaaacaattcttccccttcccttaatccgtgtgtgtgtgtgtgtgtgtgtgtgtgtgtgtgtgtgtgtgtgtatgttcccttagttcttcaattgctgaagttgtagctgccgaaattatcttccataggtgaggtcttttaccaccagacgtgggtcacacattgtagatggccacatcacctggcgcaggtggtccagctttggtcgccattcatagagggaagggttcccaaaaggcacccaagaagagatgaagtttgttaaaccaaagcttataggtccagaaggcagtcggacaactggtcatttccagggatgaacagagagggcgcccttccccagaggcacaaatggccaggacgcaggggtgggacaagccagtaggaagcccgcggggctctcacagcgcaacctggttggacttaaggaccctggacaacaaacgtcaggagagctaggaggctggctcttctgcgggaggttatagagcggatcacctgggcgcaatcgccgcgtagttgaagtttccctaaagtctcagtggggcttttcctcccgtgagaagccccattcctgagtatctagtcccggaggctccgcactgcttccccacgccccctctttcttcgccccagctctgggcgatctcactgccgggcacagggccgcctttgcctgcctgccctgcagcagcaggcccgggcggctgcgagagggcgcagggggcggaggcgcggcaggggcgggctctgccgcccgccccaccacccgctccccgcccggctgcggggccagtggcaggagcgccgcgcaccgccagccgcagggggcgtgggatgggggcggccggggaggggggcgcccacactgactagagccaaccgcgcacttcaaaagggtgtcggtgccgcgctcccctcccgcggcccgggaacttcaaagcgggccgtgctgccccggctgcctcgctctgctctggggcctcgcagccccggcgcggccgcctggtggcgatgacccgggcgctctgctcagcgctccgccaggctctcctgctgctcgcagcggccgccgagctctcgccaggtacggtgctggtttctctcccgacgcccgcgagggtgggagctgggaggaggtctgcgggtgagcacgggggtgggggacagggggtgctccgagcaaactgaccttcggggcggacagggaagcgccagtcggattgagggggcgcgggatagggtgcagcgtgggcacctgacgtctggcagccgtaggggtagacaggtgtgttggggacgaagccgcccggaagagggaaaaggcagcagggacgtgggggaataagtagtaggggtgaggtgggtgactaatttgtgggcagtttgcagcggagaaaataggagagcgtttgtgggtgcgcgcatggctgggagctgggttcaccctgcagggacctggagggctgcaggtatgcgtcggacgcgctctgtgctaagcccctgagagctgctcaaggatggtggcatggtggtggtgggaggtggtgatttagtctgagttttaggaggcggggaataccccaaaagccgcagatgccaagctatggaggcgagagtgggagcttaaatctgtgtggtttgcaacgcacattgctttcgaggtacgatctttactcagagttcctggggaaaaaaattctggcaagcgccccagagtttataacaggtctgtgccttgataggctaaatagagccctctacccaatctagaagccagacgtttctttataatgtttactagaaagtggggcaaatgcatctttggtaaaatcataatatgctgtgactaaaagccctttacctcgaaaactattttcattacattgtcctggattatgcagaggaggagcagattctttgctaactcattctttaaaaatttctatcagacattgaagacatttgcacataaaaatctggtgttttcccatagagctgtgttttgtccg

SEQ ID NO: 906 - DNA, 6000 bp, Homo sapiens
agtgaacaggcaacctacaaaatgggagaaaattttcgcaacctactcatccgacaaagggctaatatccagaatctacaatgaactcaaacaaatttacaagaaaaaaacaaacaaccccatcaaaaagtgggtgaaggacatgaacagacacttgtcaaaagaagacatttatgcagccaaaaaacacatgaaaaaatgctcaccatcactggccatcagagaaatgcaaatcaaaaccacaatgagataccatctcacaccagttagaatggcaatcattaaaaagtcaggaaacaacaggtgatggagaggatgtggagaaataggaacacttttgcactgttggtgggactgtaaactagttcaaccattgtggaagtcagtgtggtgattcctcagggatctagaactagaaataccatttgacccagccatcccattactgggtatatactcaaaggactataaatcttgctgctataaagacacatgcacatgtatgtttattgtggcattattcacaatagcaaagacttggaaccaacccaaatgtccaacagtgatagactggattaagaaaatgtggcacacatacaccatggaatactatgcagccataaaaaatgatgagttcatgtcctttgtagggacatggatgaaattggaaatcatcattctcagtaaactatcgcaagaacaaaaaaccaaacaccgcatattctcactcataggtgggaattgaacaatgcgaacacatggacacaggaaggagaacatcacactctggggactgttgtggggtggggggaggggggagggatagcattggtagatatacctaatgctagatgacgagttagtgggtgcagcgcaccagcatgacacatgtatacatatgtaaccaacctgcacattgtgcacatgtaccctaaaacttaaagtataataataaataaataaataaataaataaataaataaagtaaaataaaacaattacaatctagcctttgaggtaaaagtactgtttttcacaaaaacatttgcaggtaactgtttttgaaaagactttaagctatggaaggagtacttgaaaaatgaatgttccaaaacttatctattgatacgtgactttcattttttgccaaaactgctatgtagaaaagtttttatatgtgaaaacttaaaaaccagaattttaattgaattggtgaaagtgattaggaaattattatcaagatttagtgaacttagccataattttttttctattttaggcttactactatttttgaaataaaaagctacgacagtatccttttaataaactttcctgctaaatcagcctatcagtttcagttaaatggctgaaagtcttgcttaaagtctcagttaaatggctagctattatatagtgtttatatgtatgtgtgtatatatatatatatatatatatatatatatatatatatatatatatatatgtaactaaatttttcctttataaattgtgcattctttgaagactagcaccgcaccatctcttctttaatttttatataagcgtagtgggctggagtcacatattgggcacataaacatgccaggctggtgctagtgtgttacagtctatccttagaacaaacttctgacatgataccagaatctttccattttacaactgatgtatttgaggtgatttttcaaagcacagcaattaagaaatagtattgagatgtgaactcagacagcctgaactcagagtctctgtgcttaaccataccccacactgccaggttaagagcatctaacactttaaattacacaaagcaggctcattattgatacaaatgagcaaacaagtaaaggaacagaacaacaattccagggtttctcactaaactaaaattattgtcattttctttgaaaaagacattattgctatgcatggtcgttaaattgtagtggcagctcatattgttactacttcttaaaaactcaaatgaaaagttgcataacaatgggaaaatacatagttcagcaggatctcctgcctcaaaagagaaaggaaaaagaaacttacatttgggaactggtgaaaaggattaaaatgaaacctagtagaagaaacttgacagaggaaaacaattaattactcaagtgaaaaacagaaaataaactaaatcatgatgcaaaaaatatagatgaaaaaaggatacattgtgagagattgtgtcttggcttttgtttccttaacctcctttctccaaaaagggtcccatcaagactatgggagattcctaaaaaagaagtcccttccacccacacctaatcctcatcactcagacctcatccagcagagagactcctacttgtgagaaaatatgaattgttattgttgggtattatgtgatgctaatagggttagaggaggatgactatttgggaaatcaacctgtgaaactgtaatatacattattatgtagatttactatggtcttcagggcatttatcctcacctgcacattgcatattttttagtcattacttaccatctatcttcccactcccattagaatgtgaactccataaaagtaggagctttgttaattttattaactgcacctagatcagtgctggtcatgtaatagatacttaataaacatattttaaatgactagatgatacaatgaatgatataatttgaatgccaaatatttaaatatctttggtttaaatgtttattatttgagaacaggtcaaataccaaacatttgatcctttctcttccagagcaacaattaagtggtatgaagaaaataacattaactggttccccatattcagtcagcaaccccttctcattcccccatgtttgaaaccaagaaacagaaggataagtgccaggaaaaagaatgttttttggtttgttagtttgtgctttaacatgttgaataaaacccactggcagctgggggataggagtatgtttttgcaacagccttaaaagatattttcatagacccaatacttaaaattaataatttgagtgcttttgtagaaacatctaattggattatcctctatctgggtacaaggtcatctcccaaaattaagtgaaaaaggagtagggttctgtgaagaaacagaaaagaacagtataaatcaggcctacctgcaagcccaaggtttcatttacttcaactttcagtgtatttaacattatgccagctgctatggtcaactcaaatacaactcccaggagagatgtcatcaagagcccaccagttgtgagtagtgtactagttactatgtaaatatatcccttcttcaagcagcttacaatccttcaggggtagaaaaagccttgctacataagataattagagaataaaataagacatgttaccataaagtgctcatttggatattttgtatgcccctagtaaacactcaccaagactctgtacttctattatcctgttcaaagcactatcaggttttcctggcctacacagactttattgaatgtactttgctaacagattatttttcctaaatatgtctctttgataacctaaatgatctctccatcctttatataattctggaccatgagattctagttatggtgcgtatgtgcctaccacccacagtcacatgtggctacagaatgccttcagaatgagtagtaaccttaaggactcacatttatgtggcttctgtaccaaaatgaagctgccatttttcagtgtgaatatgttttttttctctcatgacatagacaaatgttgatgtttactacaagttggtacattagttgctaattaagttcctagctgctccagccaaaacttgctgtattgaatccaagaaaagaatggcagctatatcaaaaataagttgttgggggatttttttgttttgttttattaaaggaaagttgtatattaaagaatatagggaacttacaagctgggatctaggaaactttaagtcttggcttccttctaagctgagttggtggttcaagtccatccacatctgttaccaggtcctggtcaaagctgcataaataccagcaatctaaatatgaggcagtaaagttaactgtttattgttactcactttttcgaacccacctccaaattcccagggaaacaagttagtgtttgggaacccacaggaggtcaggtttattttaggaaggacttcctcctgtcttctccacatctctgcaaagatgtcttctgagcttcatctctcacctgtccctcgcagtctcaccaccctcagccaggcctgcctacattcaccagccgagggtaactccctgttcacgtccgggtctgtggcagtttctgttcacttcccctttggaaagtcccaaatcacatgcttttatgccctgcacattttggcctacaaaggaccttattgttaaggcagaacctgctgggaaaacaaaatatccgccggaggagctttgctagagcgttggtcttggtgtcagagagaattcgctttccttttctgtttcccgcggtgtccttaaccaaaggcctcctctcttcacccgccccgaccaaaaggtggcgtctccctgaggaaactccctccccgccaggcagattacgtttacaaagtcctgagaagagaatcgaaacagaaaccaaagtcaggcaaactctgtaagaactgcctgacagaaagctggactcaaagctcctacccgagtgtgcagcaggatcgccccggtccgggaccccaggcgcacaccgcagagtccaaagtgccgcgcctgccggccgcacctgcctgccgcggccccgcgcgccgccccgctgcccacctgcccgcctgcccacctgcccaggtgcgagtgcagccccgcgcgccggcctgagagccctgtggacaacctcgtcattgtcaggcacagagcggtagaccctgcttctctaagtgggcagcggacagcggcacgcacatttcacctgtcccgcagacaacagcaccatctgcttgggagaaccctctcccttctctgagaaagaaagatgtcgaatgggtattccacagacgagaatttccgctatctcatctcgtgcttcagggccagggtgaaaatgtacatccaggtggagcctgtgctggactacctgacctttctgcctgcagaggtgaaggagcagattcagaggacagtcgccacctccgggaacatgcaggcagttgaactgctgctgagcaccttggagaagggagtctggcaccttggttggactcgggaattcgtggaggccctccggagaaccggcagccctctggccgcccgctacatgaaccctgagctcacggacttgccctctccatcgtttgagaacgctcatgatgaatatctccaactgctgaacctccttcagcccactctggtggacaagcttctagttagagacgtcttggataagtgcatggaggaggaactgttgacaattgaagacagaaaccgggtaggtgtctgttcagatggagctagccttttaggcagattttgcaaagcaggcttccttgtgcgtttgcccctttccaaatgtgcttgacctctttgggcaaatctagtttcttcctttgagaagacaacatctaggcactttaagacaattttaaaaatttaaacacaaaagaactacttttctaatgttttcactgaagtaaaaaggagttaactctagaatcgtaatgtgtattaacaggtaacttttattgaacacttactatgtgcagttggtatcattttcaaaatgtattactacagttcatgttcagagtaacccactgaggctcctaatgttattaactccattttacagatgagaaacctgaggcaggttaaataatttgtccaaggtctcccaggaaaaacagtggcagagctaagaatttagcttgtgatagtgttgaatgtttttcttatttaatgtagttccatggagca

SEQ ID NO: 907 - DNA, 6000 bp, Homo sapiens
caactagtgaataaattcttactaatttgcatcactacataagttattttatgaaatatctttgagcatctcttactgtctgattatcatggtctttgcacatggacataggccacactggtggtttattagtctctcaacacctctgggaatttatagcagcatgtaaaatattttggccagttgtacctaattttacccttgagtttctgcaaacatttggatggctgccaccaggatttgttgatctacttattcctctgtattgattaggtcaagagtagtcttagtgctatttatcatgtttggatttgatacttctgaatctcaatttcaaaaaccaatttaggaatcagttaatgacttcctcaaagaagactggaataaaaaatgatttttttctattttgtttatatcccttgatatgttatgagactggagatattaaatagttccactgatccttcagcttatttttttagcaaatttgaagctcttaacttttattactttggtctcttacaagagtgttctcgattctgagctacataatttttgattcatctgcactaccactccttaagatcttttcaattccaatcacttgacaaatttctgactttcaaaaatataggttttattaagatagtctctttggacagttaggtatgaaaaatttttatttaatcatttgatctgtgccaagcctcatctatttccttagtggtcattatattatcccaaaaccttacctctacagctcaatggaagaaacttcacttaattaatacataacatattgaaatcccttcctattacaacctgctctaattttggactttcttaaaagttgtccattatgttactctttaggcttatttctattttcagcttttaaagaatattttattatttaatttagggtattttaacctttagaaattttgtaatatttctcttgttatgaaagatttttaaagtcactcagacacactctcagacggtctattacctttgcttcaggcaaacaaggcaacatgcagctgagctcccgtggccatcaaaggcctgactgtcactgctccttaggaaagcatctccctctatcaatatcagcctgtgatattcccatcatgtcacgcctgtctgatgagtggtgtaaggtagagacctgcagcagcaagcaaggctcactttctgcctctgctcctattctgtttctctgaattgaaaagatggtctggtgatgagtgtgtttgctagaagacccttgttctgggtgtatataaagcactgtacttgtctccatttctttatcttccatctgtttttccaaccaccgcagtcatcctgccctaccccaaccactccactgaaactgttcactgtcagttcaccaagaaccaaattgcaaatttcataggtaacaacaatgtttctaaaatttgagtgtgcttgtggatcttgttacaatgcagattgtgattcagtttactggggtggggcctgagattctgcattagaaccagctcccatgagatgtctaagctggaatcagtggactgcactttgaatagcaaggcattagccctcaccataatcgttcaccttcctgaaattctctactcctttgggttttgctacaccattctctcctggcttccctcctcgctaactgttcctcctaagcatcttttcttcattctgctttctgcttgttctttaaaggtaagtaaattccctgagtttcattctcaacttatttctcctcttcctagagtgatgattctcaaactttagtgtacaaaggaagtcagctgaaaaatgttatcaaaatggagctccctaagcttcattccaaaggttctgattcagtaggtatggggtggagtctcttagtcagcatttttaattctgctaaagatgtttttcttttttaaaaaataaatgtatataaatatggcatacgtaacctcatattgtcttaattaaacacgatgtatgtcataacctcatattatcttaaacacaatatttatatatatttaattagtaaaagtttgctatagtgaagcaaactaacatatccatcatttcatatagctatacttttttgttgtttttgtggtaagagtagctaacatctacttattttacatgaaacccatagtacaatttcattacctgtagtcctcatgttgtacattagatctctagacttgttcatcatatatatatatatatacacacatatacacacacacatacatatatatatatatatatatgcttctttgtatcctctgacctacatcttcccatacccccagtccctgcctctggtaatcactgttttgttctctatctctatatatttgatttttttttttacaaagattctgcatataagtgagaccaggcaatatttctgtgtctggattatagcacatagcataatgtcctccaggctcatctacatagtggcaaaaagcaagatctattttttaggactgaataatattccattgtgtatttgtaccacatttttatccccttgtccatcaatgaatgcttaagttgtttccatatgttggctattgtgaataatgctgcaatgaacatggtaatacagatatctttacaaagttgtgattccacttctgagtatatgcccagaagagagattgctagatcatatggtagttctatttttaatttttttacaatcatccatactgtttttcataatgctgtagcagttgacattcccaccaacagtgtacaagagtactcttttctctacactctctccaacatttatctgcagacattttgataacagccgtcctaataaatatgaggtggtatttcttagtaattttgatttacattgccctgaggattggtgatgctgagcatattttcataaacctgttgtccatttttatgtcttctttggagaaatgtctatttgggccttttgtccattttgtattgggtttgtttttccactgttaagttttatgagttctttataaaatttttatattaaacccttagggtgctcatttattttcattactttaaccgaaccctagatgctgggggttccaaattgaacctacatcccagccttatttatgagtttaactgactatttaatattttaatctggatatccaaaaagttcaaaacgttcaaattaattttgttattttgttcccaaatctctaaatctctcttttttttttttttctgagacaatggcatcatcatctaaacagaagaaatctggttagaatttgtgccctgcaaatacttgcctacaagtctctgtctacaatcacacttgacatataaatcacctgggagagcttgctaaaaatgctgagtcagaaactcctcaaatgcttattcattaaatctggaggaggcccatgaacctgcatttttaatgaatcttcccctagtggttctgatgaagatggccccgaacaactatttctaaaaatgctgtctgtcctagggattcctccagttattcctagcaataggaccacaaaggctttgaaagcatttttcacaacagaggacttggcggtgggaataagcgatagtttagtcttccccataatctttagcagagcctcccaaagctactctaaataacagtgcaaactaagcaaaatcagtgcactcctatctaaagttagtatcagtttaagtcaccagccattcctttcctaacaatattgacaccccaagcccttcctgtacagatattcctggactaatgatttgccaccatgccagtaactcttaaagaatgcttgcttgcccttccctctaattttactccctttggccttattcccatgaggacacattactgatttaagaaattgaagagcaaggcttataaatacctcaagtagccagtacatacctctatagtggtgatatctactgtatatgtctttctaaggaaatttttcagaccacctccactagaggaagctcaattgagagaatttttatcataaagatccctggtttgtattacagtattttaaaaattaaactgtttgaaactggatgaatttgctttattgccttaaaaaatcctaatttggtgttttctttaactgtcctttaatgcatgttatgcctctaggttcagaagtgaaatgatttttgtttaagtttattagaataaaattggagttcagctggtcactttgaggcatggcaaccaagtgactgatctctttttaatctttaataagttccattattcacaaattgatggcatttaaggaatctgaagtaatgcaaaccacataactgtgaaatatttgaatattctaatgctcagaatgaaatatttttcatactgattaggcctcgaaactgcgtttgaatgaaaacattgtcaaacagaggttgtagtgcaaataatataaaacataagtataaagggtgttgattcattttaattctatctctttgcaaactgaatatgcaaaatgtcatcttgatgttcagtctccctcctctgtctgcatatcaaaatgtataatgaggaggtacacttttttcactgagaaaaatcagtgggaactaaaaaacaggcaatttacctaggttttactatgagcattttgctttgatttcaggtaggtgaggcattgattaactttatttttctaaatccaaagcaagactttttacttcagctgaggtcatctgcagacattttccatagttgggagctattttttgaaatatcttgcatctctgcttttctctccatatttcttttctccactcgcttcctctctcccagctgcagggattcgtcctctaaaagagtggaggtgggagggaacaagaaatggaagcaaagcagggagcatgagctagagaatgccaggatctggcttttgttattggttggctgccgcctgatggatagacgagggaggagtgtactctcttcagtgtgttctgacggagccgaagtacagaaaccatatttacaggtaagagcgaaaaataaaaaaaaagaaaagagaattctttttttctttaaaagagaatgcttcttaatttttacggaaacaattttatagtaggaaaattattctgaggacattttctgaaagtgtgtcccttttattacttgaggaagctttgcaatgagcttgctgttctttctctctgcaaaatccttagctgattaaaaacaaaacaaaacaatcaccagaggcatgtcttatcctaaataactttctatgcaagtgtcactgaagcaaaattaatagataaaatgaatcatcatgtgtctcttcaaaaatgtttaattcaagcttgttactaggaatcgcaggaaggatgagaaaacctcggtaaattccacaggtcctgagaaaatggagccttctgtgaatatacaatataaaatttcatgtgatggcttttaatattgacaatacagtaaaaggcttaggaaaactatttttgcaggttgtagactcttttagcattaatttagaatgaatgatttgtgtgcatttaagccctgttatttaacttactcctcttgataaatctcatgttgttcaatatttgcattattttattcagcaaactttaagcttatgtgataattaaacaatggtttgtctctacttgttaacttacatggagccatttttattttaaagcacagaaacctaattttgaaagattaaacattgctgtaaaaaatagcatcttaacagtcatgtttcatgggtagtttaatttatcagtcaaacacatctagataagaattccatcagagcatttatattgttgataatatctctaggcaatttttttttagcaactttactaggtgcttgtatctcctaatatggtcctttatattgccttagggaaaaaagggacaagttctaagtatgtagaataaataacacacttgcagtaaaaacatac

SEQ ID NO: 908 - DNA, 6000 bp, Homo sapiens
ccatgttcaaatgatttatgtacatattgtagatgcagtagcagcaattatagagctatccctaccacttaacctgcaacattctgaatggccattcactggccacttaagctaacatctgctgctttggtagtctaatatccaaatagaatgaaaaaccgaaagggtaaaactccagtaggcttgttcacttcaataggtaatggtggcatgtgtgtgtatgcatgtgtgtgtgtgttttaagtcttagtttgcattatccaaaattatctgttttttatctttgcataactaaaacacatttgtcttttccacactttttttttcctaaattggaaatcagacacaagaaaaaaatataaacactgtccactgcgtactttatttaagggaggtcctgttgttttacagttactctcagcctcccaaacataacattaacaatgtttgatactaataatttttcacaatgctggaaagtttaaccaactaaggcaaatacaaataaaaatacctgtgaaattactgaatctatgtaacaaaactagtttcattaatgctcttttggatctaattggcagcttaatgattgaaccattgacttttaaggctatcaataagatcagagaccagtttatctaaacaattttaaatatttcatcattctttctgatggattcctttcttctccttcctctctcaccgcctttatttcatgcccccattgtttttccctgattcttcatcagatctcagctgctgccccagtgctccaccaggctagcctctcctcaactgccaaaattgtcttctttactcattactttgcccatacctcttatcttatcccctggtgactttacaatgtcctgcatattgcaaacatcttctcacactcagcttcagaaggatctaagagagagcaccagacatcctccttcaaagtctcaatacatgcctaaatctcctgtcacccaagtctcttcaaagtccctcttattatagttagtaaagctcttgtctttgtttctgggcttttcccaaagtaccacttactactaggaactcccttttctcccagaatgcctatatgtgatttctccagcatgacagcctcagggcagtgaatcctcttacatggcagctcagagttcttggacagagtgtttcaagaggctcaagtggaagccacagggtttattaggacctagacttggactttccagagcatcactgctgcagcctctactggttaagcaaatcactcagaccaactaagaataaaggtggaggaaattagactctacttctggctgaaaagaattgcaaagaatttgtagccattatttttattttatttaaaatatcttattattaagataagttttgtctcttctaaattataatatccaaaagtaacaggataaattacaatttgacatttgataaattattttaaattacaaaaataatttttctgattttagcagatatattgaaaataaataaatgtatacataaaatacatattcacacaataaaatatgcaaacttttgaaaaagtaccatttaatactttcacataacatgctcagcacatttttttaattttaagctaaagagactatgatcttcttgagaacagtgtatatttcatttttatatccctagcaactctctcagagcttggtacatggtatcttctcaataaatgtttgttaaattgaattgaattagtcctggattttgaggttgacgtagccaatttattgacttctctgaatgtgttgtgaaggagaagaaaatatagcaagaaaatccagcctcatcaagggagaatctaatagtagcaagtggtatacataccagttaatatggttccaggaaacacaggtgatggtgttagtaaatctttcttcatgcagtagaatgttcaagagatcgtccagttaacataagctcatgtctaaattactgcaagaactggatagcaaatattttggattacttctgataaggtttggttattttgtaggaaaggggagtaaataaaagaattctatgaggcctatttgtctttagagaaaaaacaagctaacaaagagtcaattgtaagagttgacataatttttttccaattcacagcttttaatatgccaaagtaaattaaaacatccttttaatcttggatggaatttgcttcttaaagctatgatcttgtgtttctttgttaatttcatatttaaaaaattcttggcccataaacttgttttataagcagagccaccattgttcattgtgtaatttgagaatctctggggctatcctcttgccatctcactgattccagagttttgattagaagggtgggcatattttgtaatttgtttttatcctgaggcaattttatgagatttcacattatagtacttcttaagtttaattctattttttctgcatgtattagaaaaaaaaaatcacctcttacttccaaaaatcctatctacttattatacttgtttgtctgtgttgttagaataatttatttaaaaattcttttaagcaatcattagattttatatcatatctttccattttattaatattagttgacaatacttggttaaagccaatttaaagaactgaagtacaaattattgctataggtttccatgacatactttccaaagacttttctgttcctggtgtgcagacttgaaaactaaggcataagatactggaataactcaccaaggtcatctatgagaatagccgacctggagagattattaccatcccgtgattcattctatctctttctagttctgatatccacctttaaatatctttttcaacatgaataaattgtcagcttcttatatttaaaaccatacactatagacttcccattggagactcacaattttactggcaatgtgttttaattgctagctattttcatattccttgtatttattttcttattgttaaattattcctttgcatatatacacacaaatttcacatatatgtggattttttttcccaatttctcagctcttgttctcccactctcactttctaaaaacttgcaaataacttagttttctgctgattctttccttccattgggcaacctttttatttcaatgtttttgaagtaatgcagtaaaaaaaaaaaaaatggctgccttttgtttacttccttgtacattagcatgggtgacatgatcaaatatattaactaggatgtacatatcttaagaacccagaagtatactataagcccttttcttttaatgccccaaagttttgcagctttagcatagctctaatgctgtgctaaaaatgaacatgaacattttgggacaaatgcattaaaatggtggtatctaaaacatatatgaatatttctttcaatgttaagaaaaacccatcaaaaggtatttatttaagtcataaacatttatttaagtcataaacattctagatcaatgctaaccctacaaataatatcataaagaaaggtattaactcattgtatttaaaagctaagctacttaaccatacttacctattctggttttaaattatttttaaaactttcaattgacacacaaaaaattttgagttataatattttttgccccaaaagaatttcttactaatggaaggcttaagcaaatatacatatatatgtatattcactttttaattactgaattatttataagtgccgttaagttactatatatctaactactcagaaaatttattttctcatctgtatttatagtgcttctgacttttccttctgtgtgtgttctttgttgcacttcgcatgtatttgtcataagattttcactgagacttaaaagtaacaagctttcaaacatcattttaatttagacagtcattaaagagataagaaatcgatgttttaaaataagttccaataactaaatagttctgtatttggaaatccaaattccattttcagtttttaagaaataattttatatatttaaaaaaatttttagaaaggcaatctgactacacacacatacacacacatatttgtatatatattaatgtaatatttgtgtggtggaaaattcctgtaaatgttggatagttttccctgaaactacttgttaacattgaaatcagataaggtaaatcatatgttttattgaggtaagctgtctaaaataagttaccgcaattttaaaaattaataaaaaccatatgtcctttagaacttaaattgaaatctgcattgttcctttaagtcagctgttctaggaatgtgtcatcttttgaaaagataaattaatcatctacttcatctatatacattaataaaaaagattcaccttctcatctactttatcaaaagtaattagtatatctatttttattcacatatagtatcttttagtgattgagattttaattgaggatattttgaaggaaacagcaattatctttttacaaaaaacaaaacaccaagaaaaagaaatgccagcaatctaatggttaaaacatattgccaaatcattcagtagcgcaaggctctttaataacatttgtacaaaagtactttcagaaaatatgagataggaaatggctttttgcaagttctccttccttaaattattattcaacctcttattaaaataaaatctagttaacttcttttggagcttgctcaaacattttctataataaaaaaaaatcttgtgaagggatttccataagttgtgctgcattaatgacttagagcagcttccttatctgttattccttcctcctagtagacctcagatgataaaaatatccatagacacagtgaagtcagtggcacgcctggctctctcagacaaaactccatgtgatcacatataggcagcctcagtgaggctgatgccgtgcagcaagcagtaggtaatgagtctttgtgcagagtgaagctcttgttgctgaacaataaagcatatggtacaagcaataaaacacagggctgggaaatttaagaagattcctctgaaccaggaagaactgtgtcttcggtgatgctgacacatatgataaaatgatcatttattttggatcctaatgaataaagagtgcaaggactaagactacagttatttgaacaggttggtgattttataaattactccaacacttccttgtgtttgactggatttaaattagaatgggctggtgtgttttgccttaaacaaaaactttgcaagatatttgtagtgtataatattaaggatgcacttgaattgacccaatgcgattaaattgtcgatgtagtcagatgtgacagagaaatgttgatatcattatattaaactgaaaagttatttagtctattttaaaaatttatgggtaagaaataaattcatccaataatttttaatctcctgtgtatgcagaaataatataaaagagaatactactgacaaatagttcacataaaaagcttcaaaattatttttccagtgttaaaacaatctgtattgcaatagtttacatgtcttataaattagataatatatcattcaaaatttgttgatgtgtgttagtatactgcaaaaggaaggtttggaatatttaattatttgaattaaaaaatttaaaaacaaggaaattttgaaatgtaaataacactattagaacaatgtattttatactttagtaacacatatctgtatttatttgttgtgtgcttttaatttttcatgttatatttcttttgacacatgaaaaagattattgcacaaaaccttttattttataaatattattcattgatatttagagaaaaacaaatttgcttaatttttaagagaagagattatttgatgatgcatattttcattggcttaccatttagaaagattatgtgtctttatgtatatttataaaatatgtacacacatgactttttctatgtagaaaataaccacttcttccatttatgag

SEQ ID NO: 909 - DNA, 6000 bp, Homo sapiens
gtatttaccgcagctaagattttagaaaaaatgaggatggggagggtgacatttttcaaccatctgttaagtgccaagtgctttttgttaatgacatatttttgactaaggatcatgtttgactgatgtaatttttttttttttttgagacagagtctcactctgttgcccaggctgaagtgcagtggtgcaatctcggctcactgcaacctccgcctcccaggttcaagcgattcttctgccttagcctcctgagtagctgggactacaggtgcgtgtcaccactcccggctaatttttttttttttttgtatttttcagtagagacagggttttgccgtgttggccaggctggtctagaactcccaacctcaggtgatctgcctgcttcagcctcccaaactgctgggattacaggtgtgagccacggttcctggcctggctgatgtaaatattaatgcaaaaattggaagctaagatgaaagtaacactaattagtaggagtagaatttatttcatattaaaatgtattgtggtgtaatttttttgttgtcgttgttgagacagagtcttgctctgtcgcccaggctggagtgcaatggtgccatctcggctcactgcaacctccgcctcccgggttcaattgattcttctgcttcagcctcccaagtagctgggacttcaggcatgcactaccatgcccggctaatttttgtattttttttagtagagatggggtttcaccatattgaccaggctggtctcaaactcctggccttgtgatccatccacctcagcctcccaaagtgctgggattacaggcgtgagccaccacacccagcctgtgttgtaatttttatggcttggctaaagcaacagttttcagagtgcaccctccttggtgctactcacagagatgtgatgtgctgttgctgctttctaactctgcctactttgtgacctcttaagaggatgaagttgataaagtaaaccagtgtcagtggctaagtctagaagacctagaaaacataggaataggtcctgaacctattgctcttgcgattgcactgcagacatcaagaagcaggtggctatttccacacattgagatctataattcgcaatcccgaagatgatggaaaaaataccccttggtgcattgcagagatgctacaaatcaccaagcaagccatgggattggctgtacctttaattgagaaaaaaaacttgagaagaagagcaataaaactcacgaggacatcattggtatcagatctcaaaaccacggctctttggttgagggaaacaattttttaatgagtaaatgttcatctccaaaccaaaaagtgaagtagaccgtattccccaatgtaaatattggcaacctaagaaagctaggaaattttacaagacttgaaacgaaagttaacttctttttttcttttttcttttttttttaagacccagctatcagagactttctatgtcttagcagcctcctgataaaggaagtcaaatgaccaatcaagtttttagtgaagaaatccaatcaggccaggtgcagtggctcacgcctgtcatccaagtactttgagaggccaaggctgggggatcacttgaggtcaggagtttgagaccagcttgaccaacatggtgaaacaccttctctactaaaaatacaaaaattagctgggcatggtggtgcatgcctgtagtcccagctacttgggaggttgaggcagaagaattgcttgaacccaggaggtggagattgcagtgtgctgagattgggccactgccctccaggctgggtgacagactgagactccatctcgaaaaaacaaacaaacaactattttagttttgatggcttaaccattcattccctatgtcttcatggttaattgaaggttactgacagtagacaaaaaatgtattctcatttgactctaatttttcccatattctacttgaacaaatttaaaatgttctgctgcctatacaccccgacatctaggagtattaagactagtcagtcataaaataaacctgatacatcagatgaatgccagcacctattcaatttcgttttgctctgttttcagaaatgtcagaataaatatatattggttactggacattctagaaggaagtcttcaagttttaatttttttccagtgtgagcatgcctcaacattttgcatagactgtcagaactattgaaaatttaggctgggcaaggtggttcatgcctctaatcccaagcactttgggaggctgaggtgggtggattgcttgggcccaggagttcgagaccaccctgggcaacgtggggaaaccctgtcgctaccaaaactacaaaaagttagccagctatggtggtgtgcacctgtagtcccagctactcgggaggttgaggcaggagaatcgcttatacccaagaggcggaggttgtagtgagcggagattgcactactgcactccaacctgggagacagagtgagaccctgtctcaaaaaagaaaagaaaagaaaattgtgctaaaactggttttatgacaataaccatgaccacataaaccaagagtctcctctgtaacccacacaataagaaagttgccccctctccctctccctctccctctccccacggtctccctctccctctccctcacggtctccctctccctctctttccacggtctccctctgatgccgagccgaagctggactgtgctgctgccatctcggctcactgcaacctccctgcctgattctcctgcctcagcctgccaagtgcctgcgcgctgccacgcctgactggttttcgtatttttttggtggagatggggttttgctgtgttggcggggctggtctccagctcctaaccgcgagtgatccgccagccttggcctcccgaggtgccgggattgcagacggagtctcgttcactcagtgctcaatggtgcccaggctgaagtgcagtggcgtgatctcggctcgctacaacctccacctcccagccgcctgccttggcctcccaaagtgccgagattgcagcctctgcccggccgccaccccgtttgggaagtgaggagcgtctctgcctggccgccatcccatctaggaagtgaggagcgtctctgcccagccgcccatcgtctgagatgtggggagcgcctctgccccaccgccccgtctgggatgtgaggagcacctctgcccggccgcgaccccgtctgggaagtgaggaccgtctctgcccggccgccccgtctgagaagtgaggagaccctccgcccggcagccgccccgtctgagaagtgaggagcccctccgcccagcagccgccccgtcagggaagtgaggagcgtctccacccggcagccaccctctccgggagggaggtgggggtcagcccccgccaggccagccgccccgcccgggagggaggtgggggggtcagccccccgcccggccagccgccccgtccgggagggaggtgggggcggtcagctccccgcccagccagccgccccgcccgggagggaggtgggggcggtcagccccccgcccggccagccgacctgcccgggagggaggtgggggggtcagccccccgcccggccagccgccccgtccgggagggaggtgggggggtcagccccccgccccgccagccgccctgtccgggaggtgaggggcgcctctgcccggccacccctactgggaagtgaggagcccctctgcccggccaccaccccgtctgggaggtgtacccaacagctcattgagaacgggccatgatgacaatggcggttttatggaatagaaaagggggaaaggtggggaaaagattgagaaatcggaaagttgctgtgtctgtgtagaaagaagtagacatgggagacttttcattttgttctgtactaagaaaaattcttatcctgttgatctatgaccttacccccaaccctgtgctctctgaaacatgtgctgtgtccactcagggttaaatggattaagggcggtgcaagatgtgctttgttaaacagatggttgaaggcagcatgctccttaagagtcatcaccactccctaatctcaagtactcagggacacaaacactgcagaaggccgcagggtcctctgcctaggaaaaccagagacctttgttcacttgtttatctgctgaccttccctccactattgtcctacgaccctgccaaatccccctctgcgagaaacacccaagaatgatcaataaaaaaaataaataaataaaataaaaaaaagaaagttgcacagcatattccaacaaatatcagtttggtacctttagagccttactttgttgtagtgattatcagctgaaaattatgtctgttgtaactttggtaagcattccactttggttatttattagtggtattttttttttaagtgtcaagtgtcaaatcttgggactattaaaataccatggtaagtaaaaaaaaaatatggtctgagaactggtacctatccacgacataagtgcagaaactgagagtatgagtttgcatactttcaaagttactcgacagagttatttcgtatatgctaaaaaataataagaaaaatctgtacgtgtcttttccatgtttacatttttaaatttcattttcctaagtatatttttgtgtatattataaaagtagtagacttccaaggactaggagaacaaccttagatagtagagaatcacctaaacgacctatatcttcttcaacagcttaagctgtgtactgcgctagagcctccctcaatgaggaactacaatgcccagaattcccccaaaatgcgtgagcgacgtccatttcacccacctcgccgcgacccaccctgggatatgtagtgcgtgacttccgcagtgcacgctgcgcctgccgggcattttttcctggtttgggggcaaggtctcatgggaaaggtcatgtctctcgaagaaaggttataaaccctgagatatgagggttgggcgagacatccgagcctgtttcgttccgtgttgggaccaggaataaccctgacttctgagctttcataaccccaggatcctccagaaaatttgcggcgcgctgagggaaaaccttgctggcaagtcgggactgtgtggcagcggctatttttcttttcccacccagcacgttttcgggctggggacatagggttcagttgagatacggaggcttccttcgggatattgggttctctgaagtgcggatggactagggcagggctgagaccccattcattcactcatttgtttagctctcctttatgcccggcgcagaagataccccttagggtcccaaggcccttcctgtagttaagttccttccttaaggtcattcagctggggcaaagctggggactcgacacctttctatgctaaccattgagctgcctccactttgagcagctcagtggatgaatatagtatcttgaggatacctttgatttgtgcagggttttcttgtgcaggtttgtgacccaggtcagcttaggtcaggatgctgtactgcttgccacaaaatagcctgtactgtcgcgtcgttttttcttgtgaacagactgtttggcatagccgtagagaggggtctgagacatgaatttagtgatacagcgttgatttgtttgtgtaatgaagctgttcaagtggaaagaactgagttgtagtccctgcttcactagtactagaaggattttttaaacctttttgaacctattttgccttatctgtaaaatggaaataatatcaacctggaaggttagctgagagaatttaatgagataatgtgtttcaaacgttctttgtaaatggtaacatgttgcagaaatattagattatatgactttagtccctgcttttctaaccattacttctcaattataaatgtaaacatttatagcatatttttaaaacaaattattcttttttcataattatctttagttcttt

SEQ ID NO: 910 - DNA, 6000 bp, Homo sapiens
tctcaaaagaaaagaaaagaaaagaaaatgtctcctcatgctgtggctattttaaaaaattgtcgctgtctttttgcctgcagtttacaatccaacctctagcttggcattcaaggcccttcctaatagttgaaacctctgtactttaccttacacgttatgctccaccacatagtagttctaactacagctctgaaccatcatatctttacacagtttttttccaaaggccatttaatccttccagtgaaatattctttttcattccttgcttgcctggtatgtttttacttgtctttttaatagtaatttaaataagcgtctatgaatttactctatgacgtgtttcttcacacaagatttacccaagatctacccgtttctgttttcaccaagctatgtgcattacccaagctagctaagtaagctctgtatctcacttatatttctgtcttttaatattgttgtgatatttgcaacacagcctggattcagctactgtttgcttgaatagttagtatgctttcagagtaattggtgtaatgtaagatttcattcttttctaaatttagttgctacccaagcattgtgccaaaactatcagtcaagcagtgaataagaaatcaaaaaagcagactggtaagaaaggggaacctgaaagggagaaaccaggtgttgagagcatgaggaaaaacaggctggttgtgaccaagtaagtatccacttatattatacctttttgctccaggtaaaatatttatttcatttttttctattgacattagtactgaggaaatgctaataattgtatattcttcattttccagccattttaaaaaatatttctgagcttaattaacctgttagttgcttatttcatctcaaaatacagattttggcctttagaagaaaatatatgtaatagttgatatttgtctttttatactaagtactgaaggccaattatatgtttaaaaaattttgtgtgttacattataagcaatctgtaatttttaatttatttaaagttagatagtggagactttattttggcatgtttttgatatattagaacatacccaatgtcattattataaaacagaaataacagaccaggtagcattcagggatctttgcttgcttcattgtttggaggggaggtgtaggtgggtaataattcggtaaatattttttgtttaaagtatagttcctactttcttgctaaattgagcaagccattgcccttttatagacaactttccttctctcataacagaaagtacttcaggaattgggcgtgattatctttatgagtgcagaataagctctacctttgtatattaagtcagtatattcattactacctaaaggtagaaacaaatgacgccatctttagaatattgctcttatgtgttagttataaccttaaagattttgaactttctcagtttaggagaataaaaagtcgaattctctaagcattatctccaaataaggttgatatatttataaaattaattttgtattgcctgtgatgacatgtgaacattttaactgtttattaatttttttcagccttgataaattgcacactgcactttctgagttatgcttctctataaattatgtaccaaacatggtggtatgggaacatacctttaccccacgagaatatttgacttctcatctggaaatacgctttaccaagtaagaaagaatattgactgtttttgtttgttgactcagtaatgagtttgttatttaattatacagtgttttataaggaaaagcattagtagaactggattagtgttaagaataatgaaccgggccgggcgtggtggctcacgcctataatcccagcactttgggaggccgaggtgggcagatcacgaggtcaggagatcgagaccatcctggctaacacagtgaaaccccgtctctactaaaaatacaaaaaattagctgggcgtggtggtgggcacctgtagtcccagctactcgggaggctgaggcaagataatggcgtgaacccgggagacacacttgcagtgagccaagatcatgccactgcactccagcctgggtgacagaacaagactctgtctcaagaataatgaactgggaaatgcaaagaatagtgaactgaaaattactgaagatacccagattcttttctcatacctattagtattaactagtaacaccaggcaaaccagttaatatctctgagtcatagcttccttatatacaaagtgagaatattggagcaaatcaatgtatttcatcttgcaggtggcaacccagtaggttcatgaaatcagtttattaggttgtagtcaaagtttagagaaaagtgggagggaaagaaaggacaagaggaagaaaaaataggaaaaaaaacccagtacactgtgtgcattaaatatatatattgcttcgtgaaatgtttcagttacatgtatgcatgtgtattgacttgcagtgttaagatgcgtgtcatgcagtaggtcacagtaaaatgtttgaagacctgaggactagatgaacccttacatgttttctgaattcacatgttgctgttaaataagccaatagaattctagattcttgaattctcaattctaattagaatttcctgttatatatgaatatatattttatgtatgtatatgaaatagtgcattgataagtcagaaacctttcaactttatatatattgttttaacctttttctgaagttacatccttatttattaatatttattcatgaaaatttttatttatttgacaatttttttcttcaaagccttgaagcaatttataaaacaaaattttgccaaaaggttttcaaagtttctgtagtcattaacaggtggtgtttgtatttgcactatatgcttaacaatgtgttaagtactctaggtaataatgagataaagatagaactgtagctggtgagatgactaaaagaattagagaacagaatatgacagtatataaagtggcactaagttgagtgttaaattatcagttgacttgagaagagtctggtgatgaactgtcttttgttctccttagtaagtcaggcatcctgacagtaaaacccagaatgccctagaacttagaccaaaggggcattgtgccttgtggtgtttattattctcaagtgggttagaggtgggacattggtgggtggaagggagagttcagtgtacagctcccttgttttccttgtaaacagtctgctttgttaatccacagagaagcagttttttttttaaccaaacatctacttagtgattaggatcaaggcaaggggaacagcttgtttaccttggaaagattttttattttatttaatttatttatttatttattttgagacggagttttgttctttcgtccaggctggagtgcagtggcacaatctcagctcactgcaacctccatctcccaagttcaagcaattctcctgcctcagcctcccgagtagctgggactacaggcgtgtgccactgtgcctggttaatttttgtatttttagtagagacggggtttcgccatattggccagccagatagcttgtgaatattagtgggttggtttttgtcaatcaactgagcacagtcttaggacttagggattatacactaggatagcagttttcatcttgcgttggctcttcttggcctgtttctagtgatgggatttgtcggttgtcttttaaggattcatccttacaaatacaagtctaagatctttacagatctaatgctcagggagttttaaagaaagtgaaataggggtggtcagtgtaggataagatcatttagggaagtattttcaaaatttgtgtttcctttttagtcgtatacagtttcttgagatataaacagaactgttttatatgctatgagtgattaaagaaaataaagttgtttgttgccttattttgtttgactgtcatacagtttgtttagaggcagcactaagtcaggcagatctgcggtcaaatcctagtcataaccacttcccaacaaaaccttatcaatttatgtgagtcctgagctttatttttttcctctgggagatatagtgataagtacattgtaggtgtttattaaatgtgaggattgtaggtaatttatataaagcctcaaaaactactggcacctaacagtgtcaaataaattcaagctgtagactaaatagttcactgtccttgctacaaacaacttaccatgttaaagcaatttgtaaaaccctctttatacttaaatcacttttgttactggtatacttagaatgtttttaatcattttattcacatttcgttgtagtttttaagttttcttttttcttttttttttaagacagtctcactctgttgcccaggctggagtgcagtggtgcaatctcagctcactgcaacctctgcctgctgggttcaagcgattctcctgtctcaacctcccaagtagccaggattacaggcatgtgccaggcccagctaatttttgtatttttagtggagacaaggattcaccatgttggccaggatggtctcgaactcctgacttcaagtcatctgcccgcctcgtcctcccaaaatgctgggattacaataggcgtgaaccaccatgcccggccttcattctttttttacgctgtttcctgggaagataatgacagtaattttacagctttgtaataaattatttttaaagttaattttattgcttgtttaatattagataacagtaggttgagtggtttattttacatgaatggaaaagtcagaggcttttcttattcttctatcccttcttcccaggtcaattgttgggatgactatgtataatcaagccacacaggaaattgcaaaaccttcagaacttctaacaagtgtaagagcatacatgaccgtactccagtcaatagaaaactatgtgcagattgatattacaagagtatttaataatgtgcttcttcaacaaacacaacatttagacagtcatggagagccaaccattacaagtctatacacaaattggtaaggaatgcatttagaaatttgtagtagcggaaaatttgtaatgaagtacttaggaaaattaatttttttgtgaataagtacttattcatattatcagtcaacttaaaattatatgcaggaatgtatatcatgatacattctgaattaagcagtttcttccggttataagtttacgtttctccttaggtatttggaaactttgttacgacaagtcagcaatggccatatagcatattttcctgcaatgaaagcgtttgtgaacttacctacagaaaatgaattaacattcaatgcagaggaatattctgacatatcaggtgaatagtactataccacagtttagagaatgaagaacacttaattcttttgctagtgtcttgattctttagacttttgattctgttgtgactatttcattcaattatatgcgtaactgcatattgtatcttagaattacttttgcattttgtattctctctttcactctagagacttttatcaggattttacattagtttttataatgagatgttgtattgtgttaatgttcattttcttaaagtatttgctctgtcggaagtataaaattaagtatgttttctttcagaaatgaggtcattatcagaactactaggcccatatggtatgaagtttctaagtgaaagccttatgtggcatatttcatcacaagttgctgaacttaaggtaatatagtctttattaattttagcttttaaacattaattcctgaaaaacatttcagggatatgagcaacaagcctacaatgttaattattttaatccaacatgaaagtactaatatgaaaatgaaaattaaatagctagcaaggcctttttatggcatcttagtttagttttctctattttgtaggtgagaaaatggaaagcgaaaataggtgaattgacttggtaaaggggac

SEQ ID NO: 911 - DNA, 6000 bp, Homo sapiens
cccacctatgagtgagaacatgtggtggttggttttttgtccttgcgatagtttgctgagaatgatggtttccagcttcacccatgtccctacaaaggacatgaactcattttttatggccgcatagtattccatggtgtatatgtgccacattttcttaatccagtctatcattgttggacctttgggttggttccaagtctttgctattgtgaatagtgctgcaatagacatacgtgtgcatgtgtctttatagcagcatgttttataatcctttgggtatatacccagtaatgggatggctgggtcaaatggtatttctagttctagatccttgaggaatcgccacactgacttccacaatggttgaactagtttacagtcccaccaacagtgtaaaagtgttcctatttctccacatcttctccagcacctgttgctttctgactttttaatgatcgccattctaactggtgtaagatggtatctcattgttgtttttgatttgcatttctctgatggccagtgatgatgagcattttttcatgtgtcttttggctgcataaatgtcttcttctgagaagtgtctgtttatatccttcagccactttttgatggggttgtttgtttttcttgtatatttgtttgagttcattgtagattctggatattagccctttgtcagatgagtagattgtaaaaattttctcccattctttaggttgcctgttcactctgatggtagtttcttttgctgtgcagaagctctttagtttaattagatcccatttgtcaattttggcttttgttgctattgcttttggtgttttagacatgaagtctttgcccatgcttatgtcctgaatggtattgcctaggttttcttctagagtttttatggttttaggtctaacatgtaagtctttaatccatcttgaattaacttttgtataaggtgtaaggaagggatccagtttcagctttctacatatggctagccagttttcccagcaccatttattaaatagggaatcatttccccattgcttgtttttctcaggtttgtcaaagatcagatggttgtagatatgcggcattatttctgagggctttgttctgttccattggtctatatctctgttttggtaccagtaccatgctgttttggttactgtagccttgtaatatagtttgaagtcaggtagcgtgatgcctccggctttgttcttttggcttaggattgacttggcaatgcgggctcttttttggttccatatgaactttaaagtagttttttccaattctgtgaagaaagtcattggtagcttgatggggatggcattgaatctataaattaccttgggcagtgtagccattttcacgatattgattcttcctacccatgagcatggaatgttcttccatttgtttgtatcctcttttatttcattgagcagtgatttgtagttctccttgaagaggtccttcacgtcccttgtaagttggattcctaggcattttattctctttgaagcaattgtgaatgggagttcactcatgatttggctctctgtctgttattggtgtataagaatgcttgtgatttttgcacattgattttgtatcctgagactttgctgaagttgcctatcagcttgagattttgggctgagacaatggggttttctagatatacaatcatgtcccctgcaaacagtgacaatttgactttctcttttcctaattgaatgcgctttatttccttctcctgcctgattgccctggccagaacttccaacactgtgttgaataggagtggtgagagagggcatccctgtcttgtgctggttttcaaagggagtgcttccagtttttgcccattcagtataatattggctgtgggtttgtcatagatggctgttattattttgagatacatcctatcaatacctaatttattgagagtttttagcataaagggctgttgaattttgtcaaaggccttttgtgcatctgttgagataatcatgtggtttttgtcgttggttctgtttatatgctggattacatttattgatttgcatatgttgaaccagccttgcatcccagggatgaagcccggcttgtgggagtccttatagtcatttgagagctttcttgttatctggtgtgacaagatgtaccagcctttctagtagctctgtctcttgtgaagagtgttatagagattcaacactctggtctctttaatattgttgaagttgcaaatgtccgtagaaattttcattttaggaaggaactcctttgtcacaatagaaatgcaatgtaatttcttatgcatttttttccccaaataccaatcccatggctttagttactatctaggtataatgactaaataactttccttggcccagctctgtccaatggagatactatgtaaaccacatatgtaatttaaaattttgtagtagccatacacaaaacttagaaagaaacaggtaaagctaattttaaaaacaatgattcaaccctatataccccaaaatgttattatgtcagcatgtaatcatatgaatgaaatattgtatagtttttattatactaaatctttgaaatctggtgtttatcttataacacagctgaatttggactgggcacatttcacatgtggctactgtaatgtacagtgaagctctccttctacctaaaatgttatttcttatttctcatttgcctgctttgttacctgtcaagtgaaatcaattatttctgatttgtacctgtgtggtttttttgttttaattattggtcttaacaatgtgttaggtagaaacctctgtgtcatacttgattcctgcttctctcacacatctaagttactgaatcctttcaattttatctcagaagtctgtctcagatctgcccattaaaatttttttattacacttgcctatttcatatccctttttcatgccttgtctgaactatttctagcagctctgttacaattttcctttttcagtgttttcttctgccaatatcagagttatccttagaaaattacctcttcatggccaggcatggtggctcacgcttgtaatcccagcactttgggaggccgaggcaggtggatctcctgaggtcaggagttcgagaccagcctggccaacatggcgaaaccccatctctactaaaaatatacaaataaaattagctgggtgtggtggcagtcgactgtagtcccagcagctcaggaggctgaggcaggagaacccaggaggcagaggttgcagtgagctgagattgtgccattgcattccagcctgggcaacaagagtgaaactccttctcaaaagaaaagaaaagaaaagaaaatgtctcctcatgctgtggctattttaaaaaattgtcgctgtctttttgcctgcagtttacaatccaacctctagcttggcattcaaggcccttcctaatagttgaaacctctgtactttaccttacacgttatgctccaccacatagtagttctaactacagctctgaaccatcatatctttacacagtttttttccaaaggccatttaatccttccagtgaaatattctttttcattccttgcttgcctggtatgtttttacttgtctttttaatagtaatttaaataagcgtctatgaatttactctatgacgtgtttcttcacacaagatttacccaagatctacccgtttctgttttcaccaagctatgtgcattacccaagctagctaagtaagctctgtatctcacttatatttctgtcttttaatattgttgtgatatttgcaacacagcctggattcagctactgtttgcttgaatagttagtatgctttcagagtaattggtgtaatgtaagatttcattcttttctaaatttagttgctacccaagcattgtgccaaaactatcagtcaagcagtgaataagaaatcaaaaaagcagactggtaagaaaggggaacctgaaagggagaaaccaggtgttgagagcatgaggaaaaacaggctggttgtgaccaagtaagtatccacttatattatacctttttgctccaggtaaaatatttatttcatttttttctattgacattagtactgaggaaatgctaataattgtatattcttcattttccagccattttaaaaaatatttctgagcttaattaacctgttagttgcttatttcatctcaaaatacagattttggcctttagaagaaaatatatgtaatagttgatatttgtctttttatactaagtactgaaggccaattatatgtttaaaaaattttgtgtgttacattataagcaatctgtaatttttaatttatttaaagttagatagtggagactttattttggcatgtttttgatatattagaacatacccaatgtcattattataaaacagaaataacagaccaggtagcattcagggatctttgcttgcttcattgtttggaggggaggtgtaggtgggtaataattcggtaaatattttttgtttaaagtatagttcctactttcttgctaaattgagcaagccattgcccttttatagacaactttccttctctcataacagaaagtacttcaggaattgggcgtgattatctttatgagtgcagaataagctctacctttgtatattaagtcagtatattcattactacctaaaggtagaaacaaatgacgccatctttagaatattgctcttatgtgttagttataaccttaaagattttgaactttctcagtttaggagaataaaaagtcgaattctctaagcattatctccaaataaggttgatatatttataaaattaattttgtattgcctgtgatgacatgtgaacattttaactgtttattaatttttttcagccttgataaattgcacactgcactttctgagttatgcttctctataaattatgtaccaaacatggtggtatgggaacatacctttaccccacgagaatatttgacttctcatctggaaatacgctttaccaagtaagaaagaatattgactgtttttgtttgttgactcagtaatgagtttgttatttaattatacagtgttttataaggaaaagcattagtagaactggattagtgttaagaataatgaaccgggccgggcgtggtggctcacgcctataatcccagcactttgggaggccgaggtgggcagatcacgaggtcaggagatcgagaccatcctggctaacacagtgaaaccccgtctctactaaaaatacaaaaaattagctgggcgtggtggtgggcacctgtagtcccagctactcgggaggctgaggcaagataatggcgtgaacccgggagacacacttgcagtgagccaagatcatgccactgcactccagcctgggtgacagaacaagactctgtctcaagaataatgaactgggaaatgcaaagaatagtgaactgaaaattactgaagatacccagattcttttctcatacctattagtattaactagtaacaccaggcaaaccagttaatatctctgagtcatagcttccttatatacaaagtgagaatattggagcaaatcaatgtatttcatcttgcaggtggcaacccagtaggttcatgaaatcagtttattaggttgtagtcaaagtttagagaaaagtgggagggaaagaaaggacaagaggaagaaaaaataggaaaaaaaacccagtacactgtgtgcattaaatatatatattgcttcgtgaaatgtttcagttacatgtatgcatgtgtattgacttgcagtgttaagatgcgtgtcatgcagtaggtcacagtaaaatgtttgaagacctgaggactagatgaacccttacatgttttctgaattcacatgttgctgttaaataagccaatagaattctagattcttgaattctcaattctaattagaatttcctgttatatatg

SEQ ID NO: 912 - DNA, 6000 bp, Homo sapiens
taaatctggatttgaaagttttagtatgcgatatatgtttcttgattatttttgtgttagcatagtccttaagacagttcagtaatagatccttaagaataaagggaatagtggacttttattaaaatgtgccaacaaaaagaagtttaaccaagttgggattttatgtctgtttttaattctctaaaagagcaacttactgatgtgacttttatttcttacatttttttgaggagttgaaaacagtcactccaaattaccttaaggcccttctttgcatgattagactaaagggaaagaaatgttgtagatcaaggtcaaatagagcaagtgttggaaattaaatgcctggtaacttcacttctatgatgtaaaattaaacattaatatgaagatgatgtggtgactacctcctgcattgtgcttcattctctttttctgttagagtctttttgttatacttagtttatttttcttccctctcttcctcccagaaaatgtggtccttaatggctataatttgttttgttagtgtctgtcatagtagttatttaataaatctttgaatgaataagtcaacttagttgtgatcagattgataaacagtgtggtggccaggcgcggtggctcacgcctataatcccaacacttgggaggccgaggtgggtgaatcacctgaggtcaggagtttgagaccagcctggtcaacatagtgaaaccccatctctactgaaaatagaaaaattagtcggacgtggtggtgtgtgcctgtagtcccagctacttgggaggcttgaagcaggagaatcgcctgaacctgggaggcggaggttgcagtgagccaagatcacgccactgcactccagtctcggtgacagagtgagactgtctcataaataaataaatacataacagtggggttaggattcaaaatcaagaattctcgcctcaagctatataatatcaactctattttctgcttcttggccctttattttcctttagggaagaggactggaataacctagtatgtctcttgatttctaaaatgctgaaatgatctcagtggatagtgatagtagtttctatgtatgggatagagatcatcatgaaaagcttctcactgcatttattttggaaaatagtataatctgtgttgattttggcagtttgttaggaaagcttgaattagcagtattgcagaagaaattcaaatcaccaggtagagaaaccatgcctcttaaaggaaataatgaaacacattaggaagtatactttttagatttaggcacatcacaggtcaaatttgcaagaatttttaagattatgtggagcccaggactactgtctgtctggcacaaagtctaccttaggtagaacatgaaacattatatgtttagatattttcagctatgcaaaggatcctattccaaaagaagaatacaacaattagaaagtcatatcccctttcttggaactaaaagcactttgaataatgtttgaaatttgtaattttcagtcatacctgaattttatttatattttttcatagttgcattctatttttgcctgtcacatccaaaataaagaaatgtttactacttctgtttgtcttattactctaagatatgtagtgttttattgactcacattcttttacatttagatttaacatctttaaatgtggatgcaaattaaaactgctggcaggctgggtgccatggctcacacccgcaatttcagcaccatgggaggccgagatggaggattgcttgagcccaagaggttaaggatgcagtgaactgtgattgtgccactgcattccagcctgggcaacaaagtgtcccccgtctaaaaaaagttaaaaaaaaaaataaaattgatggcgtgtgattatttaattggcaatgttttttttttcttagtggttcataaaatatttctctctttttttaatttattttttaaaaatagagacagggtttcaccacattgcccaggctggtctcaaactcctgggctccagtgatccacctgccttggcctcccaaagtgctgagattataggtgtgagccaccacacccagccataataatggtattttttcctatttatagtgacttagctttgatgaaatttgattatgtaagaggccatagattatggtttattattttttaaaatgttgttattgttatataaataatatttttattactctgggataattattggtgtgtaaaagatactttgggggaaaaatattctcttcttaaatcagtgctaccagttatcattcattcacttgaatcaaattaactgtaaggtactatatcagaaaacttactttaaatgtaaaaattgtgattctgatttttgtttatatagtttttatagtcgtgcttttgagaagatgtttcaacagtgtttggagttaccctctcaatcaagatactcaattgcatttccactactttgcactcattttatgagttgcacgcatgaactatgtccagaagaggtaattatagtgtactactgtgagttatatggtatgcaaagtaaactagatcaaacctgtagccaaccaaatatttacagtcataattagctaacttagcttcccatcgaatacatctctatgcagaatcagaaaagtgcttgaacagatacataggtttaatatatatatagataaataaacataagtataataagaacataccataaagtcacttggaattaccttttttaagataaatggtgggtcaggtattaatatctgtggaaaagatttatatagtaattgattttgtatacttaattttcctcttaaactgtcatggaaaggactcgaaaattaaatttatggattactgaataagcataaacaagtcaaagagagattcactaacttattattactaaattgttaataaatatattaagcaaaatccagattttgtgatacttgtgggatacatacatgcatgtgcatacacacacacagttgcagagtaattgaactgcttggtagttttgttgatgccaagtatctgtgaaaaatgtactcagtgtttcttctaatctttaaagaagaaatattttctatgtgataaaaatataaagattaaataatgtatttctttattataatttaacttagtgtttagtccctttacttaaaattgcagaacttgtagaaaagaaacttagagatagcaggaacatggtcagtttctttaagcattagacaacatctgttgcagattgtatgccagtattccaggggaagccaactttgagacagaagttagcttacaggaagtttattagggaatactttcagaatttctacctatgaggatattaataccacgaattttaatagatttatgaattttttagatttaatagatttttttctcccaaacttgacacctgagatgtattattaactgtttgctcaccatcaaatttcttttcattaaattacccataaaatccttctaattttatttatatgtcatgtcttgaatccatcctctactttccattgctattgtcattattacagttcagatttacgatactcttcatatgtactctaaatggagttcatctttgcctggattacctaagtggtctctttgcttctgccattgttctcctaaactttattcttggcaccgtagccaaaggcagaggtcagataatagagagatttgtatgacatgttaaaccttagtttttctccatctcagcatttctgagctgttgaaacggagtagtgaaatcagatttgtattttaagtaagttagtatctgtaaagaacaaatttgagcagtcttaattcagtattcttttttcaggaagaattaatagcagaagatttatgtctttcagaagtcagaatttgattaaacaaaacactgtttattaattgaaatctttcctaaggtgaaccaatatttaattatatcaggttgtaaatcttttttttgatttgactttctattaaagttttacagggcattttaaataaaatacgttagatataatagatctaggaaaagttattttctatgctcaagtatttttatattttatgtattttacacttatttcatcatataaatactgtatgtaagctctacatatatgattatggaaggtcagggcaggaaaactgttaaaaattttatttctttgtaaagtattagaaatgtgtagtgcaaaaatttacagtgttttatactcaacattccagttaccatagataagaaaaaaacaatcaaacgattgcagcccactaaaactaaaaagagaatcctgtagagatggatgcatgatcagcgttttttttttttttcttcctgggagcaatagggtttgattttagagatttgaatgccttggactttctattaccaaattgatttctcaccattttatttaaacatttgagctcttctttcctgtttatacaaagttatgccacaatttatacatttatagagacacagattttaaatgaaataagattggaaacagtactctaaatctgtttgctttcacattatatgtttaatattttaacatttaagaactggatataggactttgtggaatttgaaaattaaatacatagtttttcatgttaagcaaaatactgatttttcaagactcctcccagttatacattgctttcacaatcaccaaatactttgtcatttatgttcaaatacagtatggtgagttagttgttacaagaggcaaaagcaatttttaacatctcccaccctcactattgcggaatgtacctttagcctaattttccatgtctatttagaagtctttttaattcaacgtactttctttataacttgtattattattattattctgccttcacagcgacatcatattggagatcgcagtctttccttatgtaatatgttcctagatgaaatggccaaacaagctcgaaatctcatcactgatatttgcacagaacagtgtacccttagtgaccaggtaatgatttaagtgtttccaacagataggaaattttgtgtgaaggcaagaaaatgtgcttttagccagttgttgttttactttccattctttagttcccacactattagtaaacctcaaacctctgctgtgaaactccattaacaggtataatttcttagatgtaaactttctggcaagactgtacgtactgtttgtgttctttaatcaggagtcacgtgtagtttttacatgtgtgtagtgttagcacctgattctgctatttcttgaaagttgcaaaagaactggaattaagcatatttggtgattttcaatccactgtacttataattcagattgaagctcagattgccccgtcattggctagtgggagtccttttttttttctttccaactttaagcatctatttatttatttatttattttttattatactttaagttttagggtacatgtgcacaacgtgcaggttagttacataggtatacatacgccatgttggtgtgctgcacccattaactcgtcatttaacattaggtatatctcctaatgctatccctccccaatttccccaccccacaacaggccccagtgtgtgatgttccccttcctgtgtccatgtgttctcattgttcaattcccacctatgagtgagaacatgtggtggttggttttttgtccttgcgatagtttgctgagaatgatggtttccagcttcacccatgtccctacaaaggacatgaactcattttttatggccgcatagtattccatggtgtatatgtgccacattttcttaatccagtctatcattgttggacctttgggttggttccaagtctttgctattgtgaatagtgctgcaatagacatacgtgtgcatgtgtctttatagcagcatgttttataatcctttgggtatatacccagtaatgggatggctgggtcaaatggtatttc

SEQ ID NO: 913 - DNA, 6000 bp, Homo sapiens
attaatataggtgtttattgctataaactttcctcttactactgcttttgctgtatcccataggttttggtatatcgtgtttctgtttttatttctttcaataaatgttttatttccttaatttctacattgttcaggagcatattgtttaatttccatatgttagtttccgaagttaaaggtacattattaggttatttggtctttctactttattaatatgagtgtttattgctataaactttcctcttaactactgtttttgctgtatttcataggttttggtatatcgtgtttctatttttaatgtgtttcaataaattttttatttccttaatttctacattgttcaggagcatattgtttaatttccatgtgttagtttctgaagttcctcttgttgatttctagttttattgcactgtggtcagagaagatacttgatatgatttcaattttttgaatttgttgaactttgttttgtggcctaacatatggtctctcctggagactatcccatgttctgatgagaagaataaattctgctttttaaaaatgtgggacagttaatggaactctttattgaattcatggccacagctatagctaattcctgtttatactctaaagctgataaatggtaagtaaaactccttaggcttagtttgtgataaatgtcaagtatattttgtcatcagaatattgacatcattctacctcattccttcttcttttctggtagacaaaaacaacaaaatacaaaagtctcctttgtggtgtcactgtctcattgaatagtaacatcatccacctattggtcccttgccatggtagggtttgaggtttaatttttatcctacttacaaggtgataatttactctcttactatttcatggatgctggcaagaagatatggagctcctgggtcagtgacaaaagacaaaagacttcattcactgcacagaaagcagcataggcatcagcatatatgcattatttctgctatttccctaagctctgcaggtgtggtacagaggagccaaaatgaattctgtgcatgcagtctgtttgtgttgcagataaggaacactaaatttgaggaaccctctattttatcatcagctgtaagcatacttgctctttgttccaagggagacattacctcatccctcaaatttgatagctgcaaatataaccctaagaaatggcctagagaatgagtggctcaggctttgccttcttgacatacccagcaaggtgtgtgggagcatgagacccatgcaggagtatctcccaacagccaaaatcctgaccatcatctataattctgtttcccactatatctaattatttcccagagtaaactcttttaaactaccattactcaaaaccagaccattgtaatgccgtcttattgccactactgccttctaatagatttctgcttcctttcccttcccagtcatgcttccctattttcctcactatacagagtaatctttctaaaacaaaaactggccaccacatagaacccttagtgcttcactaaaaagtttaaattctttaacgtggtatacaggctgttcaccatctggttgaatctcatgttttactatttcccttctcttctttgcactcaaactctagccgtaacaaacagtacttattctgtaggcatcccttctattcttattctctgcccttctgaaatgtgccctatccatggacatgatctgctttttgtgatttggtatcccagttgtagaatttttttccccacaacctatcttaatgattttcgtttagttctatcacttttttggccaaactacaccaatttttactatcttcagtacttttctagaatttgtcaaattaatacagtgtattatatgatccagtttttagtgaatcagtatactctaaaacctcattgaatcaacatgtgcagtacttagttttatctgattgcttcctgtgtgtgttttgtctcttaaattaggtcgaagatttcttttggtatggttaatatgacaattaattgttttacacttttgatattttaacttcagttcctttgaggttcagtgtgaatgactcatatattagacactgttttatggacattagtatttcagtttactaaataaattcttgataggaatttcaaggtagggtcactacagacaactaacacagtagatgttactgtcagtgtcacagtagatagtttaagtatctttcagtgatgcttttccccctgtaaaatgacaagtccgaagtcatttatgtttacctgaactacttttttttttttgtactttataggcatatactagtgtctcaaaggcttcacttggccttgcagatcacagagaacttggaaagatgatgaatacaataatttttcatacaaaaatggtagattccttggtggaaatgttggtggaaacatcagatctctccatattttggtatgttgtaattttctctaaatctggatttgaaagttttagtatgcgatatatgtttcttgattatttttgtgttagcatagtccttaagacagttcagtaatagatccttaagaataaagggaatagtggacttttattaaaatgtgccaacaaaaagaagtttaaccaagttgggattttatgtctgtttttaattctctaaaagagcaacttactgatgtgacttttatttcttacatttttttgaggagttgaaaacagtcactccaaattaccttaaggcccttctttgcatgattagactaaagggaaagaaatgttgtagatcaaggtcaaatagagcaagtgttggaaattaaatgcctggtaacttcacttctatgatgtaaaattaaacattaatatgaagatgatgtggtgactacctcctgcattgtgcttcattctctttttctgttagagtctttttgttatacttagtttatttttcttccctctcttcctcccagaaaatgtggtccttaatggctataatttgttttgttagtgtctgtcatagtagttatttaataaatctttgaatgaataagtcaacttagttgtgatcagattgataaacagtgtggtggccaggcgcggtggctcacgcctataatcccaacacttgggaggccgaggtgggtgaatcacctgaggtcaggagtttgagaccagcctggtcaacatagtgaaaccccatctctactgaaaatagaaaaattagtcggacgtggtggtgtgtgcctgtagtcccagctacttgggaggcttgaagcaggagaatcgcctgaacctgggaggcggaggttgcagtgagccaagatcacgccactgcactccagtctcggtgacagagtgagactgtctcataaataaataaatacataacagtggggttaggattcaaaatcaagaattctcgcctcaagctatataatatcaactctattttctgcttcttggccctttattttcctttagggaagaggactggaataacctagtatgtctcttgatttctaaaatgctgaaatgatctcagtggatagtgatagtagtttctatgtatgggatagagatcatcatgaaaagcttctcactgcatttattttggaaaatagtataatctgtgttgattttggcagtttgttaggaaagcttgaattagcagtattgcagaagaaattcaaatcaccaggtagagaaaccatgcctcttaaaggaaataatgaaacacattaggaagtatactttttagatttaggcacatcacaggtcaaatttgcaagaatttttaagattatgtggagcccaggactactgtctgtctggcacaaagtctaccttaggtagaacatgaaacattatatgtttagatattttcagctatgcaaaggatcctattccaaaagaagaatacaacaattagaaagtcatatcccctttcttggaactaaaagcactttgaataatgtttgaaatttgtaattttcagtcatacctgaattttatttatattttttcatagttgcattctatttttgcctgtcacatccaaaataaagaaatgtttactacttctgtttgtcttattactctaagatatgtagtgttttattgactcacattcttttacatttagatttaacatctttaaatgtggatgcaaattaaaactgctggcaggctgggtgccatggctcacacccgcaatttcagcaccatgggaggccgagatggaggattgcttgagcccaagaggttaaggatgcagtgaactgtgattgtgccactgcattccagcctgggcaacaaagtgtcccccgtctaaaaaaagttaaaaaaaaaaataaaattgatggcgtgtgattatttaattggcaatgttttttttttcttagtggttcataaaatatttctctctttttttaatttattttttaaaaatagagacagggtttcaccacattgcccaggctggtctcaaactcctgggctccagtgatccacctgccttggcctcccaaagtgctgagattataggtgtgagccaccacacccagccataataatggtattttttcctatttatagtgacttagctttgatgaaatttgattatgtaagaggccatagattatggtttattattttttaaaatgttgttattgttatataaataatatttttattactctgggataattattggtgtgtaaaagatactttgggggaaaaatattctcttcttaaatcagtgctaccagttatcattcattcacttgaatcaaattaactgtaaggtactatatcagaaaacttactttaaatgtaaaaattgtgattctgatttttgtttatatagtttttatagtcgtgcttttgagaagatgtttcaacagtgtttggagttaccctctcaatcaagatactcaattgcatttccactactttgcactcattttatgagttgcacgcatgaactatgtccagaagaggtaattatagtgtactactgtgagttatatggtatgcaaagtaaactagatcaaacctgtagccaaccaaatatttacagtcataattagctaacttagcttcccatcgaatacatctctatgcagaatcagaaaagtgcttgaacagatacataggtttaatatatatatagataaataaacataagtataataagaacataccataaagtcacttggaattaccttttttaagataaatggtgggtcaggtattaatatctgtggaaaagatttatatagtaattgattttgtatacttaattttcctcttaaactgtcatggaaaggactcgaaaattaaatttatggattactgaataagcataaacaagtcaaagagagattcactaacttattattactaaattgttaataaatatattaagcaaaatccagattttgtgatacttgtgggatacatacatgcatgtgcatacacacacacagttgcagagtaattgaactgcttggtagttttgttgatgccaagtatctgtgaaaaatgtactcagtgtttcttctaatctttaaagaagaaatattttctatgtgataaaaatataaagattaaataatgtatttctttattataatttaacttagtgtttagtccctttacttaaaattgcagaacttgtagaaaagaaacttagagatagcaggaacatggtcagtttctttaagcattagacaacatctgttgcagattgtatgccagtattccaggggaagccaactttgagacagaagttagcttacaggaagtttattagggaatactttcagaatttctacctatgaggatattaataccacgaattttaatagatttatgaattttttagatttaatagatttttttctcccaaacttgacacctgagatgtattattaactgtttgctcaccatcaaatttcttttcattaaattacccataaaatc

SEQ ID NO: 914 - DNA, 6000 bp, Homo sapiens
atcaaattaaactaacgttctaatttgtttttgcacctagctataataaacgtattaatgacataagagaatgcaaggaggcagccgtgtcacatgcgtgagtagttttattttatccgtggtagctttaatcaagaaaaattcttaaagcatcattttgttgaagtgagtacagattaatagtatgcaagatatggtagtagaagagggggactttcagtcaatgagaattattaagtatattgcctcaatatgtagaaccttggaattagtgaagtcagattttaaatgtttttgaagtgttgataaaatgctataaggaagtatcacacaaaggactcttactttgggtataatctcactgccactatgctctgcataccaatatgatttttgtactactacatgaaaattaatatatccatataactcttacagataatatttacttttttttttttttttttgagacagtctcactctgtcacccaggctggagtgcagtgataccatctcggctcactgcagtctccacctcccgggttcaagcaattctcctgcctcagcctcctgcgtcactgggattacaggcacccgccgtacattcccagctaatttttgtatttttagtagagacaggttttcaccatgttggctagactggtcttgaactcctgacctcagtgatcagcctgccttggcctcccaaagtgctggcattacaggcatgagccaccgtgcccggcaaatatttacttttaagagtacacctctttcccaattttaatttcttatattagtaaatatatagatatcctaagtgagaaattagtgtattttaaatctttgaacaactttccagttttctcataaaataattctaaataatttgatatttcactttgttacatatatgatatacttaatatagaatattttctccagttaacttaggtactatatacagataatattatttgatctatcagtatttctatataaggcagagagaagacaagcaacactccatagcgaaaactataaaaccacaggaagttttaaaatttcagtttaggctataagatattgggaatttaaaccatctttactcatcgtatctgtgctatatcattcctcatgcatattttatttacttgaatgaagtacatgtgcttaatttttcaaaaatgatttctagtgcagataacgtactttggagtttgttagaattcctctctagacttgcagaaatgcacataattattatttcttcgtgggatagacgctactataggcagacatataggcatagctatcttttataaagatcttttacaattaaggtatttttattttcctccttctgtttattaaataaaatataagtagtaagcagtggtaacttctaggactcattaccatgtgccaggcccaagtactttatagacattttctcccaataaccatcacagactcctcacagtaatcctgtgaagtaaaataatcaaaataacatttgttcattttcttcttggaaatgacacgatgactttattattgtcagtaaaaagagcttgtcattgaaattaaagtaacagaagcactatatatcaggcatcatgaaagattgtgcatcttttgagacagatgtcatcatacttattctacagatgaaaaactgaaacttagagttggaacctaaggtcatgtagggagaggatggattttaatttgagtcctctgaaactgatctactgtgtcacagcgaaattactagtggtgtgtattctttatacttgggtttttggcataggcaacacacacacacacacacacacacacaccccaatctaaattctaaaactttcttggagcagtgtatattttgtgtagtatgaggagttgcttggaacattttatgattttttttccttctgttaatatgtgagaatgttttctaatcttaattttaaaataagtagtatatgaatatttatgattatcccttcctttccccatctttctatttttgaacaagagtgccaagtagctctcatcccaatacctttattgactatagctcttgtgtattcagttttgtatatttaataggaatataacttaataagaatatagataaccagatacttaagttctatttattaatttctttatggaagtgacaaaaatgtatacagttagtcagtttttgccttcaaggatttttttttttttttgaggtggagtcttgctctgtcacccaggctggagtgcagtggcatgatctcagctcactgcaacctctgcctcctgggctcaagtgattttcctgcctcagcctcccaagtagctgggattacaggcacccaccacacctggctaatgttttgtatttttagtagagacggagttttgtcatgttgcccaggctggtctcgaactcctgagctcacgcagtctgcccaagttggtctcccaaagtgctgggattacaggcatgggccactgtgcctggtcaccatcaagaacttcatagtctataaagtgcttaaagctacatggtactaaaattggataaattattcataaataaatagctagatgttgggaaatgcttcttgaaggactggtcttgaaggttgggtaggattttgatagatggagaataacaaaagaaacatagtttaaaaagcaacataagaaaggcaggataaatgtaagattagaaactcacttaacgatagacacatagaagatgatttttataggaactttggcttcctaaaaaaagactttggaagttgcacctataatgctagttactttaattgccaataataattttagtagaagcagataaactattatggtgtctttccccatagtggttcaatgcacagagaaagacgcaagtttttaagatctgcactgaaggaattggctactgtcctctctgatcaacctggattgctaggtcccaaggtaattcatttaattattatttcaataattgtgccatattaaaattttaaaaaacgtttctaagtgaaattttactgaaatttgagtcagggactacataaaaggatttttatatttagtggagaatgaatttgctgacttgacattcatacatcgtacctccctgcattcttctcccttatatgcatgctctctctcatacatacttacaggttctcttgtgtcctcttctgttagtctcttcactcttttgaattgatattatcacttcttgccaatgacttttcacatagaaagagattaccagttttgtttttaatctttgaataagaataaacacttacttttttttaaacaggcactttttgtttttatggcattatcctttgcccgtgatgaaatcatctggctacttcgtcatgcagataacatgccaaagaagagtgcagacgactttatagataagtaagttagcaacatttaaaaaaatattttctgtatatagatgcttcttgatttacaatggggttatgtcctgatagacctattgtaagttgaaaatattgttaagttgaaattcatttagtacacctattattactgaacattagagcttagcctagcctaccttcaatgtgctcagaactcttttattagcctacagttgggcaaaattatctggcaacatagtacactgaagagtataggttgtttatctttctgatcacatagttgactgggaactacggcagcatcatgagagagtatcatactgcctattgctagcctggaaaaaaagtcaaaattcaaagtacaatttgtactaaatgtgtatctcttctgcaccattgtaaattagaaagatagtacatccaaatcactgtaagttgtgcaccatctatattctgatttgtgggctggggaatctggagacttatatttgaagcaaaattattttgaagagcttggaatatttgtaatatatcattagatgatattaattagactgcaaagtcaaatttagttttaaattagggcttttattttctcgtagtatgctttgtggtgataaagtttttgttttcttgctatgctcagtaatatttcttatggaattcattttttaaaactatttactacacaaaacatttaaataaaaatcctgtttttagagttgcaactcagtgtgtcattaaaatgtgtcttattttagttcagtctctcaataagagttagaaaaatggagcagagaaataagagcatacagaaaaattttatttcttgctaatcttcttttatttgagattttttgatgatgtatttataacatgtcctgtttatttttttaatttaaattttttttttttttttttttttgagacggagttttactctgtcacccaggctggagtgcagtgatgccatcttgccttactgcaacctcaacctcctgggttcaagtgattctcctgtctcagcctcccaagtagctgggattacagacacccaccaccatgcccagctaacttttgtatttttagtagagatgggattttaccatgttggccaggctggttttgaacccctgacctcatgtgatcagcccgctttggcctcccaaagtgctgtaattacagtcgtgagccactgtgcccggccctgcttattttcagtttggattttctgctgtcgatttttagctttaactttttttctttcttctttttttcttgctttccatgatttctttattcatgaaatgatttaaaaaggaagtaattgacattaagtattaaacaatgccctttataagaaaaatacttttagaaataagattaagggcatcgaatatattctttaataatgatgaatttattatttgaatatttttcttgaaattttaaaaaaggcacattgctgaattaatattttacatggaagaacttagagcacatgtgaggaaatacggacctgtaatgcagaggtattacgtgcagtacctttctggctttgatgctgttgtcctcaatgaactcgtgcaggtaaaaactatctcatactatttcccttttgttccttccttcccacctttgatagtattttatttgtttgttcaacaagcatttatgaaatatcatgtgccaagtgataaatcatgtttatattttggagatcattacctagaagggaagaaacagttagttgtagtccaatgtgataggtgttatgcattaagtatatataaagctcagaatgaacacaaggaaagacacaattatttatcctgaagatggaggtgtacgctaaccaaattacagagggccttgggaaagaggaggttaatcataaatcaggtgtactacttaaaaagatcaccctggttcagtgtggatggtagattgctgggaaccaaatgaggaggcagagagaccagaagaaaaatgactgcagtaggctagatgagaggtgatgagagtctgaacatgggcagtagctatggagattcagaagagatgatagagacaatataattggtaattaagtattagagggaaagtagaataaaaatctttttgaagaagattgttagaggatggccagtaaataaagatttcatatagacattcccatttaaatgtccaattttttttccttaattggtttttagcctttttttgctttccataatttatttattcaatatttttcatctttatttaaatttaaaaaactttttattccaaataaactgactctaaggaaataatattttattttgcttcactttatagaattacatgtttcaaatgactgtaagctaatacatagtataaagaaaacagttaagaatcctctttatataaagacttctctaaagctgctagttttccagagaaataaccatactttgaagatctcatttttttcaaatcaacctaaaaatataataaggaaaaaaattgttcatgtaattttttttaccttgagttacatgctgttacaagctagtattctaaa

SEQ ID NO: 915 - DNA, 6000 bp, Homo sapiens
gaattctttccagatttgcatagctacattatacacaaatttatataggttttctgtcttggaattggttgaatcattagtttgcaagaagctagtagatggcatcagttttgaaatttaaaaaaatcagcattttagatggaagtatcagaattcctcaaaatactgcacatatcatggtcatctcctatctctaatatcagtagtggtttttccccacccggaactgtcttttctattcctctcctcttttctctctggatccatttaggatttttccctaatcatgtatggtcttgtttttatttagctattttatatttggttctttctccacttaggtgttgaaaatttccttgacaggctcttgaaaattccaagctaggctctcggctttttaagttctatataggcattagcacattaacaaattcagtatatagtaggttattgataattacataggataattcatttgaatttagaccacttattttccaatcttgatttttttctaatattccgtgataccttagaattttgataaaacactattttttatttgccagggtttgttttcctgtttcttgtttagattcatggggtacactttcaggtttgttaaatgagtatattgtgtgatgctgggtttgggcttctaatgatcctgttgccaaagtagtgaacatggtacccaataggtagtttttcagttcttatccctctccttcccacttctggagtccccagtgtctgttgtttctttgtgtccatgtgtacccaatgcttagcttccccttataagtgagtacaatcagtatttggttttccgtttgtgcattaaatctcttttgataatggcctccagttccatccatgttgctgcagaaagacatgattttgttcctttttatggctgcatagtgttccgtggtgcatatataccacactctctttatccagtccagtgttgatgggcacctgggttgattccatgtctttgctattgtgaatagagctgcagtgaacatacgagtgcaagtgtgtttttggtagaacagtttattttcctttgagcatctacccagtaatgaaattgctgggttgaatggtaattctatttttggttctttcagaagtcatcaaactgctttccacagggtttgaattaatttgcattaccaccaacagtgtataagcatttccttttctccagtagccttgccaacatctgttatttttttgactttttaatatttgccattctgactggtgtaagatggtatcccattttaccagtggttttgatttgcatctctctgatgattagtgatgttgagcattttttcatatgtttgttgggtggttatatgtattcttttgagaagtgtttattgacgtcctttgcccacattttagtggggtggtttgattttttcttgttgatttaagttccgtatagattctggatattagtcctatgttgggtacatagtttgcaattattttctcccattctgtaagttgtctctttattttgcctttgctattcaggctgttttttggttccatatatattttagaatagatttttctaattatatgaaaaatgacagtaatttgattggaatagtgttgaatctttaaactgctttgggcattattgtcattttaatgatattgattcctccatcccatgagcgtagaatgcttttccatttatttgtgttatctgtgatttctttcagcaccgttttctagttcttctcttagagaggtttcacctccttggttaggtgtataggtgtattcctagttattttatttttttgtggctattagtaagtgggattgcttgcccttccttccttcccccctttttttttttttttttttttttgttggagtcttactctgtcacccaggctggagtgcagtggtgccatcttggctcttggctcactgcaacccccacctcctgggttcaagcaattctcctgcctttgccccctcagtagctgggattacaggtgcctgtcaccacgcccagctaatttttgtatttttagtagagatggggtttcatcatgttgaccaggcttgtctcaaattccagacctcaggtaatcagcccgccttggcctcccaaagtgctgagattataggtatgagccaccgtgcccggccaggattttattcttgagtcctcagcttgaatgttattagtgtatagaaatactgctaatttttgtatgttgatttttgtatcctgagactttgccaaagtcatttagttttctaggtatagaattatattgtcaatgaaaagagatactttgacttcctttttttcaatttggatgccttttatttctttctcttgcttgattgctctggctaggactttcagtactatgttgaatagaagtggtaggagtacagacatggtaggagtacagacacccttgtcttgttccagttcttacgggaaagcttctagcttttgcccattccgtatattggctatgggtttgtcatagatggcactgcttattttgaggtgtgttcctttgatgcctagttagttgaacattttatcgtgaagggatattggattttatcgaatgctttttctgcatctattgagatgatcatatggtgttttaaaaatttttgtttatgtggttaatcacatttattgatttgcttatgtggaaccaaccttgcatcccaggaataaagcccacttgatcatggtgaattaactttttgatgtcctgctggatgtggtttgtgagtattttgttgaggatttttgtgtctatgttcatcagggatattggcctgtagttttctttttttgttgttgtatttttgcgagattttggtaccaggatgatattggactcatagaatgatgaggagcccctccccctcaactttttgaaatagtttcaataggattgtatgtctggtagagttcagctgtgaatctatgtggcctctggctttttctggttggtaggtattttattactgattcaatttgattactcattggtctgttcaggatttctgtttattcctggtttcataaagcaaatctcaataaattaaaatcatgccaagcatcttctcagaccatactggagtaaaaatagaagtcaataccaagaggaattctcaaatccacacaaatacttggaaactaaacaattttatcctgaatgacttgggtagataatgaaattaaggcagaaataaaaaaattctttgaaacaaatgaaaatagcgacacaacatactgaaacctctggaatgtggcaaaagcagtgttaagaggaaagtttatggcactaaaacgatgataaaaatagctcaaattaataacctaaccttgcacttacaagaactagaaaaagaagaatgaactaaacctaaagcctgcaatgaaaataaataaccaaaatcacagcagagctaaatgaaattgagacccaaaaaccatacaaaggatcagtgaaacaaaaagttagttttttgaaaggattgccaataaggttgacagactcttagctagattaacaaggaaaaaagagagagagaagatgcaaataaccacaattaaatgagaaaggtaatatcacaaccaatcccacagaaatacaaaatattatcagagactactaggaacatctctgtacacacaaactagaaaatctagaggaagtggtaaattcccataacataacaacctcccaaatttcccaggatttaaaaaattacattatttaatttttaaaacattcttagttggctacgtcagaatcactttgtgtagcttaataaaatggtagattgtggggttctgtttccagaggttcagtttcactaaatttcagttacagccctgtattctgtattcagaacagacttctctggcattctgtgtgcagtcagattaaagaatcactcttacagccaggcgtggtggctcacgcctgtaatcccaacactttgggaggccgatgcaggcggatcaggaggtcaggagatcgagaccatcctggctaacacggtgaaaccccgtctctactaaaaatacaaaaattagctgagcgtggtggcgggcgcctgtagttccagctactccggaggctgaggcaggagaatggcgtgaacctgggaggcggagcttgcagtgagctgagatcgcaccactgcactccagcttgggcaaaagagcgagactccgtctcaaaaaaaaaaagaatcactctttacagaatttttaggaagcagggattaatagcaaaagacatttatgaaagcaagaaagaaacagttgagatgaaacgttaaataccttgataataaagctgtaatcaacaaacccgttgataaagagaagttaagtaatttattaagatgaggtacagtgtattatttttataagacattctttagagaaatataaagcatgttgagttttattaacacttagtcatataaccctgaagtctttttcttttggaactatcagaaactatcagaatggaaacttgcattggcaaaaaggtgacagtgggctgtctatcccttttggaataaagttcccaagattgccacgtattttaacctttaagaaaataacatgagtttctgacctaagcttttgctcaaaaacgcagaatctgtgtagcttttataacgttagcaaaaaaattctagaggagaggagccacaacccaactcagatattataaggagcatgggtataattaggctgtgttgttttatgatggtatagttagaaacacacagcaattatagctgcaatgtaaacagaaaaggaaagaaaattattcttcagcttttttttcgtattttaattagtctctttcagatgcactaatttctcttcaaatggtatatcctcgaaggaatctttcagctgaccagtggagaaatgcccagttattgagcctcatcagtgcacctagtacaatgcttaatccagcacagtccgacactgtatggttctatttttctcttttgaatgaaaataaagtgacttttaaaaaaataatagttcagtaatgctgttgctgtttgtttctaattagcattagcttattagttgaagttcattataaaatgttcactacttaagtcatattgttcagattttttagctttagagtcttaatgaaaactggtgataaattaatatggtgaatagtatgagtacttttttctttaaagtttaaaagtttgttttgctttatcatggtagaaaaatttgaagtataaagcaaaaacaaaaatcaccccaaatctcaccaagtagaaccaagtagacaaaatcattgttatattccattatatttttttcagtctattctctgtatttatgaacataggtgtcacacatatggagaatacacacacatagctactgattttggtgagacagtgagtattcagacacataaatgtcttttaacttgactaaaattttatcttttggaatattgtaaactttgaaataggcttgagaaattgataagttgtcatttaccagattaaagataattagcaacaatatttttttaaagagaggtttgagggtatgcagatgtgaaaggggcacacctctcgttgtttattgactgcaagtttcagtataggtaataaaacttttatccagctcttcaaatttgttgtggtagtatttgggcgaagaattgggtagtaagttatcaggagaaagggaggagagtggctcaatatggaatattttttagaatttcttttaactgcaaatgtatatattctctttttaagatgccttgtgaatacctctctttggatgcaatggaaaagtggattatctgtaagtaaaatgggttagtgttatgattactccccaggctttatgttttagagaaaaatagcaggtgacatggttactacctctgtgcttagcattgtgctaac

SEQ ID NO: 916 - DNA, 6000 bp, Homo sapiens
ctgtagtcccagctacttgggagggtgaggcagaagaattgcttgaactcggaaggcagagattgcagtgagccgacatcacaccactacactccagcctgggcaatagaacaagactccatcccaaaaataaataaataaaatattagtgtagtgaatagaatcaattttttctcacagtagtacttttctaatgttctgttgtataacatcaaacaatgtgttacctatgttcttaggccattttctgctttttatttcctataaaacaatgtgattgaattaagaaaacttggttctagatattaataatttttggtagtatctactctccctcactttaggaactaaaatgtagcattttttgtagttgaagcaagagagttgtagacacttttgttcttcattgttgtagttgacctctttcacccaggctttatggaatttattttcactaaaatggggaacgtgattgcatagagatattgagaggattgtgtgagagacctgtaaaatgtttggaacaatcgatgcctgacacataatgtatgctcagtaaatatcagctcttattagaaatactatgggtaataatggggaatattaaagttttattatatttattttgaagaagtgatctgcaagcttcctttgttattcacttaatatttaatgtacagcttctggctgtgaggcattgctacatattcttatgtacattatcttggttaattgtccatgtcagcttccatttcgatgaggagggtattaggctagagatgttaagtcatttaaccatggttgcataataaggtatgctttctagcatcacctaccaaaacatatcatctgacactggtagtctttgaagtttgtcattataatcccttatctgatagatgtttgcattggatacttcctttgtccagaactgtatgatatggactggggaaattaaaacttgagtttggtacactgtctaattgtgctggagatagctataatagaagatagaaagtgatagctgctgttagacattatacatgtttagaggagggagatgttagcatttcagggaaggagtgcaatcaggtgcggttttctgaaaatgggattagcatttaaactaagtgctttaggaatagtggggttgggacatgtttaaatggtgggattctgacattccagtagaggaacagtaagaaagcaggaggtgtgtatagaaaatagtgaatagattgttttggctaccgtatgtagtgtgtgaatacatgtaggggaaatgtagattggaaaagtaagttagggccagattgtggagggccttgaaagctagactgttttgaatttaggcatctagtagttgtttgataaatgtttgtagctaagtagagtctagttatatatggctttgggggaaataaagttgaatgagaaatgtagcctatgagattgtattaaaaagggagatgatgggcatgtagaatggtagaaagaacactttcagaagtaaagagatgagatttccaatcttggctctgtcattaagtagttgtaactttaagaaggttcttttaaggtctgtaggtcttaggttcttaatatggaaaatgaggtttgtatttaagaccatttaaggctcatagtaagatggtgaccgtattatttattgttcagactaggacactgaagttggaaggaaaggggacacaattagtaaaattatactagggcaactaaaataaattgggattattaagcccaatataaaccaaattatacccttcatatcttactattatgaatgtactttcacctgttgtattttgaaactcaagtttaaagtactgaaaagcaggaaaaaggactaagacatcaattctaaatgtttaatgttgtcgaataaggtaataagtattcactttatgtttttggagtagtaatgattaaaatgtgcatataaacatggaatcgttctgaaacagataatgttgtgcaaaatagagtcagctactctcagatgaagctaaaaatagtcactacaagtatatatcttaatttgtctggtatttaggggtagtaatgaaatatttcatttgtgaatattttcttttttctttttttttttttgagatggagtctcatctctgtcacccaggctggagtgcagtggctcgatctaagcttactgcagcctcctcctccctagttcaagcgattctcctgtctcagcctcctgagtagctgggattacaggcatgcgccaccatgcccagctaatttttgtatttttagtagagacagggtttcaccatgttggtcaggctggtctcgaactgctgacctcaggtgatccacccatcttggccttccaaagtgctgggattacaggcttgagtgtgaatattttctagatagaattacttctttaaatgtcttcagggagtgcaatatttagggtggtttaccctataatagtagggtcttccagactgctgtgcttgctgtttttttttttttttttttgcttgctgttttaaataggtttttcgtagttaaaaatatatatatattcctctgatgttaggctcactgctgtaaattttctgacttaccatagtggttcagtacaattatgtatggatgcatcttccccctaacgttcctgagtgtaattcagaactatatggaggcctcagcattgtatgggctttgatagcaaatctgctattttgagccacttatattttccagttttctcatgttctgaataaacttctcacacatttaatgtgtgtttacaacacctgggtatcttgttaaagggcagattcagattcagtagatctgaggtaggcctgagattctgcttttctaacaagctcctgaatgatgtgggagtggctattcagtaaactatactcaagagtgtcaaggttctagatcatttattggaattctgagaatcttatagggcattaaaaatagctagattcttttagaaattatatcaatagttgattttaaaagaaaaattgggacttttgtaaatttaattatacagttgattaaaatactatttgtctttcaacatttccctctttcatgtcttaactctagttttgcttctttctcatttcttttttgttgttgtggtttttgcttttgtttaatatattattgtgttttctggatctggtcagggaaccgttaccgtattttatgtttgtatctacattttattttgcatgcgtaacgtggctttacctggatgttctttttggtaagttccaaatttatatagcatattgtttttttgtagtgtgagttgtaatgtttttcaccttcttttctcccacttctagtaatgtgatcatgctcatgacttgtttttaattttttaagagttcatttgatactttttttcctaacactttcagattttccttaatagtagcgcaatttggtactaatatgctttgatttgttttatagcctcacactgtcagttgctgatcactattagcagttgctgtctcgagtactttggttttttaaaaagccgtaatcatctagaaatattctaaaagcttgtgcttccatatagcagtcataaaagaagatagtttgtagtaaaattaaatacttttgttctctatgagcaatgcattctaattttgtttttacagcaacagcttgcacaactacagaaagaaaaatcagagattctgaaaaatctggcattatattacttcacatttgtagatgttatggaatttaaggtatgtattttaatatataatatttaacacttcagaagtagatttaaatgtttattaattgtgtgaattgctgtgtcagttgtaaataataaaattgaaattcttccagaactgaagtttaacacataccttatttgtttgtgttttctgaatttaaacagatttatacagataaaagattaaaataagtatttcttttcaggaccatgtttgtgaattgctgaatactattgacgtttgccaagtcttctttgatattgtaagtatcattttcagaaaaatgtccaattattctgtttccagaagagctcaggggaccacttgcttttctttagctagattatgtaactagcatataaagttttagcattattaatttggcttgttttatagcttttttaaaaagtaaagtgtgtattctttttatttgttttgattgtcactgagtataagtcttgtacatattgggaaatacacgttaactttagtattttatttaataggcccaattttgaaaagttaagtggataatattttctctgtaaaaggcatacttgatggactctttcttagtatgataatttttagatacaagaagtcaaagtgaaaattgtctccatttacttaatggtgaactttaaaaaataatttttttcctctttcgtgagattggcaccagtgttccttattattctggcttttattcttttgaactgttaccagtttgaatatagtgatcacaagctctttttctttcatccataaaattgtgtcagacacaaaactgttatctgtaactgtcaaattttagatgtgcttttagtgaaaggaattagcattttagaacagggataaaataaatacagaaaattattagctctcaatagcttctatgaagattttgtgtgtgtttaaaattttaagaaataggaagtagttgaacttgatttttttttctcctagactgtaaactttgatttaacaaagaactacttagatttaattataacctatacaacactaatgatactgctgtctcgaattgaagaaaggaaggcaatcattggattatacaactatgcccatgaaatgactcatggagcaaggtagatttgcattataaaagtctttctaaaatgctcagtttgatggattacaactcattgaaatttgatatgtctgttttaagtgacagagaatacccacgccttggccagatgattgtggattatgaaaaccctttaaagaagatgatggaagaatttgtaccccatagcaaggtaagaggcagttgttaggcatatgagagaatgggcatataacatagcatgaggatggatggttggataaagggataatcttgtttttgaaaaatactataatgggatataagtaatagttatgtgtgcttttatctaattatagacagggaactaattaatgagattcagaatagtgtatagagactcaagaatatattgattgatttcattatagttttttagattttaatatagcactaaacaataggatttaccatatggtatttgagagggtctgttctcacactaatgggttttaatagcaattctgcaaattatagtataatatttgtcgagttacttaactaacctcacgatacctcagttttcttatcagtaaaaatggaataataatagcacttatttcatatggttcttatgagaattaaatgaattacttcattaaaaagtacagtgtttgataaattttaactttattatagtctcaaaaaatgacgggttttatgaaaataatttgaaatgactatcttttaagagatattaaaaatagttcttaatgaaataagtttggttgtaagtagtcttgtcattatggattctctgcagaagggctgattcacagaatggtagtttctgaacacttcaaggaaattcataggtatcttatccagtctcattatttatagctaaggattaagggctggagcagtatcatgacaaggtaagtcatttggtaacaatagtggcaaaactagaactgaagcccaggatactagaatcttggtctacattgttctctttgaatcataaaagttaaactatttaccttgtgtaagtctgtgcttttttctttctttgagacagcgtctcgctctgtcgccccagccggaatgcagtggtgcaatctcagctcactggagcttccgcctcccggg

SEQ ID NO: 917 - DNA, 6000 bp, Homo sapiens
taaaacaaaaaaacaaaaagcaaaaacaacaaaaaaggaaagctaaatctatagttttatagagcaggtgcaaataaacatgtgtgagttatattaccaaagattaggcatactataagatgaatctaattggatgtgagtggtcaagatcaaggctgtaattaattctttattttatttcatttttttaacttttcagatcagctgtatttctggcatctcttctactgattactggagatacctcatgtgtctttattctggtctcagttactcttctgctctactgagttgcaatctctggctaagtcttaactccttccttcatttactatggatactgttgccctgtcttttcctcactgttgccctgtcttttcctcattctctttcttaataattttttggggaataaatgttataccttgtggtctttgccaagcagaagaacaggacatgaattactgttaaaccacagggaaatctattgtccttttccactgttgttcacccagggttggtttctctgcattatggtctcaccaaatgcaattttttagaatggcacttccttgaaaagctctattaatttgttattcacttatgtctgactcttcccacagcttgggccctttttctttctgcattcaattttgtcagaaggtggtggcttcccaaaggaagggttgaaggacagacaaaattactatgtctacttctcaattcccaggctatttcaaagagaaatttgttcatacatttctagtcatacttagtaatacctggttagaagtttaatgggaggaaaaacattatatttgtctttaagatcaagtggaacactgaagtttgatgggaggaaaaacattatatttgtctttaagatcaagtggaacactgcctttgatggcagacctcctaatcaaagggctttatcctaagaacctatagagatacccttaatcaatttttctcacttcttgccttatatagagaagcaacactgggttgggtaaactaagtgattttaaaaaaagaacgcataaacattctttatgattagcaaaagatattacagaaataattctcatgctagtttctggagaaagcaaagctaaagaaagccatctaaaaaagctgatgtatcggtcaggaaaaaatatggcagactcttaactgtgaattgaagaaagtgaaggaactgtttataaaggtttgagcagggttataggactctagaggaaactatagaatcatgttcactggatgcatgaaaaatgtagtgccatccaactgtcttgtcacagtagtgcaccaactttggagtcagaccgataagggatccaatatcagctttaccattttctatgggtgtgatctttggcaattaaaaaaaaaaactgtctgcatttcagttttctcatctgtaaaattaaagatgataatatctctaaaggtttttgaaagaagtaaatgagaaaatgtagctcaaattgtaacaacatctgacacagtgcaaaaaccataactattaaatctagttatcctcccttattttattcctattagagatattataaagttggccacagaaacttattattgaggatcacgtttgaggattattgagaatcacgtttggctgtaagtaaataaaaaaaaaaacaaataaaaaagctagaagtttatttctctttcgtacaaaaccaggtctagacaggccaagtttgacatggctgttgtgttctaaaaagcccacatacaccttccatttttatgttttgtcatccttactgagtggctgttgtcttcctggttcaagatagtggtcattgcatccttgttgggtgtggcagaatgaaggaagtgaggaagaactggcaaatggagagcagcagcagtccctttaggaaggttcttgacagcttatatcttactggtcagaacataagctgcaagggaggctggatgatggatgtacttttccttttttttttttttttttttttttgagacagagtctcactctgtcacccaggctggagtgcagtggtgcaatcacggggctcactgcaacctcctcctcccgggttcaagtgattgtcctgcttcagcctcccaagtagctgggattacaggcacgcatcaccatgcccggctaatttctgtatttttagtagagatgggtttcaccatgttgaccaggctggtctcaaactcctgacctcaagtgagccatccaccttggcttcccaaagtgctgggattacaggagtgagccagcgtgcctggcctcaatttctctctttctttctttcatctctccttccttcctttccttcctctctccctcccttccttctttctttcctttctcccctcccttcccctcctccctctcctcctccttccctccctccctcctttgcttgcttgcttccttccttccttccttcctctctctctctttctttctttctttttaagacagggtcttgctctgtcactcagactggagtacaggggtgtgatcacagctcactgcagcctctgccttccgggctcaagtgatcctcccacctcaacctccagagtagttgggaccacaggcacgccaccacccccagctaatttttaaatttttgtagatatgggggtctccctatgttgccaaggcttgtcttgaacttcaggactcaaacaatcctcttgccttggcctcccaaagtgtgggggttacaggtgtgatggagcttgagcctagcagttgaagaccagcctggacaacatagggagaccctgtctctacaaaaaagttaaaaagtttaagaaaaattcccgtacacttgttctttttaatgcaaaatgtagagaaagacaaaaattgtaattcatctacatctaatctcttttacgcaaatatatacatttcattacagtctagggccagtatgtctatgaattagtgacaataaatattgaataatgagactactatctacagcgttctcctattgggtacttcctgagttataagcagctactagtattcaagtttatatggcaacatgatagtttttcttggggagtaagagttgtgttcaaatttataatacagtgccattttcttgttctccctatacagcagtttttaaaaactagaaaatgagacaatcttttattggtagcactctgtaattctgcgtctagacttagttatttgtagtctccctaaaggagcacatatttccccaatgttcaacatttttaaattttcttatctggctaccccaaacccctcctcgcagcctccccttctcaggtctgcccttactattccaggccccacaaccttgcctcctctaaattaaaatgttaactatcaggctgagaagtaaccagataaattaaattccttgaccagttaatgactagtaatagctcgacagatgatctctctgaagtgtttgtattcttaagactctctaggtacaaagcattcattcaaggtactgcagctttgtatatagaatttcaggcacactggcaggtatgattatgacttcttttggtgggaacaggactcttttaaatgccccttagattaaatccattcagtccactccttctttcttgttggaatattaaaatgaagatttctttacgaatagtagatatagtagctttaaaaaatattttaaagctattcattacaatttccttttcttaaagagttttgataaatccagtgatggcttattactcttagaatgtcttattgaatgtggcgggacattttgttactgacttaaaattaatgaatataatataaaaaattaacatatcgagaaaaggcaaagccaaaaatattagaggcctgagtcctcttggctgaagtttctcacctcaattacgtaagtcctcagttagttcacttttggaatcatgtctaatacatttgacaagggagtagccttggagtgtcgctaagaagaaattgatcaggaaaaatgagatggcaaagaagaatgtttccaagaagaagtgggatttagggtggaggctgtaaaaaaatgggagcggttcctttaggcattgaacaaacatttattttttgccttccacatgccaggacctactgcgtctcctccggatgggtgctcctcgccgacaaagtctagattgtgattatctcaaggacttgagttaccctcacttccgacctcctctctcacaaactggttccaggcggggagactgaggatgggctggggaggctggcagaggcgatccccacctcgcggagcacaacatctgctgtgttctgcggcgagcgcctgtcaagcagtgggaggaaaaagcgcttggagccaccagcccactcttaagcgaaactcgcctggaaaacaccccgcctcccagcagagtttctgccggtttctttagaagggtggtgcggaaaagcaacttttgggaacttgaaggagtggggtgtggggcgaagtggaaagagcacacaacgcgaccccactcagtccccgcttgggactcccatcccggcatcaggcgtagtgggcggtccgggccagggccagggccagagcggcggcggcgaggccatgccgagggcccgtcggccgcagttccccgtccggcctcgcgggggcgccggcgctgccgatcaggtgaccgagggcccgtccggggctgcgggaagcggcctcgttctcagccgccggagacgccgccgccgccgccgccgccgccacacctagtggagcagccggggaaggcggctcgttgggggctggggcggagagcgccgggggtgggggcggaagggcggcgggcggaaggcaggaggctgccggggcgcgggctgctgcgggagaaggggctccgaggagtccgccgcggctcgctctgtcgccggcgcgggattggggcgcgagggccatgggcgcgctctcctaaggcggaggtcgcgggcgggaggggaggaggcccgagagaggctgctgcgaaggccgcgggcccgtgactgggcgcgaggcggccggcggcggcggcggcaccagcaccaccatgtcgcgctcagtgctgcagcccagtcagcagaagctggcggagaagctcaccatcctcaacgaccggggcgtcggcatgctcacccgcctctacaacatcaagaaggtgcgcacgggccggggaggccgcggcggaggcgggcgggcccgggagggatgaagggcaagggaggccgtggggtgggggcggcaggaggcgccgggtgtagaaatctcggcgtcgccgcccgaggcccggcccggggtcgcctggatgcgccgcggcctaatgcggagtcccgggcgcctctccctgtggttcgccggccggccgaaggcagagaagccatttcccggctcccggcggcgggatcgggcgctgggcctcgcacggggtgggggcgccgctgggagccgggagctgtcccctcctcggcgcccccgcccccatgatggggcccataggaaagggagggtggtgggtgggcgaaattctaggtgggtaggaaaacttgagtgttccatattcttacggagatggcagcagtgaacagggattacaccccacatccccattttttggtgtgggaatgtgggtagagaagggctgattggatgaatcccgtatcccctccactttgccactttattttagattgctaaataaaaagccattgagagtgtgttgacgatttgggattatttcattttgaaggtggagaggagggggaagtgagggtggaaccaattttctgaaatacttctaggctgtgagtcactagaactggaataacaaccttctactctttcccctgtactcctcctcatgttagattttccaataccatttcttaaagttcggtgtctgtacaaaataaaaaccgtaaaaatgttgcaattgctgctgatttatagcatagtctgataatttgag

SEQ ID NO: 918 - DNA, 6000 bp, Homo sapiens
ctcccagattataatccttaattcccttctcaagactccgacaatcctacttacacactgcattttagttaaatatctatacatctctctccccactaagacactaatttcttggcactagagacttcatcttaatttacctctatttccctcatgccagggaacacattcaataaacgaagagtaaatgaataaattaaaagggaaaacctcaatatttgagagtaactgaaagaatagctcatatgatggcttataaaacagttttaaagatgcaattttattactatctaaaatagtcaactatgcaataacaaagcattttccagtatgggttcttctacttaaaacaagagaatcatttcaaactggcacatatacaaccctacttacaaactaacaattcagtagcttataaagttataaagatgggcagacagtgaatttttgaagtcactcatttatgttatgtttgagtttttgacaataaacatatattcctctggtaatcattaaaaaattttaaagttacttaacaattccataaaggaaacaaaagatggattatttatcattgctacttaaaaattaaaaataattattttcctaagcatctctggaacacgcttctgcatctgattgaccaaaagagaaaataacaccctaagtggaaacaaatacaatactgaaagggaagactaaaaccagttcccctccctttaccctgcactgctcccttcacaaacatcttttcttcccccactaaataagcagatactggctaaagactttcaattttacaatgctagtcctgttaaacttttccttagaaaataaatttatccaaaataatgagaaaaggatagggaaaaaaagaaaaatattcctctaatgtttttaaagaagtaaaactgcatttaaaccaccacaatactccactttaaaaagtttgtaatagttgtatgggtttttttttttttctcattctctgacctttacagtacaggcagaaatttaacaggaggaaaagacgcaagtattaactaagatctttttaatacagagattaatctcatgttggtaatggtggaggaaaagaaaggagaaggaaaaaaagaagagagtaaaccacacacacaaaaatttaactgagcaaaatgttttctttgggtatttggcagttttgttgaacagttatacaatttcagaaaaacaatgttgcccaaaagagatgctcagattcctaaatactattttcacatattaccatcctctaccttcagaagcaattctgtgaagtatgtagggcaggcattatgctccctacattacagaaaactaaactgagttcagttattgtttaaaatgaaacataatttctactctactacttcaccataaaatcataaagatagagctggaatagactttagtgttccttttacagttaattttccccattttacagatgaggaaaagtgaagctcaagaaagtcaaattactaaccaatgttagagaactctcagtgacagaatgaagattggaatgcaagtctcttaacttctggcccagtgctcttaatcccaccaccacacaagttgccatgctggaacctttaaaaatgttacaaatctctacatgagtgagtcacattattaggtctgcaaaagggaaaccatatatttaaaaacaaaaaaaaaggaattaagcaacaaataaatttaaatgtaaagctaccaacaaccttcaagtcttttccctaaaatccgcttttatgtgttcctacatcctccgtcaaactacaagttccctaaaattcccataaattgtaaatattaagatctcaaaatttttgactgatgaaattaaaaaaaaaaaacattcttcagtaatcatgctccaacttccctaataagcgccaaagcatattactgacaataataagttattttacttaactatttttcattgtatatgttcactaaaatatcatttccactgtatacttccaattgaaacagagtaattagatctggtagacaatctaatgcacatgcattaatgaaaatgtgataattgattggcaaacatgtattatgaggtggaaggttttttttttaagactagaagaggttgagattgaaaagagtatgtggtttataatgcagtaagaatgcagacagcatgaacctaataaacacatggtgaacagatcttactcacttctttggcaagatatttgaacaaatgtttcaattcctagccagctgggaagatatgccagactcacagacaattctataggctgaaagatccaaaatcttatctgattcatttacatgcaaaattacacaaagggagcaaacccaagggtattattattaaaactagagcacacaggttttgagagagaggagggaagtaattcattcatttcaacctggcctaactgaaggcctcgagtatcagataaggccctaaatactctagtatttcaaaaattacactgtccctgcccagagaaaattcacactcaagcaaggtaagcaatgtatttcttaagaaactaaaaatataaggcaagtgctaaaatatgacgtttcaataaatcaaaatatttgacatggatataataatgatcacattcaatgcattttaactttcacaagttcaataatacaagaggctgaagcttcccaaaacaggaagtgaaaaaaacagtgcttttgagaaaaggcaatgaactggaattattagagttcaaatgcccagaatttcatttaatcttatttatgaaggtgggatattaaagtttgattgcatttatcctacaaaaatgtttaataaatgcttagaaaaggtattttgcccaaatacccaaatcacttttgatgttactctcacttcctcttttagaaaccatcataaccatttcctttaaaccacaataccacaggtctagtaacttttataatatttgacttgttcatttttggacaaaattcatataggaatcaatttccaagttttttaagcagcacaatctccccgaacagttcaggtcaatgcaacctctaagtaatactatttaaaactgaattattcctaacctatataaatttataacctaggctccttggtaaatgcagaggggcttctttgtcatgacactgagctcctgccacataaaaggtaacaaactgagtaagcatgttgcagttactctccagatagcactgggtttagagtaataaagccttgcaattaggtgagcaaccagactttgtccttatccaaaatttatcatcattaaaccaggacactctttagaattagtgtctacatcaaattgtaaaaaataaatcaattttacactcaaacgcttggaaatgaatttccaaagaaaaaaaaaaaaacctttcttcagaagccctctcaacctacaatctattgctatgattaaactaaacggtaacattcacgatatattaaaaagccaacaaatagttatgaaggtatgacatcaaagacacattggaaactcgatggatctaaattttccaaatatctctttttctctttatcaaattgtttaaaacttaccaaccttgccttaaggggagagattttgttgttttgtcctacgataatgaatgtaattatttgttctatctttacatggacttttctaaacttccagtggtcttccactccttactgtactgaggacatgtaaaagcctttaaatgggcctattagctatagttgctcaaattatcagactatgctataaatcagcagcaattgcaacatttttacggtttttattttgtacagacaccgaactttaagaaatggtattggaaaatctaacatgaggaggagtacaggggaaagagtagaaggttgttattccagttctagtgactcacagcctagaagtatttcagaaaattggttccaccctcacttccccctcctctccaccttcaaaatgaaataatcccaaatcgtcaacacactctcaatggctttttatttagcaatctaaaataaagtggcaaagtggaggggatacgggattcatccaatcagcccttctctacccacattcccacaccaaaaaatggggatgtggggtgtaatccctgttcactgctgccatctccgtaagaatatggaacactcaagttttcctacccacctagaatttcgcccacccaccaccctccctttcctatgggccccatcatgggggcgggggcgccgaggaggggacagctcccggctcccagcggcgcccccaccccgtgcgaggcccagcgcccgatcccgccgccgggagccgggaaatggcttctctgccttcggccggccggcgaaccacagggagaggcgcccgggactccgcattaggccgcggcgcatccaggcgaccccgggccgggcctcgggcggcgacgccgagatttctacacccggcgcctcctgccgcccccaccccacggcctcccttgcccttcatccctcccgggcccgcccgcctccgccgcggcctccccggcccgtgcgcaccttcttgatgttgtagaggcgggtgagcatgccgacgccccggtcgttgaggatggtgagcttctccgccagcttctgctgactgggctgcagcactgagcgcgacatggtggtgctggtgccgccgccgccgccggccgcctcgcgcccagtcacgggcccgcggccttcgcagcagcctctctcgggcctcctcccctcccgcccgcgacctccgccttaggagagcgcgcccatggccctcgcgccccaatcccgcgccggcgacagagcgagccgcggcggactcctcggagccccttctcccgcagcagcccgcgccccggcagcctcctgccttccgcccgccgcccttccgcccccacccccggcgctctccgccccagcccccaacgagccgccttccccggctgctccactaggtgtggcggcggcggcggcggcggcggcgtctccggcggctgagaacgaggccgcttcccgcagccccggacgggccctcggtcacctgatcggcagcgccggcgcccccgcgaggccggacggggaactgcggccgacgggccctcggcatggcctcgccgccgccgctctggccctggccctggcccggaccgcccactacgcctgatgccgggatgggagtcccaagcggggactgagtggggtcgcgttgtgtgctctttccacttcgccccacaccccactccttcaagttcccaaaagttgcttttccgcaccacccttctaaagaaaccggcagaaactctgctgggaggcggggtgttttccaggcgagtttcgcttaagagtgggctggtggctccaagcgctttttcctcccactgcttgacaggcgctcgccgcagaacacagcagatgttgtgctccgcgaggtggggatcgcctctgccagcctccccagcccatcctcagtctccccgcctggaaccagtttgtgagagaggaggtcggaagtgagggtaactcaagtccttgagataatcacaatctagactttgtcggcgaggagcacccatccggaggagacgcagtaggtcctggcatgtggaaggcaaaaaataaatgtttgttcaatgcctaaaggaaccgctcccatttttttacagcctccaccctaaatcccacttcttcttggaaacattcttctttgccatctcatttttcctgatcaatttcttcttagcgacactccaaggctactcccttgtcaaatgtattagacatgattccaaaagtgaactaactgaggacttacgtaattgaggtgagaaacttcagccaagaggactcaggcctctaatatttttggctttgccttttctcgatatgttaattttttatattatattcattaattttaagtcagtaacaaaatgtcccgccacattcaataagacatt

SEQ ID NO: 919 - DNA, 6000 bp, Homo sapiens
tcttttgtgattcttcacttgcttcaggccatctggatgaatacgtgcaggcttgggctcacaggcctaacacctcataagtcttcctttttcctttcctttcctttctttctttctttttctttctttctttctttctctttctttcttttctttcgtttttttctttcttttctttctctttctttctttttctttctttctttgtttctttctttctattacacactattttcctttttaaaaaaatactctccaaaaagtatctcaatttattcccatggctacaaataatacccaaattctgataacttcaaatttgtatgctaggcctccccttggaggtccagttcaatagattcaatatattttcaaatttttgaaagaatattcacctctggagtgaatattcatctctggagtttttacatttgatgtaaatgtaaaaatgtaaaaatgtaaatagattatttttgttcagctgaaagttggtatcatcaaaatgctaaccctgtattctaactcattttgttctaccattgatattgcctattttccatgtagcattttaacgttaaaaaattataaacctaaaatgatcaaccaatatttgtattcactgatatatattccatcatatactattcatgcataagtctagcctaataaatatctaaaacaaaaaaacaaaaagcaaaaacaacaaaaaaggaaagctaaatctatagttttatagagcaggtgcaaataaacatgtgtgagttatattaccaaagattaggcatactataagatgaatctaattggatgtgagtggtcaagatcaaggctgtaattaattctttattttatttcatttttttaacttttcagatcagctgtatttctggcatctcttctactgattactggagatacctcatgtgtctttattctggtctcagttactcttctgctctactgagttgcaatctctggctaagtcttaactccttccttcatttactatggatactgttgccctgtcttttcctcactgttgccctgtcttttcctcattctctttcttaataattttttggggaataaatgttataccttgtggtctttgccaagcagaagaacaggacatgaattactgttaaaccacagggaaatctattgtccttttccactgttgttcacccagggttggtttctctgcattatggtctcaccaaatgcaattttttagaatggcacttccttgaaaagctctattaatttgttattcacttatgtctgactcttcccacagcttgggccctttttctttctgcattcaattttgtcagaaggtggtggcttcccaaaggaagggttgaaggacagacaaaattactatgtctacttctcaattcccaggctatttcaaagagaaatttgttcatacatttctagtcatacttagtaatacctggttagaagtttaatgggaggaaaaacattatatttgtctttaagatcaagtggaacactgaagtttgatgggaggaaaaacattatatttgtctttaagatcaagtggaacactgcctttgatggcagacctcctaatcaaagggctttatcctaagaacctatagagatacccttaatcaatttttctcacttcttgccttatatagagaagcaacactgggttgggtaaactaagtgattttaaaaaaagaacgcataaacattctttatgattagcaaaagatattacagaaataattctcatgctagtttctggagaaagcaaagctaaagaaagccatctaaaaaagctgatgtatcggtcaggaaaaaatatggcagactcttaactgtgaattgaagaaagtgaaggaactgtttataaaggtttgagcagggttataggactctagaggaaactatagaatcatgttcactggatgcatgaaaaatgtagtgccatccaactgtcttgtcacagtagtgcaccaactttggagtcagaccgataagggatccaatatcagctttaccattttctatgggtgtgatctttggcaattaaaaaaaaaaactgtctgcatttcagttttctcatctgtaaaattaaagatgataatatctctaaaggtttttgaaagaagtaaatgagaaaatgtagctcaaattgtaacaacatctgacacagtgcaaaaaccataactattaaatctagttatcctcccttattttattcctattagagatattataaagttggccacagaaacttattattgaggatcacgtttgaggattattgagaatcacgtttggctgtaagtaaataaaaaaaaaaacaaataaaaaagctagaagtttatttctctttcgtacaaaaccaggtctagacaggccaagtttgacatggctgttgtgttctaaaaagcccacatacaccttccatttttatgttttgtcatccttactgagtggctgttgtcttcctggttcaagatagtggtcattgcatccttgttgggtgtggcagaatgaaggaagtgaggaagaactggcaaatggagagcagcagcagtccctttaggaaggttcttgacagcttatatcttactggtcagaacataagctgcaagggaggctggatgatggatgtacttttccttttttttttttttttttttttttgagacagagtctcactctgtcacccaggctggagtgcagtggtgcaatcacggggctcactgcaacctcctcctcccgggttcaagtgattgtcctgcttcagcctcccaagtagctgggattacaggcacgcatcaccatgcccggctaatttctgtatttttagtagagatgggtttcaccatgttgaccaggctggtctcaaactcctgacctcaagtgagccatccaccttggcttcccaaagtgctgggattacaggagtgagccagcgtgcctggcctcaatttctctctttctttctttcatctctccttccttcctttccttcctctctccctcccttccttctttctttcctttctcccctcccttcccctcctccctctcctcctccttccctccctccctcctttgcttgcttgcttccttccttccttccttcctctctctctctttctttctttctttttaagacagggtcttgctctgtcactcagactggagtacaggggtgtgatcacagctcactgcagcctctgccttccgggctcaagtgatcctcccacctcaacctccagagtagttgggaccacaggcacgccaccacccccagctaatttttaaatttttgtagatatgggggtctccctatgttgccaaggcttgtcttgaacttcaggactcaaacaatcctcttgccttggcctcccaaagtgtgggggttacaggtgtgatggagcttgagcctagcagttgaagaccagcctggacaacatagggagaccctgtctctacaaaaaagttaaaaagtttaagaaaaattcccgtacacttgttctttttaatgcaaaatgtagagaaagacaaaaattgtaattcatctacatctaatctcttttacgcaaatatatacatttcattacagtctagggccagtatgtctatgaattagtgacaataaatattgaataatgagactactatctacagcgttctcctattgggtacttcctgagttataagcagctactagtattcaagtttatatggcaacatgatagtttttcttggggagtaagagttgtgttcaaatttataatacagtgccattttcttgttctccctatacagcagtttttaaaaactagaaaatgagacaatcttttattggtagcactctgtaattctgcgtctagacttagttatttgtagtctccctaaaggagcacatatttccccaatgttcaacatttttaaattttcttatctggctaccccaaacccctcctcgcagcctccccttctcaggtctgcccttactattccaggccccacaaccttgcctcctctaaattaaaatgttaactatcaggctgagaagtaaccagataaattaaattccttgaccagttaatgactagtaatagctcgacagatgatctctctgaagtgtttgtattcttaagactctctaggtacaaagcattcattcaaggtactgcagctttgtatatagaatttcaggcacactggcaggtatgattatgacttcttttggtgggaacaggactcttttaaatgccccttagattaaatccattcagtccactccttctttcttgttggaatattaaaatgaagatttctttacgaatagtagatatagtagctttaaaaaatattttaaagctattcattacaatttccttttcttaaagagttttgataaatccagtgatggcttattactcttagaatgtcttattgaatgtggcgggacattttgttactgacttaaaattaatgaatataatataaaaaattaacatatcgagaaaaggcaaagccaaaaatattagaggcctgagtcctcttggctgaagtttctcacctcaattacgtaagtcctcagttagttcacttttggaatcatgtctaatacatttgacaagggagtagccttggagtgtcgctaagaagaaattgatcaggaaaaatgagatggcaaagaagaatgtttccaagaagaagtgggatttagggtggaggctgtaaaaaaatgggagcggttcctttaggcattgaacaaacatttattttttgccttccacatgccaggacctactgcgtctcctccggatgggtgctcctcgccgacaaagtctagattgtgattatctcaaggacttgagttaccctcacttccgacctcctctctcacaaactggttccaggcggggagactgaggatgggctggggaggctggcagaggcgatccccacctcgcggagcacaacatctgctgtgttctgcggcgagcgcctgtcaagcagtgggaggaaaaagcgcttggagccaccagcccactcttaagcgaaactcgcctggaaaacaccccgcctcccagcagagtttctgccggtttctttagaagggtggtgcggaaaagcaacttttgggaacttgaaggagtggggtgtggggcgaagtggaaagagcacacaacgcgaccccactcagtccccgcttgggactcccatcccggcatcaggcgtagtgggcggtccgggccagggccagggccagagcggcggcggcgaggccatgccgagggcccgtcggccgcagttccccgtccggcctcgcgggggcgccggcgctgccgatcaggtgaccgagggcccgtccggggctgcgggaagcggcctcgttctcagccgccggagacgccgccgccgccgccgccgccgccacacctagtggagcagccggggaaggcggctcgttgggggctggggcggagagcgccgggggtgggggcggaagggcggcgggcggaaggcaggaggctgccggggcgcgggctgctgcgggagaaggggctccgaggagtccgccgcggctcgctctgtcgccggcgcgggattggggcgcgagggccatgggcgcgctctcctaaggcggaggtcgcgggcgggaggggaggaggcccgagagaggctgctgcgaaggccgcgggcccgtgactgggcgcgaggcggccggcggcggcggcggcaccagcaccaccatgtcgcgctcagtgctgcagcccagtcagcagaagctggcggagaagctcaccatcctcaacgaccggggcgtcggcatgctcacccgcctctacaacatcaagaaggtgcgcacgggccggggaggccgcggcggaggcgggcgggcccgggagggatgaagggcaagggaggccgtggggtgggggcggcaggaggcgccgggtgtagaaatctcggcgtcgccgcccgaggcccggc

SEQ ID NO: 920 - DNA, 6000 bp, Homo sapiens
agaagctggctgtctgcaagccaggaagagagctttcagcaggaactgaataggccagcaccttgatcttggacttctcagcctccagaactgtaagaaaatatatttcggttgtttaagcaacaaagtttatggcattttgttagagcagcctgagcaaactgagatataaaccaaacttctccctcttgaaaaaggaataggcccagtacagtggcgcatgcctgtaattccagcactttgggaggccaaaatgggtggattgcttgagcccaggagttcgagaccagcctgggcaacatgatgaaaccccaactccactaaaaaatacaaaaaattagccaggtttggtggcacgtgcctgtagtctcagctacctgggaggctgaggtgggaggatcacctgagctaaggaggttgaggctgcagtgagccatgatcatgccactgtactccagcctgggcaacagagtaagaccttgtctcaaaaaaaaaaaaaaaaaaaaaaaagaaaagaaaagaaaaagaaagagagagaaaaatatatatatatataagctcaggctatctacaggatgtcctaaaatgaaaaactgaagagattatttgcatcatttaaacaacaatcacaggctcatcaaaaaacaactctaaccataaatcaatccatatatttatcataataatgatcaaaaaaataagtactattaagcattcactgcatgctaggcactgcgcttataaacaattttagattcttagtattatcccttagctgcttaacaatgctttacacacattatcatatttgacctcacccctatttgtgattagaatcacaaataaaacctatgtttgtttcagtccagtgccttatcttttatttactgtagaatacggccctgcttccaaaataattacagttaacgaatatttactgagcatcagctatgtgcctggcactgttatagtcattggaaatacagcagtgaataaaaacaaagtcccttctttcatggatcttatatccaagtggagagagcaagaaacaaatatacatataaccatgttcggtcataatttaaatgctaaaaaaagaaaaatcaagcaaaataagggaacagagtgagagggcagcgtgttatttgttttagggtggtaagagaaagcacttctgatacagtgaaaattgaacagagacttgaataaagtgcagaagccagccctgtagatatatgggggaatagcttaatagccaagtgtctaaatcttctgacagatttggactgtctatgccaagtgctgaaacaggagtgcactagtaggagatggagaggttcaagaaacacctgggtagctaacttggctttaagggagtgaattaggggaaagagttggaggagatgtggacagagagaaatgataataactttggcttgtattctgagtgataggaagccacaggagggaactagggaaaggagtcatatgatggatcctgtgttgtgctacccagatccttcttcaatgaatacctattgtctccactaccgggtgtactattggctgactggtaacaatcccttcagggactgctgcagctgcagagggctgctttgccgaggttgtgtcccttatggaatagaccacatccatggctgattgatgagggagcataaagatctgtatgttagcccaatttgaaacaactctgaggaatcattctagctctaaaaagctaacacgtggttggctaagcctgtcattggatctgtataaccacttgacttctctatctgcccaattctgctttcttcttcccttccacaagtgttgatcccaagggcactcttcgaaaagtcttgcatgctaaactccacctcagtcagcttccaggaaacttaatctatgacaagtgacatgacattgcttatgccatagaagggtcttcctggctgctacaaggaaagggagcaggatggaagctccctttcctgcttgttgttaggagactactacagaggtccagatggaagatgacagttgcttgcgctagaacggcagcagagggaaggtaaaaagtagttagattctagggatacgtgagaatcatgccaagagaatctgttagtagattgatgtggggtgattcagataattccaaagttcttagcctaagcaactgaagaatagatttgccagttaccaagaaacaggtgatgtgaatatgagaagaagtttgtgacttgttaagtttaatactcctattagtcagccaaatggagatgtcaattagtcagccaaatggagatatcaagtgggcagctatacatatgaatctggacttcataagagaggtatctgctggaaatgcaacttctggaataatcagcttaaagatgctatataaagccatggagctgaatgagatggcctggtagtgagggttgatagagaagccccatgtataccaaagtgactaagaaggagaggtcagggagttgaacgaaaatgaatgagagagagagttctgagagtacaagtaaagaaaatgtattaaagtacacaatgtgatcagctgtgtcatatgctgttgatagtgttgagtaagataaagactgtgcactataatggatttaaagactccttcaacaagaacagatctatgtcccaggaatatacaaacagtatctgattcaatccacatgataacctaataaaataggcatccattctctttttataaagaaggacatttaacttggaacctaaggacatagcctttggtcacacagtccagatctgttaggtaacagatctgagtaacaaggttgaacacagttctatcttactcatgagcccatattctttacactacatcattctgtagaggatgggtagagttgttggttatacattgatagctgcagtccctgctggtaatactagaatattaatgtctgcagtaacattgattgctaatatcctgacacctagatgctatccaactcatatcaacattttgcagaagaaccaaggtgcagaaaagtaaactgatttgcccaagttcatatcccttgtaatcccaggtcccttgactcaatatacaatgctcgttccactgcaatgtacggctttccaaaaagtcccttaagggcaaaaatcctttacacaaagctagcttagagtgctggcaggagagaaatgagaggcaaaatgttattagacccaggccagagggagaagacagcattccacccctggggaaggcatttcccaggctgagacatgaatggtaatagattgtcctgcaagaaagggcacatccttacaagggcttggggacttggatctgaggaaaaggggaaagtgtgaagtgaatacaccctagaatatgttcctgtgttctccatataattcttctctcctaacagatttagagtgtctatgtgaagtgctatgctaggcattttctgagcattacctctaatcctcataaaaatctcacttttagataaagtggctaaatcgaaatgaagtagtaagcagtggatcttttgtatttagtctcaggtctgttgaattctttaattttttaagatttttttgagactgagtcttgctctgtcgcccaggctgtagtgcagtggcttgatctcagctcactgcaacttccacctcctgacttcaagctattctcctgcctcagcttcctgagtaggtggaattacaggcaagcgacaccatgcctggctaatttttgtatttttttttttttttttttagtagagatggggtttctccatgttggccaggctggtctcgaactcctgacctcaggtgattcgcccgccttggcctcccaaagtgctgtgattacaggcgtgagacaccgtgcccagccactggtctgttgaattctaagatccacttttatcccactacattacatgctctgacatgttacataataaaatctgccatgggaatatgtaatcctcattaattaagatgtgacttatatgggtaaaaatcattcataaataatcaaagatcctcctctttgcattacaatttctagcctgagttaataatctcaattctgcacttcactaagaacatgcagacacagcctgaaatgaatatagagaaaaacaaaattcggccaagcacagtggctcacacctgtaatcccagcactttgggaggccgaggtgggcagatcacttgagctcaggagttggagaccagcctgggcaacatggtgaaacccagtctccgcaaaaaaatacaaaagaagtagttgggcatggtggcacgcacctgtagtactagcaatttagggggctatggtaggaggattgctggagcccaggaagtcaaggctgcagtgagccaaaatcgtaccactgttctacagcctgggtgacaaagagagagaccttgtctcaaaacaaaacagaacaacccatgaaattcctttcatgattatggcaactgcttcctgtgtgatcctttagaagactttttaaaaatttcaattaaaacaagtttgaatgtaaattttcttcatgaatacaattcctcatttataaatttgttactggagtattttgattacacaacattttttgcttatatatgtgtggttttgtataaatataaatatatatatttgagatggagtcttgctctgtcgccctggctggaatgtagtggcgtgatcttggctcactgaaacctcaacctcccaggttcaagcgattctcccacctcagcctcccaagtagctggtattacaggtgcccaccaccatgcctggctattttttttgtatttttagtagagatggggtttcaccatgttggtcaggctggtctccaactcttggcctcaggtgatccacctgcctcagcctcccaaagtgctgggattacaggcgtgagccaccgagtctggccttagttatttgtattatattgataatataagaagtcgaccaagaagcagcttctccactccttctggaaactccacctggttcaacctgcctgcctccactcctgcctccaccatgtccatcaggacgacccagaagtcctacagggtgtccacttctggcccccgggccttcagcagccatttctacacaagtgggcctggtgcctccatcagctcctcgagcttctcccaagtgggcagcagcagcttccggggtggcctgggaggaggctacggtggggccagtggcatgggaggcatcaccaccgtcactgtcaaccagagcctgctgagcccccttaacctggaggtggacccacacatccaggcagtgcacactcagaagaaggagcagatcaagaccctcaacactaagtttgccaccttcatatacaaggtacagttcctggagcagcaaaacaagatgctggagaccaagtggagcctcctgcagcagcagaagacggctcggagcaacatggacacatattccagagttacatcaacaaccttaggcagcagctggagactctgggccaggaaaagctgaagctggaggcggagcttggcaacatgcaggggctggtggaggacttcaagaacaagtatgaggatgagatcaataagcgtacagagatggagaatgaatttgtcctcatcaagaaggatgtggatgaagcttacctgaacaaggtagagctggagtctcgcctggaagggctgactgacgaaatcaacttcctcaggcagctgtatgaagaggatatcccggagctgcagtcccagatctcagacacgtctgtggtgctgcccatggacaacagccactccctggacatggacagcatcatcaatgaggtcaagcgcagtacgagatcaccaaccgcagccaggttgaggcccagagcatgtatcagatcaagtatgagtagctgcagacgctggctgggaagcacggagatgacctgcagcatacaaagactgagatctccgcgatga

SEQ ID NO: 921 - DNA, 6000 bp, Homo sapiens
agcttctcacgaggtagaactttagagcctggtgtgtttgtggctggagcatagcagctcttctacaactttactgtagtttctactgaatattttggtttgcaaatataaaggattctctgaagcacaaccttaaataacgtgtggtagacacctgggagaggaaaactgcagacagaaaaatgtggccggatgctctgtgggcgggcggcagcgatgttcggccaggtggctccaaggagaggaagcagtgatgcattgaggtaagagagctgacagatgaaaccacatggaccctaagacagagtggaaggagggtgccttaaatattgtagggtgtgctcttatcaggttatgagaatgcagttgggatacaggtttgctttctcttgcctgtatcatcggagtgatgattcagataaatttaaaaattactttattctgaagtatgtctgatgtgaagaggcttaaataatatcttaggattaagagtcaggagacctaaattattgttcagatatgtaccaccgaatttaggtgtgtgatcttttgcaagtccctcaacttctctcactgtaggtttcttcccttctaaaacaagggagttgggttactgaactgcaagaatttttctagctccagactgctctgattgtctctagcactggaaatttagacacaattagaaggcacgtttctagcccttcagacctacactgcctaacttagtagccacatgtggccatgaaacacttgggatgtggctaacatgacaaaattttctattttatttcattgtcattaaatttatattaagaaactgatactgtatttagttattgaaaaactttatttatttttgagacagagtctcgctttgtcgcccaagctggagtgcagtggtacacaatctcggctaactgcaacctctgcctcctgcgttcaagtgattctcctgcctcaacctactgagttgctgggatcacaggaacctgccaccatgcctggctaatttttgtatttttagtagagacggggtttcaccatgttggccaggctggtcttgaactcctgatctcaaatcatctgcccgccttggcctcccaaagtgctaggattacagatatgagccaccacacctggcgtgaaaaactttagtttgttcaaaacaacttaggaatgtgaatctgctttttgcaacagtaaattttgtgaaatctaaatacagatcaagtgtttccgatgaaaatttggcatctgaattgggacatgctgtaagtataaaatactagatttaagacaatattaaaaaaggaagtaaaatgtctcaataatttttgttgattacatgttgaaatgacaatgttttagaaatattgggttaaataaaataaattgttaaaattaattttatctgtgtttactttttaaaatatgactagtagaacatttgccaatgtgcgtggcatttcttttggacagcttttacaggacaggttatactctataaactgcagtgagtggttggattggcatattggccctagttgatcatggatgttttggagaggaaagctgtgtcaccctttaaggaagacacttgtaccagtctgagttattactctcatcagacaaaactagccccaattagctttgctaatagtgtttcaagagagtcaggggatgtgaggtctcttagagtctctctggttctcagtgctttcaaaattgcaatgtgctgtaggcaccatgagtaaatgcactgcgacatctccatctgagtacactcactattcctacctccagagaggggatctgtttggaggagcctgtctccattcagtgagcacccctgttgggtggggggttgagccacgccccttcagaggctgttggccttgcctgcgtctggctacctttagcctagccacaggtttctggtatattcagttctagacaggtagtagagcttgttttgccttttccacatgaattcttcagaaggagggtgtgtcagtggcaagagttttgagtttgaggccttctgctctgtgcaaaaccctccttttctgcatctacagggagtaaacatggaatcggtgagaatcactttccttgatcattatgtggtcagtatgcggtgactgacttgatgtgactggggaaggtcccttccctggacagaatatggtgagtgtcgtgccattaccggagaggatcaccttccctggccacatgtggtaagcagtgactgggaacgatcatcgctcccagtcagtgtgtgattactaacctggagtgatccaggaggaccactgtatttgtttgcttggactgccataacaaataccacagagcggacagcttaaacaacagacagttctggaggctagaggctgttgatcaagatatcagcaggtcttgtttcttctgaaacctctctgcttgctttgcaaatggccaccttcttgttatgtcctcacagggtggtcccttagtcagtgttgtatgtgtcctaatttcttcttatcaggacaccagtcatcttggatcaggggccactcatattatctcattttaccttaattacctctttaaaggccctatctccacatacggtcatactctgagttcctgagggttagaatttcaacgtatgaactggaaaagaacacaactgagcccataacaaccgccatccctggtcggaatgtgtcattcaaggatggtcaacttaatgaactgtgtggtcagaagcaatgaccacagaatgaccatcaggtcacctggagatttcctactcaagggaatgagagcaggaacatatatctttgacacggtgatgaatgagtttaggtaaatgaggtggatggaggaatgtattgacttctgaattttcctgcaaggccacagatgtactgcctcctcctcagcaccaggaattccttgttacttgaaccacagtgcctgagaccaagtaagtgtagttgaatgtccttgggatagtgtggtaagtcctagttaacaaatctgacatcaggcacaagggttaacaatctatttagggtcataaaagaaacacaaactatcagccctgcaccaaagaacataaggcagaggtgatcaggctgggaacagaaagtaggaatcagcagagttctgattcctgaagagggtaaccttcttaaagtcagaaactgatgaacaggtatggatgaggaggatggtgataagctggagctaaggcagaagcaggaaaatgcaagacatgacaatatccctaggaggctggctggttacagcagaggtattgtgaccaagaggactggcttacagtggtgccagagagagaaaagtctgtgtctaggtgtgaagtgatctgggactggattagtgacggggagtatggggtgagtgtgagaagattgctaaaagctggcaattgatgaaatgttgaaattaaggaggtccaaagttaaacacacaaccccaaaaccaccataatgatgtaatcctgtgacccccaagaggttactagttttggtactggtgctgagacctctggaatgcaacacctatgctcatgaaagaaaagatgggaacagtctcattgcttacggattcttataccccagaaaagttaattccagtgtgtggcattttattttcatcctaactttaggcttctctagtcagcccaattgttagcaacaagaaattagatagatggaagcaatattctccatttgacaaggtttaggggcaagacattattaacctgggaggaggagttaacctaagtaacaacaaacagacttcataaaagggctgtgatgcattctatacctttatcttggggaaaatgcagtaggaaagggaaacagctagcttcacaggaatttgcttggcttactgggatagaacaagaaaacctgtcctttatatgctaactgaacattaagtcttttgaaagcaagaggacgactccactcccagtatcctttcccacggaagggttttctgcaattatcgtaaatgtcctctgaaagcaatcctagattacataactaatcccatatatgtatgagtatgtgtgtatcctatacatataaactaggattatatatctatgtaaaacatttgtgtcttgcacagaactttgaaaatttccactgtcttcaaaggataacagatcttgagtaggttgctgagggctttcatctttttccttagcactataaatgcaaaatcggctattcagcctattgggaccctccctacactgccttcagtcagtgcctcagaagggacaccattcgcgacagcggacgttagcagtggggtctaggttccataaatccccaactgatgttgacactccgaggaacctctgccaagttgtagcaaactgggttctccacttacagggtacgttccggtcctaaggaagactctcaagaagagtcagaaaataggtctttggtaggcactgaagtttggtaactagtcgcaggcagctgggacgaattttgcggcttccttctccccggtctccggatattcacacctctcgaactgacctctctgaaggtgggaaggagtacacagagcagtagttccagccccgcgcgccccctctgcagcgccgccccctccgcccctccctcgcggcagcccgagtgcgccccacctgcgccgccacgccgccgcgcctccccgccccgcctcgggccagccaggcgccgcaccctctcaccgccgggccccgccccgcacacgcgcccccggccggtgccccgcccctcccgtcacgtgacagacccaccctccgcacccgttccgattggctctcccgacctagggggagggatctggcgaacggcgatgccccagacgcggctgcagttttcaaaccgcgactgcaagcttcggtagtcctctccgctgctgtcgccaggagtcacttcacgagaagccaggtcacaaccgtcggcccttgtctggaaaagtaaaagtggatcctgccacgttcggagctccctggcgcctcgcccggctggagctagagaactcgtcctgtggcggcccccggcgtggggcgggacagcggccccctggagggggcagtcccgggagaacctgcggcggccggagcggttagtgtcctgcgggattggcgggttggctcggggctgcgatggaaccagccgcctcggtacagagacctcatacgtgaggaaggaggacccgaggagggtttaggcggtacggtccggctgagaggggcttggactccgccgcccctgaggtggctgattgctgctggcgcctctccgctttgcggctggagtccgggttccctggggctccgcgcggggggcggccggcggtcctcccaccaccctcctcagcccggggcgcgtgtctgtgtctgtgcgtgtccgtgtgtccccgtgcgccctccacccggccggccccggctctccccaggtcgcgccaggcagggcccccttcgcggcgggcccgcgcgggtcccttccacagcaaggccacgcggtccccctagcctctcccgagtcccagctgcggcgtgggcgcgttcccatcgggactcgtggacgcgtcctgctcccagctgcctttcgtctagagaaagttcgtgttcatcttgtgggacgttttcagttactgcttgggaacagtgttttaaaaccagcgagagatcaagacgggctacagctgtttccgtgattttcagcgatctgatttttgctttgatgccttgtgacccacttagtgtgcacgactcatcctcaaactataccactactggatgccaacgatttttgacatttacccaggctctttgttttattgtagggaaaagcgtttcatttgaatttcctccgagggagaagtagagacaaagttgaaagaggctttatagcagctggtagctggcattagtttctgtctggactagaggcactctgacatcaa

SEQ ID NO: 922 - DNA, 6000 bp, Homo sapiens
tgatggagaagctctaagtacactcgtcttgaataggtaataagcagtggtatttgttgatttatatttctcggtgaaagacagaattatttgtattgctgtttgcagtttccatcatgtgtacctccacatttgatccagttgggtttgtatctagaattgtaattgtgtaaatcaggtgtgctctaatgtatccttatggttgtgtttttgaaggaaccccaaagtctttactattttgatcagctttctcatagaatagactaatttagcacatgggtacctttctgtattttgcaagtgtttacagttgttttgaaggcacatgactgaatcttgtattttttttttttgagacagagtctcactccctggcccaggctggagtgcagtggcataatcttggctcactgcaatctccatctcctaggttcaaacagttctgcctcagcctcccaagcagctgggactacaggtgcgtgccaccacacctgactaatttttgtatttttagtagagacagggtttcaccatattggccaggctggtctcaaactcctgacctcgtgatccgcccgcctcagcctcccaaagtgctgggattacaggtgtgagccactgcgcccggccttgtaatttttttattttttatttttatttttggagacagagtctctgtcacccaggctggagtgcagtagtgcagtggctcaatctcagctcaagcctccggggttcaagtgtcaatcttgttttttgttttgttttgttttgtttttttaaggtttttctggttaaaaatatgtaaattttcagaatattattttgcatagaacagggaagtaaacaactaacttccaaataactcagagccaggcatggtggctcacagctataatcccagcacttggggaggcacaggcgggtggatcacctgagatcaggagttccagaccagcctggccaacatagtgaaaccccgtctctactaaaaatataaaaattagcagagcatggtggcgtgtgcctgtaatcccagctactcagaggctgaggcaggagaatcacttgaatctgggaggcggaagttgcagtgatccgagattgtgctgctgcaccccagcctgggcaacaaagcgagactctgtctctaaataaataactcagatgtaagtgtatttcaccatcgaatatttttatttattttgagagacagactctgtcacccaggctggcctgcggcggcacgatcatagctcactgcagccttgaactcttggggtcaagcaatcctcctgcctcagcctcccaagtagctgggactacacacttgcacaagcacacttggctgatcttttaatttttttgtagagacgaggtctcaatatgttgcctcaatatgttgcctaggctagtcttaaactgttggtgaatcttaagtgattctcccacctcagcctcccaaagtgctgggattacaggcatgagccactacccttggctgtgatcaagtatttagtctgttgttaaatgtttactaaatagtctgaagtagagaaaatagcacccaatctaaaataaggtgaggtctagtcacttatttaaatctacattttaagctatagtttactattagtttaaactttaagacaggtaatgttcatgctgcagacaatctaagggcattattaaaatgtttgttcttccttatctcagaattgaagtatgtcagaagcaagacttttctttccattttgttatagtagaaatgcatacattaacaggtacgttttagacattacacgtgctcatctgacccaaaagctctaatgagctgccttaccctggaatgtttttcttagcttggatttgcttttttggagggattaagaaaagacttggctgggcgtggtgactcatgcctgtaatcccagcagtttgggaagccgaggcgggtggatcatgaggtcaggagatggagaccatcctggctaatacggtgaaaccccgtctctactaaaaatacaaaaaattagctgggcgtggtggcgggctgaggcaggagaatggcgtaaacccaggaggcggaggttgcagtgagccgagatctcgccactgcactccagcctgggcgacagagcaagactctgtctcaaaaaaaaaaaaaaacacacaaaaaaaagacttgaggccagaaaaaaacaagcctacagagttttcattaagccattttactgctagttgaaaagtgggatatccagtttacatagcatatagcttattcctctgatttttatttgggtccttaataaaatagaccagctgtcttgaagtttgaacgttgcttctgtttcacaatctgctctcaaatggacatttgattacacattccaagtattcatttacctggtaaaaatttcaggtgagcttaacaatactgtcagctttttgtataacatttataaaagaagtgaattcagaacattgctcattcaaaactcagcattaatatatggagatgtttattaaatgaccctcaaatgtaatatttagtaattactgtttttctaccattcataatagttatcactgtatcctataacttactgtgatgtgatttttgctgctcggcctcctgagtagtggggattacaggtgcctgctaccacatttggctgatttttgttattttcagtagagacagggtttcaccatcttggccaggctggtctcgaactcctgacctcgtgatccacctgcctgggccttgcaaagtgccgggattacaggcctgagtcaccacgcccggccaggccaacagtttattaagaaggtaaacggatatggacaagtataattaatagaaaatagcctaaactgtctcagatacttcctgtcttaatttgatcaaaaattgctaggaagcaaaaaaaaaacaaaaaaacacaaaaaccaaaccagattacttagggagtcctaagtaatctagtaacagcttgaggggaattaaacagataggcatttttatttcatttaaatcttactatcaactattcttaacaggctaaaggttggtcttcaggttgtggcagtcaaggctccagggtttggtgacaatagaaagaaccagcttaaagatatggctattgctactggtggtgcagtaagtaaaataaatgtgataatggtttgctgaatgtttatacttgtctggaatttatagatagtttaacatttcacaattagatactacaactatctgtttcttttggctctttggaaggtaggggttggattaaattcccgttaatttgccacaagtctggcctaagaatgagcttactgactattctatattgactaaatcttattgactgaataagggggtttccttttttttgttttttttggagacagtgtcttgatctgtcttgactattcttgacttgatctatattgactattcttattgacttaaatctgtggggtttctttttttttttgagacagggtgtcttgatctgtcacccaggctggaatgcagtggcacgatcttggcttactgcaacctccaccttctgggttcaagcaatcctcccgtctcagcctcccaagtagctgggactacaggtgcagtaccatgcccagctaatttttttacttttagtaatgacgggtctcactgtattgcctaggcttctcaaacttctggactcaagcaatatgcctgcctccgcctcccaaagtcctgggattacaggcatgagctaccgagctcagttttgaaaggtagaagtgtatgctacaagggatgtaggacttgagagtcaaggcctatggtcttgtcctggctctaccagtaagtgtgaccttcgatgtttttttctcaagtaaggctggtaataattaccacagttgtgagaattgagaatttggaaatgcagtgaaagagactatactcaagtcttgttctggactaacagtgatcttaaaatctctcatttcaaagaaataaagtattttgatgattctcttgcatggtgtattaataaacttggtataatggcagaaactgtaacctacaacaggtttacgtttaactctttttgtaggtgtttggagaagagggattgaccctgaatcttgaagacgttcagcctcatgacttaggaaaagttggagaggtcattgtgaccaaagacgatgccatgctcttaaaaggaaaaggtgacaaggctcaaattgaaaaacgtattcaagaaatcattgagcagttagatgtcacaactagtgaatatgaaaaggaaaaactgaatgaacggcttgcaaaactttcagatggagtggctgtgctgaaggtaacattcattattatgaataagtttcttgggttctgagtccaagaatgattttgcttctgtagtattccccagtagtaccatagaactaaacgaatacttgaggaattaacttcatagtggaattttgtttgttttgttttgagctcttcgtcacccaggctgggatgcagtggtgcgatctcggcgcactgcaacctccgcctcttgggttcaagcgaatctcctgccttggcctcccgagtagctgggattacaggcacttgccaccatgcctggctaattttgtatttttagtggagacagggcttcaccatgttggtcaggctggtctcaaactcctgacctcaagtgatccactcacctcagcctcccaaagtgctaggattacaggtgtgagccaccacgcccacctcaggattgctttttaagtaaactgcttttaaatgacttggcaattagcatcttgaatgaagaggccatactaactggaattcttttcgtctttaggttggtgggacaagtgatgttgaagtgaatgaaaagaaagacagagttacagatgcccttaatgctacaagagctgctgttgaagaaggcattgttttgggagggggttgtgccctccttcgatgcattccagccttggactcattgactccagctaatgaagatcaaaaaattggtaaaaagttaccttttaaatgagtttgtggcctgattttagtttttcttagaataataatgttgcagtcccctaaatggaatagcacattcatttcctgaataacagaagtagaatagtgctaatgtcagagctaaacatgcatcacatctttttcagaggaaatgatttgatctgtagtaggattgggatttccctacatcaatatcctcacaacttataaatgtgttacaatatttacaaatgaaagtattaaaattttgctgaaatttctctgtaggtatagaaattattaaaagaacactcaaaattccagcaatgaccattgctaagaatgcaggtgttgaaggatctttgatagttgagaaaattatgcaaagttcctcagaagttggttatgatgctatggctggagattttgtgaatatggtggaaaaaggaatcattgacccaacaaaggtaaatggttgaacactttctaaaaattcttttgttgttcattttgttaatgtatcctcacatcccaaatctttgattttgtcaccagaaaaatagtctaatagcagtagcaacagcaatagctcttgtgcccatcaacaattctcatgtacatttccagcacctagatatttaatactccactaaaaggaagcaggatcccttgagtagcagttgagtccatgcctggaggcaggaaaaaatcaggatggatctggaacaccctgttcctgcctggcagtaagaatactttccaagatacgcagaacagggttttgttttgttttgaagacagagtcgctgtgtcgcccaggctggagtgcaggcagtgacaacctccacctcctgggttcaagcgattctcctgcctcaggctcctgagtagctgggattacaggcatgcaccaccatgcctggctaatttttgtatttttagtagagacggggtctcatcatgtt

SEQ ID NO: 923 - DNA, 6000 bp, Homo sapiens
aaaaaatcacccagcgcgcaggcgcgctcgccccagcggtcgccgctagccccctcgcccctcccagggagggagggcggtcgccccgacgcgcaccgcgattcgccccaagggccctgcgcaggacgctgacgcgaagactcggaggcggaagaaaaaaggagctgtttctaggcttttctaggcgcccagccgaggtgaaagaactaccccttcgtcccctcccggaaatgacgcgatttgacccttgagccgtagggagcgcggcattttctggaaagttctggaaccgagcgaggcccgggaactagactaagccggccggagagggctgagcgcgctagcacaccctgcgcgggtagggaggggcggggctcgcgcgcagggtgtgcagattgcagggcccgggctgacgggaagtgggtgggagctgcctgcacacgcggtgccgcggggcgggagtagaggcggagggaggggacacgggctcattgcggtgtgcgccctgcactctgtccctcactcgccgccgacgacctgtctcgccgagcgcacgccttgccgccgccccgcaggtacgcggccttcccgcaccacctccccccggctcctgcgacccccgagtgggccttcctcctctgcggtccagctggagggtgcgggcggcgacaacctggagttccgcaccgcgccgcaccgcaggcccaggcctgcgggtccaggcctcgcgggtccatgcgggttccatcacgtgcgacgcggatcctggacctcggctgggcgcgggagggacaactcgtggggtttgaatttgggggattgtaaccacttaggcccgctggtgcaacctgcgcctggccgacttcagggaaccggggagggtggtgtacgtgagggaaccgcttttttcccccgcaggcagctgggataccgcgcctccagtcttgaccttgctgggggcgttcggaaagaaggacacgtgggctcgcgccgagtgggccgggccgccgcccccagcatcgcggccttgctggttgctctgatacagtagccttgggtggatccatggagacactttgctgagcggctttttgcaccgtcaggaatacttttaacttccctggtcacttggatttgtaacttgcctctctccggctgacttggtttctcaggggccacagttggagtgggtctgcccacaaggccgttttcgcggtgaaagattaactcgtttttggcggcagggataggtggccgtggggaaggagccgcatgtgctttgtgctggtgctataggtcaggcgccggccggggcggcctctttagcttgcgctagtggctgatgttccgaagctgcggcgccttccgtcattcaggcgtagtggctggcggaggtcagccaggctcagcatctcacgttgcttgctctgttgcacaggtgggcatgtttgttctgcagcgcaccacgggtggtagttctgatgatctttttgcttccatccccagaaatgcttcggttacccacagtctttcgccagatgagaccggtgtccagggtactggctcctcatctcactcgggcttatgccaaagatgtaaaatttggtgcagatgcccgagccttaatgcttcaaggtgtagaccttttagccgatgctgtggccgttacaatggggccaaaggtaccagtatttttattttattgtaattacggtattattaatagcattttactcacaaatagtcgcactgaactattcaacagtactttcatctccatttttgagagaactcagtttacatgtaagaattctgaagtattggttagcctttttttcttagacatgatcttaaagcttaaactgcttcagccagattttcgaaactattttgttcaatgtgtgatgtaatcaggtagtaacttacagctcaaggtggattcttaaactcgaggtagaatttcgctggcttaagttaaaatttggatcctttcccagtagttcatgccaagtgtagagagaagagtttaacttatcttccataattccttaggtatgtgcttgtagatgctaaatttttttttggtttattgtagtaaaatgtacacaacataaaattaccattaagtgtgcactttggggacatcaattacatttatgttgtgcagtcatcaccaccatccatctccaaaactttttatatggaaaaattgtaactttgtactcattagacagtagcttcccattctctcctccaccccaagatgctagttttacccatcggttttctgctgttctcttgttccaaagcatatttaaaataagtctcatttaataggggtaatgttttgaggaggcctttgaaggtggtgtgcagtcaagtggtgcttcatttcagtttgaagacagttcagatatcaagtgatccaacaactgcctaaaatacaacatttgcacacctcacaaatagaaagtagcagctttagttcaaatccaaaggatggccaataattgtgccatggttgaagttttatgttgcgtgaacctggaagagcacgctacttgccttgatggttaatattttagttaaacggattttaaaacaagtcacattactttaaaagataacaggcactaactaaagtataagtgataggaagattgttttattctttgtcttgtgttcttgttcattttataagatgacaagttttagtccctaggattttaatctcctaaattacctagttcaaaattatgctcttggcagagaatcaggtcattttgtctgtagacaaagaatgtcgataaacttgcccttgaggttcatgctgcaagactgataaaaatgacacaacttacgttgagactttgaagtagttgctttattatgaagactgctcatttttaaaaatgtaaatcatccttagggtatgtctgatcctgttacatttttttcttctagggaagaacagtgattattgagcagagttggggaagtcccaaagtaacaaaagatggtgtgactgttgcaaagtcaattgacttaaaagataaatacaaaaacattggagctaaacttgttcaagatgttgccaataacacaaatgaagaagctggggatggcactaccactgctactgtactggcacgctctatagccaaggaaggcttcgagaagattagcaaaggtgctaatccagtggaaatcaggagaggtaggaatgtctgttgtcaccacagtgttctaaacttcagtgtgctttaaggcattgattccttggacctaaggaaagtgttaacttgaggaaattaatccttctctcattcctcctcttggcctggagaaatcttaaactgggttttcctttagcaagcttggctgtatggtgggtaggtactgttaggtaattttgatattttacttagttggtttcttttgtttttagagacagggtcttgctctgtagcccaggctggactgcactggaactcctgggctcaagcaatcctcctgcctcagcctccaagtagctgggactactacaggcactcaccaccattcctggctaatttttagtttagttttgtagaaagtaagactaaatacactggatcattcagaatgtcagaaagtaatgttttcctcagtttattttttcttaatagcacacaccatgttattggtttgtgttttgttagtgcttgtaactagagtgcaacttaattaacaatttgctcctcctcatgaggttcatggcagtatagacttaaattctagtcccatgtttgtcatttattagctgtgtgctaagacttggttttcctatcagcagaattgctatgtatatctagggtatgttagggttcaaaccaggaaccctcttgtaagtgaaggtggggggagctattggtaattttttgtcagaattggcatactaatttattactacattactaatgtatcattacctcatctatttcagtgtttatgggccaagtgaatatacttcactaaaagcagttttactgtaaatcactaacaagtattaattaaggttatgaagaggacttaccagcaccttgcattggattttttttgaagtaacagttctcaaacaagagagctagcactattcccaattgagcaaaatgggactattaagactgatgtaaaacaaaaatattttgttagttcataatacgtactaaattgaggggatttcagataattgacacctgcagaggcatagtcacaacagattcctatcatttaagaactgtacttcttgttgaaaataagggagtgttagccattttggtccttttttgcatcatctaatggacatgagaagtgtcgtggaccctattggaaacagcatgattgggttaggaatttgcataggatgagttcagtggtgagacttttgaaactacacacatctaccttgttttagtcctattttcaaaattttggcattgtgagattttatttactgtgtgaacctaaagttactgtttaagtacatgccacgcaactctgtgttattaagaagcactgtctcagaagctgtgtgtaaatttaatattaaggcactaaagaccaagcataggtacatgcctgtagtcccagctacatgggaagctgaggtgggaggattgcttgagcccaggagttcaagaccaccttgggcaacatagtgagaccttgtctacaaaaataaaagaagctgagcatggtggcttgagcctgtggtctcagctactcccttgagcccaggatgtcagggctgcagtgagccatgatctgtgctactgcactctagcctgggcagcagaacaagaccctgtctcaaaaaaaaaaaaaatttttttttttaagttaaggcattaaaatatttgtcacaaatctcaagatttctacttgacatagaagccatgagagaaataaacattgtaatgacatatatcgttgaactaggtgtgatgttagctgttgatgctgtaattgctgaacttaaaaagcagtctaaacctgtgaccacccctgaagaaattgcacaggtaaggacttaacatgttacacgttttttaaaaaaaatttaatggcatgtgtgattttttttttcccttgatcacaccaatgtcagaataacaatactacccaatcatcaatattagaatcattgtttcttactgctaaaacctttgaaaagaattatgaccataatggttgtcatttagttctacatgtggttgtcattttagttctacatggctgtaaaatggattcatatgattgtgaaaatgttcttagccattgtcaaaggtgcataagttttgtcagtttgtaatgaagtcagcatttttaaactttttgttacaagaatagttttatgtatcatattcttcaaaacaatgtagtcaaataatgaatcggaaaagagcaaagaaccagtacttcatgaaaactaccataacgtaaattccccttctctcccctggatggaagtatcaatttggaagttactaggaaaaggtaagggaactgactgaggacactaggcttaccttttaatttcgaagagtaactggattatttcaggttgctacgatttctgcaaacggagacaaagaaattggcaatatcatctctgatgcaatgaaaaaagttggaagaaagggtgtcatcacagtaaaggcaagtgtgtttgtatttttaaagataattttgagttatcttatgatcaaaagtttgagttatctgatgatcaaaactgaatttttcaaacagaaaaattctgttttaaaaactgctttttttattccttcatatgtagtctcagcacatgtatagaataaagtacttactgtgttttatgtgaattagcctttgctgcatgaaatgaatccatcctaacttaaatgattattcaaataagcacttttgggattttttgcagaagtgtaattggatgtcctgggctgtttcatactctac

SEQ ID NO: 924 - DNA, 6000 bp, Homo sapiens
ttcagagctgtcccaggctgcagattggacaagactgaccaacctgttcctctggtaggtatacaaccaggtataccaactggttaagattagggcaatttcaatgtgttaggggttaaacgaacagtccaagtttcctctcaattcttaaatgccccctcattttaccttgaagcacatcttttgtatttatttattttgtagacaggaggtctcattatgttgcccagactgattttgaactcctgattttgaatcctgagctcaaacgatcctcctgctttggcctcccaaaatgcaaggattacaggtgtgagccaccacgcacagcctcttttgtcttattaaaaatttagaatgtaaggcaaacactgatcacactaggctaccaaattgctattgaggggattttttttttttttttttgagacagaatctcgccctgtcccccatactggaatgcaggggcgccttgcaacctcggctccttgcaacctccgcctccagggttcaaatgattctcctgcctcagcctccccagtagctgggattacaggcgcatgccaccacacccggctaatttttgtatctttagtagagacggggtttcaccatgttggtcaggctggtcttgaactcctgaccttgtgatccgcacacctcggcctcccaaagtgctgagattacaggcgagagccaccgcacccggcctattgaggacaatttttaatactctgaaactatcacataaaataagcatcatagcattggtcatataaaataagcaactttatattagtcatttccctttaagaaacagattagaaccaaagcagttaatgatcttgaaaacgacataaactctacttaataagcgacttttaatactccagaattacttcttttccctccactgcacactataaaaaatagttccactgcagctcccatttacctttcctttagaacccgatccaacagcgactactgttgcttgcaatacttttccttgagatttttctggaagcataatgcctcctttggttacagtttcagcagcactcctttcaaccaatactcggtcaaagagtggaagaaactttctaaacgcttgtcctgcctgtaggaagagaaatgttttgaaacaaaaactaaatgtaatcacattatcaacaggcaacgccaccgtgctatacatctcaacacgttttggctttgaaagttaacaccaaacctcagcttattcgttaaggaagcgcatttgaatgtactaaccaatattccaagtttaattcccgattccttacgtctgttaggggtcgttgtcgctcctccggtgagcaaccagaccagctttaaggtcaaccttagtttattccaaggtcaaatgttttccttcttcaggtttttccagaaattttcaggaaacgctgggtcaagctccctgcctggcaccatgatttttacccaagatattacacatccacaaaggccctgcagaagcaggtgagacgctgcgcgtgcgcccgggttctcgcccccctgccttacacaccggcagcacacgcgcgtgcaaagagccctgggggagaaaagggtcgggcgggccttgccgctccaaggtgccatcgggcgctggtcactgagtggccaccaatccctcccgcccagcccaacaaaagaggggcgtcagggatccccgtacgcctcagacaggcccgggcctgcaggcctcggggccacgcgggactcaccattactccctccgcctcagactcgtactctgctctagtgtagcgccgcaaagagactcgcagtccggccctggcgacacgtgaaaaaatcacccagcgcgcaggcgcgctcgccccagcggtcgccgctagccccctcgcccctcccagggagggagggcggtcgccccgacgcgcaccgcgattcgccccaagggccctgcgcaggacgctgacgcgaagactcggaggcggaagaaaaaaggagctgtttctaggcttttctaggcgcccagccgaggtgaaagaactaccccttcgtcccctcccggaaatgacgcgatttgacccttgagccgtagggagcgcggcattttctggaaagttctggaaccgagcgaggcccgggaactagactaagccggccggagagggctgagcgcgctagcacaccctgcgcgggtagggaggggcggggctcgcgcgcagggtgtgcagattgcagggcccgggctgacgggaagtgggtgggagctgcctgcacacgcggtgccgcggggcgggagtagaggcggagggaggggacacgggctcattgcggtgtgcgccctgcactctgtccctcactcgccgccgacgacctgtctcgccgagcgcacgccttgccgccgccccgcaggtacgcggccttcccgcaccacctccccccggctcctgcgacccccgagtgggccttcctcctctgcggtccagctggagggtgcgggcggcgacaacctggagttccgcaccgcgccgcaccgcaggcccaggcctgcgggtccaggcctcgcgggtccatgcgggttccatcacgtgcgacgcggatcctggacctcggctgggcgcgggagggacaactcgtggggtttgaatttgggggattgtaaccacttaggcccgctggtgcaacctgcgcctggccgacttcagggaaccggggagggtggtgtacgtgagggaaccgcttttttcccccgcaggcagctgggataccgcgcctccagtcttgaccttgctgggggcgttcggaaagaaggacacgtgggctcgcgccgagtgggccgggccgccgcccccagcatcgcggccttgctggttgctctgatacagtagccttgggtggatccatggagacactttgctgagcggctttttgcaccgtcaggaatacttttaacttccctggtcacttggatttgtaacttgcctctctccggctgacttggtttctcaggggccacagttggagtgggtctgcccacaaggccgttttcgcggtgaaagattaactcgtttttggcggcagggataggtggccgtggggaaggagccgcatgtgctttgtgctggtgctataggtcaggcgccggccggggcggcctctttagcttgcgctagtggctgatgttccgaagctgcggcgccttccgtcattcaggcgtagtggctggcggaggtcagccaggctcagcatctcacgttgcttgctctgttgcacaggtgggcatgtttgttctgcagcgcaccacgggtggtagttctgatgatctttttgcttccatccccagaaatgcttcggttacccacagtctttcgccagatgagaccggtgtccagggtactggctcctcatctcactcgggcttatgccaaagatgtaaaatttggtgcagatgcccgagccttaatgcttcaaggtgtagaccttttagccgatgctgtggccgttacaatggggccaaaggtaccagtatttttattttattgtaattacggtattattaatagcattttactcacaaatagtcgcactgaactattcaacagtactttcatctccatttttgagagaactcagtttacatgtaagaattctgaagtattggttagcctttttttcttagacatgatcttaaagcttaaactgcttcagccagattttcgaaactattttgttcaatgtgtgatgtaatcaggtagtaacttacagctcaaggtggattcttaaactcgaggtagaatttcgctggcttaagttaaaatttggatcctttcccagtagttcatgccaagtgtagagagaagagtttaacttatcttccataattccttaggtatgtgcttgtagatgctaaatttttttttggtttattgtagtaaaatgtacacaacataaaattaccattaagtgtgcactttggggacatcaattacatttatgttgtgcagtcatcaccaccatccatctccaaaactttttatatggaaaaattgtaactttgtactcattagacagtagcttcccattctctcctccaccccaagatgctagttttacccatcggttttctgctgttctcttgttccaaagcatatttaaaataagtctcatttaataggggtaatgttttgaggaggcctttgaaggtggtgtgcagtcaagtggtgcttcatttcagtttgaagacagttcagatatcaagtgatccaacaactgcctaaaatacaacatttgcacacctcacaaatagaaagtagcagctttagttcaaatccaaaggatggccaataattgtgccatggttgaagttttatgttgcgtgaacctggaagagcacgctacttgccttgatggttaatattttagttaaacggattttaaaacaagtcacattactttaaaagataacaggcactaactaaagtataagtgataggaagattgttttattctttgtcttgtgttcttgttcattttataagatgacaagttttagtccctaggattttaatctcctaaattacctagttcaaaattatgctcttggcagagaatcaggtcattttgtctgtagacaaagaatgtcgataaacttgcccttgaggttcatgctgcaagactgataaaaatgacacaacttacgttgagactttgaagtagttgctttattatgaagactgctcatttttaaaaatgtaaatcatccttagggtatgtctgatcctgttacatttttttcttctagggaagaacagtgattattgagcagagttggggaagtcccaaagtaacaaaagatggtgtgactgttgcaaagtcaattgacttaaaagataaatacaaaaacattggagctaaacttgttcaagatgttgccaataacacaaatgaagaagctggggatggcactaccactgctactgtactggcacgctctatagccaaggaaggcttcgagaagattagcaaaggtgctaatccagtggaaatcaggagaggtaggaatgtctgttgtcaccacagtgttctaaacttcagtgtgctttaaggcattgattccttggacctaaggaaagtgttaacttgaggaaattaatccttctctcattcctcctcttggcctggagaaatcttaaactgggttttcctttagcaagcttggctgtatggtgggtaggtactgttaggtaattttgatattttacttagttggtttcttttgtttttagagacagggtcttgctctgtagcccaggctggactgcactggaactcctgggctcaagcaatcctcctgcctcagcctccaagtagctgggactactacaggcactcaccaccattcctggctaatttttagtttagttttgtagaaagtaagactaaatacactggatcattcagaatgtcagaaagtaatgttttcctcagtttattttttcttaatagcacacaccatgttattggtttgtgttttgttagtgcttgtaactagagtgcaacttaattaacaatttgctcctcctcatgaggttcatggcagtatagacttaaattctagtcccatgtttgtcatttattagctgtgtgctaagacttggttttcctatcagcagaattgctatgtatatctagggtatgttagggttcaaaccaggaaccctcttgtaagtgaaggtggggggagctattggtaattttttgtcagaattggcatactaatttattactacattactaatgtatcattacctcatctatttcagtgtttatgggccaagtgaatatacttcactaaaagcagttttactgtaaatcactaacaagtattaattaaggttatgaagaggacttaccagcaccttgcattggattttttttgaagtaacagttctcaaacaagagagctagcactattcccaattgagcaaaatgggactatta

SEQ ID NO: 925 - DNA, 6000 bp, Homo sapiens
aaccactgcactccagcctgggtgacagagtgagaatccgtctcagaaaaaaaaaaaaaaaaagtaaatccatggcttggtatcagtatcaatcatgtattaataaagctaaattcagtgtgaaaatgcacctacgtagaaaatcctgtttcccaaaattctctgcaggttacttgaaaaacagaaaaaaagcataaactagaaaaccctaaaatcatcttaaaataactaaagattaaccactcatttacatatttttatttggaagtgtttatatcagtacaaggaaacaattttggagacactggatgtcattagttatcattagtttattataaaagagaaatatggaaattatttacatgacgaaagatttcagaacttcagtggaatgggcagcatcatgttgatgccatttcaatagtgacttatttcagtctacgtactttccaagaatgtcaccatctctaaataggaaataatcctgcaagtgaaaaaaaccattagttaagacaactaattgcaaatatctgacttctttttagaattattaagtttacacaccttgtcatctagaactactttggtgcctccatattctgggagaagaactttatctccaactttcacgctaactggttgaatctctccacccttaaaaaaggaaggatgtttattagcaaagatatctagttcacccaacataaacagttaacttttaaatcactacaactaatgaaacatggtcactcaaatccaattatattaaaaatatatttcgtggctaagtgatacgactcatactagaattacagatcttcactcaaaaataccactgtagttacactttgaaataatacacagtggcttaaactaaaacctgactccaacgtaaaagttcaagaaaatattctggaaaagctaactttagttaactaaagctaactttataactgttaaatattaacataacttatcaactatatgaaataaacctgcaacagtagccagcacccagaaaatgccatatacaaatggtcatattttccttctttcaacatacaaaaatttaaagtttttttggatttagaacatactcttgtgattgttttgttccctccaaagaacagatttggggaaagggactgcagctaagtgtccactccccaaagtcttcctattcctaactccatgacagctcctcagtagagctttcctcctcagaagcaactagaacaatgcagttaacattatttggccccaacggcgtttactgtgtattttggctgagatctttagaagcccgaggcctaaacaattaactgaggaacatctaaaacagaggtgtgcaatcttttggcttccctgggccacactggaagaactgtgttgggccacacataaaatacactaacattagcagtagctggtaagcttaaaaaaaattgcaaaagaaatatcaggttttaagaaagtttagggatttgcgttaggcggcattcagagctgtcccaggctgcagattggacaagactgaccaacctgttcctctggtaggtatacaaccaggtataccaactggttaagattagggcaatttcaatgtgttaggggttaaacgaacagtccaagtttcctctcaattcttaaatgccccctcattttaccttgaagcacatcttttgtatttatttattttgtagacaggaggtctcattatgttgcccagactgattttgaactcctgattttgaatcctgagctcaaacgatcctcctgctttggcctcccaaaatgcaaggattacaggtgtgagccaccacgcacagcctcttttgtcttattaaaaatttagaatgtaaggcaaacactgatcacactaggctaccaaattgctattgaggggattttttttttttttttttgagacagaatctcgccctgtcccccatactggaatgcaggggcgccttgcaacctcggctccttgcaacctccgcctccagggttcaaatgattctcctgcctcagcctccccagtagctgggattacaggcgcatgccaccacacccggctaatttttgtatctttagtagagacggggtttcaccatgttggtcaggctggtcttgaactcctgaccttgtgatccgcacacctcggcctcccaaagtgctgagattacaggcgagagccaccgcacccggcctattgaggacaatttttaatactctgaaactatcacataaaataagcatcatagcattggtcatataaaataagcaactttatattagtcatttccctttaagaaacagattagaaccaaagcagttaatgatcttgaaaacgacataaactctacttaataagcgacttttaatactccagaattacttcttttccctccactgcacactataaaaaatagttccactgcagctcccatttacctttcctttagaacccgatccaacagcgactactgttgcttgcaatacttttccttgagatttttctggaagcataatgcctcctttggttacagtttcagcagcactcctttcaaccaatactcggtcaaagagtggaagaaactttctaaacgcttgtcctgcctgtaggaagagaaatgttttgaaacaaaaactaaatgtaatcacattatcaacaggcaacgccaccgtgctatacatctcaacacgttttggctttgaaagttaacaccaaacctcagcttattcgttaaggaagcgcatttgaatgtactaaccaatattccaagtttaattcccgattccttacgtctgttaggggtcgttgtcgctcctccggtgagcaaccagaccagctttaaggtcaaccttagtttattccaaggtcaaatgttttccttcttcaggtttttccagaaattttcaggaaacgctgggtcaagctccctgcctggcaccatgatttttacccaagatattacacatccacaaaggccctgcagaagcaggtgagacgctgcgcgtgcgcccgggttctcgcccccctgccttacacaccggcagcacacgcgcgtgcaaagagccctgggggagaaaagggtcgggcgggccttgccgctccaaggtgccatcgggcgctggtcactgagtggccaccaatccctcccgcccagcccaacaaaagaggggcgtcagggatccccgtacgcctcagacaggcccgggcctgcaggcctcggggccacgcgggactcaccattactccctccgcctcagactcgtactctgctctagtgtagcgccgcaaagagactcgcagtccggccctggcgacacgtgaaaaaatcacccagcgcgcaggcgcgctcgccccagcggtcgccgctagccccctcgcccctcccagggagggagggcggtcgccccgacgcgcaccgcgattcgccccaagggccctgcgcaggacgctgacgcgaagactcggaggcggaagaaaaaaggagctgtttctaggcttttctaggcgcccagccgaggtgaaagaactaccccttcgtcccctcccggaaatgacgcgatttgacccttgagccgtagggagcgcggcattttctggaaagttctggaaccgagcgaggcccgggaactagactaagccggccggagagggctgagcgcgctagcacaccctgcgcgggtagggaggggcggggctcgcgcgcagggtgtgcagattgcagggcccgggctgacgggaagtgggtgggagctgcctgcacacgcggtgccgcggggcgggagtagaggcggagggaggggacacgggctcattgcggtgtgcgccctgcactctgtccctcactcgccgccgacgacctgtctcgccgagcgcacgccttgccgccgccccgcaggtacgcggccttcccgcaccacctccccccggctcctgcgacccccgagtgggccttcctcctctgcggtccagctggagggtgcgggcggcgacaacctggagttccgcaccgcgccgcaccgcaggcccaggcctgcgggtccaggcctcgcgggtccatgcgggttccatcacgtgcgacgcggatcctggacctcggctgggcgcgggagggacaactcgtggggtttgaatttgggggattgtaaccacttaggcccgctggtgcaacctgcgcctggccgacttcagggaaccggggagggtggtgtacgtgagggaaccgcttttttcccccgcaggcagctgggataccgcgcctccagtcttgaccttgctgggggcgttcggaaagaaggacacgtgggctcgcgccgagtgggccgggccgccgcccccagcatcgcggccttgctggttgctctgatacagtagccttgggtggatccatggagacactttgctgagcggctttttgcaccgtcaggaatacttttaacttccctggtcacttggatttgtaacttgcctctctccggctgacttggtttctcaggggccacagttggagtgggtctgcccacaaggccgttttcgcggtgaaagattaactcgtttttggcggcagggataggtggccgtggggaaggagccgcatgtgctttgtgctggtgctataggtcaggcgccggccggggcggcctctttagcttgcgctagtggctgatgttccgaagctgcggcgccttccgtcattcaggcgtagtggctggcggaggtcagccaggctcagcatctcacgttgcttgctctgttgcacaggtgggcatgtttgttctgcagcgcaccacgggtggtagttctgatgatctttttgcttccatccccagaaatgcttcggttacccacagtctttcgccagatgagaccggtgtccagggtactggctcctcatctcactcgggcttatgccaaagatgtaaaatttggtgcagatgcccgagccttaatgcttcaaggtgtagaccttttagccgatgctgtggccgttacaatggggccaaaggtaccagtatttttattttattgtaattacggtattattaatagcattttactcacaaatagtcgcactgaactattcaacagtactttcatctccatttttgagagaactcagtttacatgtaagaattctgaagtattggttagcctttttttcttagacatgatcttaaagcttaaactgcttcagccagattttcgaaactattttgttcaatgtgtgatgtaatcaggtagtaacttacagctcaaggtggattcttaaactcgaggtagaatttcgctggcttaagttaaaatttggatcctttcccagtagttcatgccaagtgtagagagaagagtttaacttatcttccataattccttaggtatgtgcttgtagatgctaaatttttttttggtttattgtagtaaaatgtacacaacataaaattaccattaagtgtgcactttggggacatcaattacatttatgttgtgcagtcatcaccaccatccatctccaaaactttttatatggaaaaattgtaactttgtactcattagacagtagcttcccattctctcctccaccccaagatgctagttttacccatcggttttctgctgttctcttgttccaaagcatatttaaaataagtctcatttaataggggtaatgttttgaggaggcctttgaaggtggtgtgcagtcaagtggtgcttcatttcagtttgaagacagttcagatatcaagtgatccaacaactgcctaaaatacaacatttgcacacctcacaaatagaaagtagcagctttagttcaaatccaaaggatggccaataattgtgccatggttgaagttttatgttgcgtgaacctggaagagcacgctacttgccttgatggttaatattttagttaaacggattttaaaacaagtcacattactttaaaagataacaggcactaactaaagtataagtgataggaagattgt

SEQ ID NO: 926 - DNA, 6000 bp, Homo sapiens
aaaatgtaccacagctgagcggggtgaccctggtgcgctcactgctttgtcattgctgctggccgccaaggacgatcacccctcaaggactatgtgatgcctttttcacgttgtctttcagaaacttgataggacatcatatgcctgatattaaatgccagtatcaggttagaaactacactgaagtcttcctgtttctcatctcaactacattgaggtcacactgactaggtgagcatgtggctgttttccaactctgacaaactagtgtcaaatagaaaagcataaatataacccatcaccattaaaaaaaaaaaataaggtaatgtcctaactttaatgtacagaagttgattttccgaaatattgaccaactcttaaagttctaaaaaataaaaaaagctgccaggtatggtggctcactcaggcctgtgatcccagcagtctgggaggccaaggcaggcatattgcttgagcccagaaggttcaagaccagcctggacaacatggcaaaaccccatctctacaaaagatacaaaaattagcagggcatggtggtgcatgcctgtaatcccagtcactcaaggaggcggacgtgggaggatcacctgtgcctgggaagaaggtggaggctacagtgagccatgacagtgccagtgcactccaacctgggtgacaaagtgagactgtctccacaaaaaaaaaaaaagaaaaaaatggaaagtataattcttccctcaatttacatggtacttgtgtacctgggaattcagtatacattaaaccatgcaaaaaatgctctgtatttatataaattggagttaggaatgaagacctgtatccacaaagtattgaacaccttaagacctgtaactcgttagcttgttatatttgaaatctgaatgttgctgtggtggctcacgcttgtaatcccagcactttgggagtctgagactagcctgggcaacatggcaaaacctgtctctactaaaaacacaaaaattagctgggcatggtggtgcacgcctgtaatcccaggtactctggaggctgagggaggagaatcacttgaacccagaaggcggaggttgcagtaagccaagattgaaccactgcactccagcctgggtgacagagtgagaatccgtctcagaaaaaaaaaaaaaaaaagtaaatccatggcttggtatcagtatcaatcatgtattaataaagctaaattcagtgtgaaaatgcacctacgtagaaaatcctgtttcccaaaattctctgcaggttacttgaaaaacagaaaaaaagcataaactagaaaaccctaaaatcatcttaaaataactaaagattaaccactcatttacatatttttatttggaagtgtttatatcagtacaaggaaacaattttggagacactggatgtcattagttatcattagtttattataaaagagaaatatggaaattatttacatgacgaaagatttcagaacttcagtggaatgggcagcatcatgttgatgccatttcaatagtgacttatttcagtctacgtactttccaagaatgtcaccatctctaaataggaaataatcctgcaagtgaaaaaaaccattagttaagacaactaattgcaaatatctgacttctttttagaattattaagtttacacaccttgtcatctagaactactttggtgcctccatattctgggagaagaactttatctccaactttcacgctaactggttgaatctctccacccttaaaaaaggaaggatgtttattagcaaagatatctagttcacccaacataaacagttaacttttaaatcactacaactaatgaaacatggtcactcaaatccaattatattaaaaatatatttcgtggctaagtgatacgactcatactagaattacagatcttcactcaaaaataccactgtagttacactttgaaataatacacagtggcttaaactaaaacctgactccaacgtaaaagttcaagaaaatattctggaaaagctaactttagttaactaaagctaactttataactgttaaatattaacataacttatcaactatatgaaataaacctgcaacagtagccagcacccagaaaatgccatatacaaatggtcatattttccttctttcaacatacaaaaatttaaagtttttttggatttagaacatactcttgtgattgttttgttccctccaaagaacagatttggggaaagggactgcagctaagtgtccactccccaaagtcttcctattcctaactccatgacagctcctcagtagagctttcctcctcagaagcaactagaacaatgcagttaacattatttggccccaacggcgtttactgtgtattttggctgagatctttagaagcccgaggcctaaacaattaactgaggaacatctaaaacagaggtgtgcaatcttttggcttccctgggccacactggaagaactgtgttgggccacacataaaatacactaacattagcagtagctggtaagcttaaaaaaaattgcaaaagaaatatcaggttttaagaaagtttagggatttgcgttaggcggcattcagagctgtcccaggctgcagattggacaagactgaccaacctgttcctctggtaggtatacaaccaggtataccaactggttaagattagggcaatttcaatgtgttaggggttaaacgaacagtccaagtttcctctcaattcttaaatgccccctcattttaccttgaagcacatcttttgtatttatttattttgtagacaggaggtctcattatgttgcccagactgattttgaactcctgattttgaatcctgagctcaaacgatcctcctgctttggcctcccaaaatgcaaggattacaggtgtgagccaccacgcacagcctcttttgtcttattaaaaatttagaatgtaaggcaaacactgatcacactaggctaccaaattgctattgaggggattttttttttttttttttgagacagaatctcgccctgtcccccatactggaatgcaggggcgccttgcaacctcggctccttgcaacctccgcctccagggttcaaatgattctcctgcctcagcctccccagtagctgggattacaggcgcatgccaccacacccggctaatttttgtatctttagtagagacggggtttcaccatgttggtcaggctggtcttgaactcctgaccttgtgatccgcacacctcggcctcccaaagtgctgagattacaggcgagagccaccgcacccggcctattgaggacaatttttaatactctgaaactatcacataaaataagcatcatagcattggtcatataaaataagcaactttatattagtcatttccctttaagaaacagattagaaccaaagcagttaatgatcttgaaaacgacataaactctacttaataagcgacttttaatactccagaattacttcttttccctccactgcacactataaaaaatagttccactgcagctcccatttacctttcctttagaacccgatccaacagcgactactgttgcttgcaatacttttccttgagatttttctggaagcataatgcctcctttggttacagtttcagcagcactcctttcaaccaatactcggtcaaagagtggaagaaactttctaaacgcttgtcctgcctgtaggaagagaaatgttttgaaacaaaaactaaatgtaatcacattatcaacaggcaacgccaccgtgctatacatctcaacacgttttggctttgaaagttaacaccaaacctcagcttattcgttaaggaagcgcatttgaatgtactaaccaatattccaagtttaattcccgattccttacgtctgttaggggtcgttgtcgctcctccggtgagcaaccagaccagctttaaggtcaaccttagtttattccaaggtcaaatgttttccttcttcaggtttttccagaaattttcaggaaacgctgggtcaagctccctgcctggcaccatgatttttacccaagatattacacatccacaaaggccctgcagaagcaggtgagacgctgcgcgtgcgcccgggttctcgcccccctgccttacacaccggcagcacacgcgcgtgcaaagagccctgggggagaaaagggtcgggcgggccttgccgctccaaggtgccatcgggcgctggtcactgagtggccaccaatccctcccgcccagcccaacaaaagaggggcgtcagggatccccgtacgcctcagacaggcccgggcctgcaggcctcggggccacgcgggactcaccattactccctccgcctcagactcgtactctgctctagtgtagcgccgcaaagagactcgcagtccggccctggcgacacgtgaaaaaatcacccagcgcgcaggcgcgctcgccccagcggtcgccgctagccccctcgcccctcccagggagggagggcggtcgccccgacgcgcaccgcgattcgccccaagggccctgcgcaggacgctgacgcgaagactcggaggcggaagaaaaaaggagctgtttctaggcttttctaggcgcccagccgaggtgaaagaactaccccttcgtcccctcccggaaatgacgcgatttgacccttgagccgtagggagcgcggcattttctggaaagttctggaaccgagcgaggcccgggaactagactaagccggccggagagggctgagcgcgctagcacaccctgcgcgggtagggaggggcggggctcgcgcgcagggtgtgcagattgcagggcccgggctgacgggaagtgggtgggagctgcctgcacacgcggtgccgcggggcgggagtagaggcggagggaggggacacgggctcattgcggtgtgcgccctgcactctgtccctcactcgccgccgacgacctgtctcgccgagcgcacgccttgccgccgccccgcaggtacgcggccttcccgcaccacctccccccggctcctgcgacccccgagtgggccttcctcctctgcggtccagctggagggtgcgggcggcgacaacctggagttccgcaccgcgccgcaccgcaggcccaggcctgcgggtccaggcctcgcgggtccatgcgggttccatcacgtgcgacgcggatcctggacctcggctgggcgcgggagggacaactcgtggggtttgaatttgggggattgtaaccacttaggcccgctggtgcaacctgcgcctggccgacttcagggaaccggggagggtggtgtacgtgagggaaccgcttttttcccccgcaggcagctgggataccgcgcctccagtcttgaccttgctgggggcgttcggaaagaaggacacgtgggctcgcgccgagtgggccgggccgccgcccccagcatcgcggccttgctggttgctctgatacagtagccttgggtggatccatggagacactttgctgagcggctttttgcaccgtcaggaatacttttaacttccctggtcacttggatttgtaacttgcctctctccggctgacttggtttctcaggggccacagttggagtgggtctgcccacaaggccgttttcgcggtgaaagattaactcgtttttggcggcagggataggtggccgtggggaaggagccgcatgtgctttgtgctggtgctataggtcaggcgccggccggggcggcctctttagcttgcgctagtggctgatgttccgaagctgcggcgccttccgtcattcaggcgtagtggctggcggaggtcagccaggctcagcatctcacgttgcttgctctgttgcacaggtgggcatgtttgttctgcagcgcaccacgggtggtagttctgatgatctttttgcttccatccccagaaatgcttcggttacccacagtctttcgccagatgagaccggtgtccaggg

SEQ ID NO: 927 - DNA, 6000 bp, Homo sapiens
aaaattttttttttttttgagacagggtcttgttctgctgcccaggctagagtgcagtagcacagatcatggctcactgcagccctgacatcctgggctcaagggagtagctgagaccacaggctcaagccaccatgctcagcttcttttatttttgtagacaaggtctcactatgttgcccaaggtggtcttgaactcctgggctcaagcaatcctcccacctcagcttcccatgtagctgggactacaggcatgtacctatgcttggtctttagtgccttaatattaaatttacacacagcttctgagacagtgcttcttaataacacagagttgcgtggcatgtacttaaacagtaactttaggttcacacagtaaataaaatctcacaatgccaaaattttgaaaataggactaaaacaaggtagatgtgtgtagtttcaaaagtctcaccactgaactcatcctatgcaaattcctaacccaatcatgctgtttccaatagggtccacgacacttctcatgtccattagatgatgcaaaaaaggaccaaaatggctaacactcccttattttcaacaagaagtacagttcttaaatgataggaatctgttgtgactatgcctctgcaggtgtcaattatctgaaatcccctcaatttagtacgtattatgaactaacaaaatatttttgttttacatcagtcttaatagtcccattttgctcaattgggaatagtgctagctctcttgtttgagaactgttacttcaaaaaaaatccaatgcaaggtgctggtaagtcctcttcataaccttaattaatacttgttagtgatttacagtaaaactgcttttagtgaagtatattcacttggcccataaacactgaaatagatgaggtaatgatacattagtaatgtagtaataaattagtatgccaattctgacaaaaaattaccaatagctccccccaccttcacttacaagagggttcctggtttgaaccctaacataccctagatatacatagcaattctgctgataggaaaaccaagtcttagcacacagctaataaatgacaaacatgggactagaatttaagtctatactgccatgaacctcatgaggaggagcaaattgttaattaagttgcactctagttacaagcactaacaaaacacaaaccaataacatggtgtgtgctattaagaaaaaataaactgaggaaaacattactttctgacattctgaatgatccagtgtatttagtcttactttctacaaaactaaactaaaaattagccaggaatggtggtgagtgcctgtagtagtcccagctacttggaggctgaggcaggaggattgcttgagcccaggagttccagtgcagtccagcctgggctacagagcaagaccctgtctctaaaaacaaaagaaaccaactaagtaaaatatcaaaattacctaacagtacctacccaccatacagccaagcttgctaaaggaaaacccagtttaagatttctccaggccaagaggaggaatgagagaaggattaatttcctcaagttaacactttccttaggtccaaggaatcaatgccttaaagcacactgaagtttagaacactgtggtgacaacagacattcctacctctcctgatttccactggattagcacctttgctaatcttctcgaagccttccttggctatagagcgtgccagtacagtagcagtggtagtgccatccccagcttcttcatttgtgttattggcaacatcttgaacaagtttagctccaatgtttttgtatttatcttttaagtcaattgactttgcaacagtcacaccatcttttgttactttgggacttccccaactctgctcaataatcactgttcttccctagaagaaaaaaatgtaacaggatcagacataccctaaggatgatttacatttttaaaaatgagcagtcttcataataaagcaactacttcaaagtctcaacgtaagttgtgtcatttttatcagtcttgcagcatgaacctcaagggcaagtttatcgacattctttgtctacagacaaaatgacctgattctctgccaagagcataattttgaactaggtaatttaggagattaaaatcctagggactaaaacttgtcatcttataaaatgaacaagaacacaagacaaagaataaaacaatcttcctatcacttatactttagttagtgcctgttatcttttaaagtaatgtgacttgttttaaaatccgtttaactaaaatattaaccatcaaggcaagtagcgtgctcttccaggttcacgcaacataaaacttcaaccatggcacaattattggccatcctttggatttgaactaaagctgctactttctatttgtgaggtgtgcaaatgttgtattttaggcagttgttggatcacttgatatctgaactgtcttcaaactgaaatgaagcaccacttgactgcacaccaccttcaaaggcctcctcaaaacattacccctattaaatgagacttattttaaatatgctttggaacaagagaacagcagaaaaccgatgggtaaaactagcatcttggggtggaggagagaatgggaagctactgtctaatgagtacaaagttacaatttttccatataaaaagttttggagatggatggtggtgatgactgcacaacataaatgtaattgatgtccccaaagtgcacacttaatggtaattttatgttgtgtacattttactacaataaaccaaaaaaaaatttagcatctacaagcacatacctaaggaattatggaagataagttaaactcttctctctacacttggcatgaactactgggaaaggatccaaattttaacttaagccagcgaaattctacctcgagtttaagaatccaccttgagctgtaagttactacctgattacatcacacattgaacaaaatagtttcgaaaatctggctgaagcagtttaagctttaagatcatgtctaagaaaaaaaggctaaccaatacttcagaattcttacatgtaaactgagttctctcaaaaatggagatgaaagtactgttgaatagttcagtgcgactatttgtgagtaaaatgctattaataataccgtaattacaataaaataaaaatactggtacctttggccccattgtaacggccacagcatcggctaaaaggtctacaccttgaagcattaaggctcgggcatctgcaccaaattttacatctttggcataagcccgagtgagatgaggagccagtaccctggacaccggtctcatctggcgaaagactgtgggtaaccgaagcatttctggggatggaagcaaaaagatcatcagaactaccacccgtggtgcgctgcagaacaaacatgcccacctgtgcaacagagcaagcaacgtgagatgctgagcctggctgacctccgccagccactacgcctgaatgacggaaggcgccgcagcttcggaacatcagccactagcgcaagctaaagaggccgccccggccggcgcctgacctatagcaccagcacaaagcacatgcggctccttccccacggccacctatccctgccgccaaaaacgagttaatctttcaccgcgaaaacggccttgtgggcagacccactccaactgtggcccctgagaaaccaagtcagccggagagaggcaagttacaaatccaagtgaccagggaagttaaaagtattcctgacggtgcaaaaagccgctcagcaaagtgtctccatggatccacccaaggctactgtatcagagcaaccagcaaggccgcgatgctgggggcggcggcccggcccactcggcgcgagcccacgtgtccttctttccgaacgcccccagcaaggtcaagactggaggcgcggtatcccagctgcctgcgggggaaaaaagcggttccctcacgtacaccaccctccccggttccctgaagtcggccaggcgcaggttgcaccagcgggcctaagtggttacaatcccccaaattcaaaccccacgagttgtccctcccgcgcccagccgaggtccaggatccgcgtcgcacgtgatggaacccgcatggacccgcgaggcctggacccgcaggcctgggcctgcggtgcggcgcggtgcggaactccaggttgtcgccgcccgcaccctccagctggaccgcagaggaggaaggcccactcgggggtcgcaggagccggggggaggtggtgcgggaaggccgcgtacctgcggggcggcggcaaggcgtgcgctcggcgagacaggtcgtcggcggcgagtgagggacagagtgcagggcgcacaccgcaatgagcccgtgtcccctccctccgcctctactcccgccccgcggcaccgcgtgtgcaggcagctcccacccacttcccgtcagcccgggccctgcaatctgcacaccctgcgcgcgagccccgcccctccctacccgcgcagggtgtgctagcgcgctcagccctctccggccggcttagtctagttcccgggcctcgctcggttccagaactttccagaaaatgccgcgctccctacggctcaagggtcaaatcgcgtcatttccgggaggggacgaaggggtagttctttcacctcggctgggcgcctagaaaagcctagaaacagctccttttttcttccgcctccgagtcttcgcgtcagcgtcctgcgcagggcccttggggcgaatcgcggtgcgcgtcggggcgaccgccctccctccctgggaggggcgagggggctagcggcgaccgctggggcgagcgcgcctgcgcgctgggtgattttttcacgtgtcgccagggccggactgcgagtctctttgcggcgctacactagagcagagtacgagtctgaggcggagggagtaatggtgagtcccgcgtggccccgaggcctgcaggcccgggcctgtctgaggcgtacggggatccctgacgcccctcttttgttgggctgggcgggagggattggtggccactcagtgaccagcgcccgatggcaccttggagcggcaaggcccgcccgacccttttctcccccagggctctttgcacgcgcgtgtgctgccggtgtgtaaggcaggggggcgagaacccgggcgcacgcgcagcgtctcacctgcttctgcagggcctttgtggatgtgtaatatcttgggtaaaaatcatggtgccaggcagggagcttgacccagcgtttcctgaaaatttctggaaaaacctgaagaaggaaaacatttgaccttggaataaactaaggttgaccttaaagctggtctggttgctcaccggaggagcgacaacgacccctaacagacgtaaggaatcgggaattaaacttggaatattggttagtacattcaaatgcgcttccttaacgaataagctgaggtttggtgttaactttcaaagccaaaacgtgttgagatgtatagcacggtggcgttgcctgttgataatgtgattacatttagtttttgtttcaaaacatttctcttcctacaggcaggacaagcgtttagaaagtttcttccactctttgaccgagtattggttgaaaggagtgctgctgaaactgtaaccaaaggaggcattatgcttccagaaaaatctcaaggaaaagtattgcaagcaacagtagtcgctgttggatcgggttctaaaggaaaggtaaatgggagctgcagtggaactattttttatagtgtgcagtggagggaaaagaagtaattctggagtattaaaagtcgcttattaagtagagtttatgtcgttttcaagatcattaactgctttggttctaatctgtttcttaaagggaaatgactaatataaagttgcttattttatatgaccaatgctatgatgcttattttatgtgatagtttcagagtattaaaaattgtcctcaataggc

SEQ ID NO: 928 - DNA, 6000 bp, Homo sapiens
acaaaaattatggctgggcgcggtggctcatgcctgtaatcccagcactttgggaggccgaggcgggtgaatcatgaggttaggagttcgagacaagcctggccaacatggtgaaagcctgtctctactaaaaatacaaaaaattagctgggcgtagtggtgggcgcctgtaattccagctacttgggaggctgaggcaggagaatcacttgaacccaggaggcggagattgcagtgagccgagatcgtgccactgcactccagcctgggtgacagagtgagactctgtctcaaaaaaaaaaaaaaaaaaaaaaattagctgggcatgctggcgcgcacctgcagtcccagctactcgggaggctgaggcaggagaatcgcttgaacccgggaggcggaggttgcagtgagctgagatcatgccactgcactccagcctggcgacagagcgagactccatctcaaaaaaaaaaagaatgtattctttttaaactaaatttatttatatatattttttgagacggggtttcactctgtcatccaagctggagtacagtgctgtgctcatggtttactgcaacctcaacctgcctggctcaagtgatcctcccacttcagcctcttgagtagctgggaccacatgtatgcatcactacacctggctaattttttaattttttgtagagacaggctctccctgtattgcccaggctgatcttgaacacctgggttcaagtgttccttctgccttggcttcccaaagtgctgggtttataggcatgagctaccatacccagccaagaatatattctcccagaatgtcagaggagttgaggcaggatgtgtggctaagagagtagatataaagtcattgctgtggctattaattctccattcccaagtcacccactgtgatataaggaaaagcattagataaattcttggcatcctgtcctagtcctgtcactagctagttgtgagatgtctcaatttattaactcactttaagcctcagattcttcatctgaaaattgggttgtggttgacggagtgagaaaatgtttggattagatcagttgttctgaatcttaactgtacattgaaatcacacggggagctttaaaaactaccaatccctgggtctcactctcagagattttgatacaattagtctggaatggtacctggccactgaggtttttgcagctccttggggacagtctaatgtgcagccaaggtttacaaccagtgaatttgatgaaaacgtgaacatttgttgctactttgttaagtgtggaaacagaaagtcagagaggcttaagcaatactgcccttggacccaggcactgggggtcctgttgtgggccctgatttagaagggccttgctccggctcttcttgggctgtgcccttccctcaggtgaggagaatcatcagaggtgggaggagtctgcaaggtcaagaggacatgcccacaccgagaccctctgtttaaaaccctctttggggctgggtgtggtggctctcgcctgtaattccagcactttgggaggccaaggtgggcagatcacttgaggccaggagttcaagaccagcctggccaacgtagtgaaaccctgtctccactaaaaatacaaaaatcagccggatatggtggtgcgcgcatataatcccagctatttgagaggccgaggcaagggaattgcttgggcctgggaggcagaggttgcagtgagccaggattgtgccactacactccagcctgggtgacagagtgagactacgtctcaaaaaaacaaaaagaataaaccctctttgggtacctaagacctgaagttctctacgcaaagagccctgagcctcccaccagggcctacattggcctcttccccaagtccataccccagggacaaactatgctgcaagtatgcacatccctaagcccaaggggtggctgattttaagaggatgtaaatggaaagtggactgcaggtgggagtgtcaacataggtgtatacagtcattctttgagggctgctgaagccaaaggataaggatggcacaggggtagggggttaaatgcctgcccctactggtttgccaaatgggatgacaacatgggcttccaatgtgagccagaaaaagccctcagggaacgacatatggatatgctgggttagaagtcatactggtgtgtgttgaagtggtaagaatcagtgggcatgcaaggtgggcctggggtaagtccactatgatggttctactgacaaccagaaatggctttcacttgggatagggtgggttggaggtggtgatggaggtgctaagctaggtgttcttgaatagtagtttccaaattaaggacaggtgctgatctgtaataaaattttcttggtgtactaaaaagataagaaaggccaagagcagcagtggtcatgcctgtaatcccagtgctttggaagacctaggcaggaagatcacttgaggcaagttcaaaaccagcctgggcaacatagcaagactccctgccacccacgacccccgcttctactagatatatatatatatatatatatatatatatatattttttttttttttttttttttttttttttttgagatggagtcttactctgtctcccaggctagagtgcactggcataatctaggctcactgcaacctccgcctcccgggttcaagcaattctctgccttagcctcctgagtagctgggattacaggcgcccgccatcacacccagttaattttttgtatttttagtagagatggggtttcactatctgggccaggctggtcttgaactcctgacctcgtgatccacccgcctcagcctcccaaagtgctgggattacaggcataagccattgcgccgggccacaaatttttttttaaagaattagctgggcatggtggcacctgtagtggcacacctagcatggtggcatgctaggacctgtagtcctagctactcaggaggctgaggcagaaggatcacttgaacctgggaggttaaggctgcagtgagctgtgatcgggtcactgcactccagcctggagtgagaccctgtctcaaaaacaaacaaaaaaccaaacttggataactgacagagtttaggatagaattacatggaaaaaccaacaaaacaagacaattattaactccagaaaaaactaaaagttgtgtgggaaaggaaaagtaatcatagtttggtacataacttggctgtgactaccgtttacatgattataatagcatatatactgaagattaatcaaacagaatataactatcttgggaagatggagagattaaaaaaaaaggttgggggtgaatatggggtgaaagtgatggagaaaaagagctgaagtctcctctggtgtctcagcactccacccaaggtagagcctctggatggaagaaggaatctcccacctctccaccacactcccccaggatttaccttcagcatcaggtagctaggggcaagatgagaaatgctgatatgctggtctctgactgggagctgtgggaagagagaggttctgagttgcagcagtctggagtggagtctcttgctgaacaaagggagaggtttggtttaaataccacagactgactctcacattctgatccaagagttttcatagattttttggaacagatgtttcttcatttgctgtttgcccttaggaccatttcaaaggctttaaatggttaatggttgtttgttgttttaaataattttcagtttcactaggggtgaatcccgagctcttcatgccgtcctgctgttagtctctcttggtattattcttcacctttcctgtgagtttaaaattatctcaagaaaagttaaagctctttaagaatcacaataaagtagttattaggaataaataaaaacgtagaggggcgcggtggctcacgcctgtgatcccagcactttgggaggccgaggcgggcaaggatcacttgaggccagcagttggagaccagccttgccaacatggtgaaaccccatctctactaaaaatacaaaaaaaaaaaaaaattagtcgggcatggtggcttgcacctgtggtccccgctacttgggaggctgagggctggatggtttgagagcgggaaatccaggctgcagtgagctgtgatggcgccactgccttctagcctgggcgacagcgcgagaccctgtctcaagaaggaaaacaaaaaaaaacaaacaaaaacatacacacaaaaaaccacaaagtgtgttcacgtttgctatgactcccagacaacaattgtaaacactcgcgccgggcgtggtggctcacgcctgtaatcccagcactttgggaggccgaggcgggcggatcacgaggtcaagagttcgagaccattctggccaacagtgaaaccccgtctctactaaacacaaaaattaggcgggcgtgctggcgcgtgcctgtagtcccagctactcgggaggctgaggcaagagaatcgcttgaactaggaaggcggaggttgcagtgagctgaaattgcgccactgcactccagcctgggccacagagcgagactctgtctcaaaaaagaaggaaagaaagaaagaaaaaaaaaaacactcgcagtgtttactcctaacgcgtggaacttgtgtcgacatccacccccggttactgcatactcagtcacacaagccatagcaggaaacagcgagcttgcagcctcaccgacgagtctcaactaaaagggactcccggagctaggggtggggactcggcctcacacagtgagtgccggctattggacttttgtccagtgacagctgagacaacaaggaccacgggaggaggtgtaggagagaagcgccgcgaacagcgatcgcccagcaccaagtccgcttccaggctttcggtttctttgcctccatcttgggtgcgccttcccggcgtctaggggagcgaaggctgaggtggcagcggcaggagagtccggccgcgacaggacggtacgtgccccgcgctcgacccccgcgctggcggcgccggagctgtcccagaccccaagccccgacgcccggccctgagtcagcattgcagcaggccctgcgccgccgcgccccgcgtcccaccccgcgccgctcctcacagccctgcgctccgggaaactgcaggtggccggcagtggccaggggatggcgggggcgcttctggaacctgactcagttttgtaggttccttatctcggttgtttaccgcgggctttgcggaatgcccccgcttccgtttccgcccggctccgaacccccgaaccccttctacccgcaactccgccccggattcccagaaaggggcgacctgggccacagcggtacaagctgcaccccgatggacctgagagaccggaagtaacccttggccaactctggccgccccctgcagccgcagccccagaggcccacccgcgagcttcagtggcgggccctcagcgtcgtgtaaactttgcttaaaatgatcttgagagttcaattcttggggtgaactgttgagaagatctggcatttttcctttcgaaagttgttgggaacgtggactttcccaacaattgtgtatgcgctcgatctcactcagtgggagccgccgccctggagggaatttcacaatagcctggtcagggcggttattttccagagcagtttaatgtctattttgcccaagtgcaaggaaagcttgccttgggaaagctgggaatgcttggctaatgaaaagtttttagagccttttaaaatgaacctgtttctgccacttttccaccgcctcaaaacgactgggaaatgtaaactggcttcaagatgttcttgcttgagggtgtctggatttggacagaaggccatgttcttttaatattaacagtggcacgcagtagaacaaaggccactgaaattcagaatcagtttttggctccacgggcaggaagtaaattcaag

SEQ ID NO: 929 - DNA, 6000 bp, Homo sapiens
tatagcattcattttctgtaaaaagcactacctgctttttgctctaagaaaatctggaaaatagagaaaagtagagaagaaaataaaaattccccacttgcttcagtctcatcaccatccctggtacctactcatctgtcccctagtttctcatctcttgcctgggtcctcgttctaggttcctttacattcctggtgatggcccaggttaaagggatagactcattctacatttaggctgaatgatagccagcacgtttacagaaagcctaggcagacagcaactgatatagtgtctcctctgggggtatagctttgtgctatatacaacttgtctgtgctaccacatattttattaatagctacatcacggagcacaaccttataattacttaccagattaaaataatccagctttataattatttgccagattaacataatccagccatggcttagaaaagaactcaagtataaaatctgaactatggggtttcaatagcataccatggccaaggttttgggtgaaacttttgcgctgcttctatgttttccaaccagaaagggagctccagacagcagagggagatctacatgcccccattcctcagccccagcaggtgctcagtaaatgctgaaggagttacttttttcatttaactcttgattcaaagttgtggttattgttgcagggaatttggttcactcactagatagtattcaagcaagagactgtcaggtacctactcttttaaacaatctcattgactttgaaaactacttttgaaagctgcaagtaaaaacaaacaaaaaacacagatatataagccaaagggaagataaaaaggaagttcaaggaaaaaactcaagaatttcacaagtagataaggaagctttggttcccatttctaaagtcacatgactaaagaaactcattaccctgggaagcatttttaaaccttggagttaagtaactatgagaggatttttcaattacatttttaaaagtatacaaatatacatataaattattcatttcttcaacttaagagttcactgcagaagatacaaattatcatgagtatgcagatgaaagtggtatcaagtggtgtagcttctctctttcataataagtactaaatcaccaaagatggcaacccagtatcgagaataagagaaaaataatgtagaagatgtttatctatttgggccaaaaacttaaatcgccaaaaaaagaaagtggctagaagtggagaccatcagaggaacataaatacagaacaagtgtagaaaaggaagcaattttcacaggagaatcacttgaacccaggaggcagaggctgcagtgagcagagatagcaccactgcactccagcctgggtgacagagtgagactctgtctcaaaaaaaaaaaaaaatgtagctgggtgtggtggcacacacctgtagttccagctactccagaggctgatgtgagatgactgcttgagcctagagttagaggctgaagtgagatatgatcaccactgcactccagcctgggcaacaagcaagacctcatctcaaaaaaaaaaaaaaaaaaagaaaagaaaagaaggccccaccttgaatcttttttagaaaaaagcaggttgtaaataaacacaattttaaaaaatgaaatatcttgcaaactagaaaataaaccaaaaaaattgagtgtttatttttaaaaatatgtaaaagactgtatttgagagcgcacatgtgtgaaaaaaaaaaaaaaaacattaaactgaaacctttggttatctctacggaatgaacccctggaggttttctctatttactttgcatgtattttaactcataattataatacaacttgactgaagagtgtctgaagaaaatgcattacagtacagaatgttaggtacaatcctgaagcaagtgcaaagacagccgctgagcatatgaaagtacagagaaagggcaccagggtggggtgtcaagtcttctgaggggagatgacaggaagagagtataagggagagacagggcattccaataatgatagtgcttttcacctcactgatctatagtaagaaagaacgaccgggttctgcaagttacctgggcatactaaaagaaaagacaaaacaaacaaacaaataaacaaaaagaacccatggtgtcataactgccccaccatggcccacaggcttcctccagtcaggctgtcagtggatcttgtctaaactgccttgactcgaagttacctgtgtaggtaactgctgagtcttcctcaaccacattgtgaggttatggggacaagaaccaagtttagatccatttctatgtcctcggcacccagaactctgcctggcccagagaagctcaataaatgttggtaggattatactgaattaaaggcaaggaggcattggagtccataaacacgagtttaattagcccctggggctctacagggaagaaataatcagacttcaagggtgccccattccccagagtccattcctggtatttgaaagagcaacatgccccggagtgttgtgagtcctctggaggctcaaggagacctagggccaaaagcgaggactcaatccttttctgccagtatcgggggacagtgccccgacgtcccaggagcccagggcgacaccagcccaggggcggggatcgggcaggattctcggtctactcacgcccgggcagccgccggctcttcccactggatctccgccgggaccaactcccaccctcgccggacaagctcagacctgctgctccgcaaaaccagaattggaaatgctccagatgggacgaggaacaaggacagaaagtcaaaagcatcaacaggtggcttcgccggagggcgtccgagaacctctgcctgctgaaccgcttcacgcctaatccccgccacccaccggctgaaatgttaccacacaagacataaattctagaatcctgtctgcggaattccccgccccccgcgcagttgaaacttgcacagggccactcgcgtgtctctgggtggtaaaattctccatgcgtggtcaaacggcttatgcatagctcaggaccgttacgtgcgaccccaccaggactgagtggggacagccgctgcgcccccaccacctactaggagctgcggtaggacctccaatgccccaggggcctaggcaatttccgcttcagcttcctggaggtccccagcccaaggctcaaaaaactgcacactatccggcccaccccgggtcgcgcaagactttcggggggagggggaaacccagcgaccctgcaaatggcttcaccttggaaaccggtataaggaagcaagtaataccgtgttaaaagaaggtcaaatgtcagttacaaacagaaacgtaaaacataaagtcgctagagaaagccattttaacgaggacatttgacccaaaagcttaagtaaagcaagtattaacaaaacaagaaaatggatgtaaagcaaacagtaaacattaaaaactccctttcaacccagtcttttttgtttagatcttggagttgggccgggcatggtggctcacgcctgtaatcccagcactttgggatgccgaggcgggcggatcacctaaggtcaggagttcgagaccagactgaccaacatggagaaaccccgtctctattaaaaatacaaaactagccgggcatggtggtgcatgcctgtaatctcagctacttgagaggctgaggcacgagaatcgcttgaacccgacaggcggaggttgcggtgagcagagatagtgccattgcattccagcctgggcaacaagagtgaaatgctgtctcaaaaaaaaaaaaaaaaaaaaaagatcttggagctccagccaggttttttgttcaacgaaacttttgtaaggttatttaggggaatcaccaaaccgaaaagtgccaaaaactccgttcctcttatcggaaatctctctctaaagcaggtcaaaccttccagagcccgctgtctgttgtagattatcgcagtttgttgatgtccaaaaagctttacttatgctatacgctatccccctactggtttcacccctcattgcttaagaacaaatttcaaatgtcaaccaattaaaatattcgcaagacctctggcgtccttgaatttacttcctgcccgtggagccaaaaactgattctgaatttcagtggcctttgttctactgcgtgccactgttaatattaaaagaacatggccttctgtccaaatccagacaccctcaagcaagaacatcttgaagccagtttacatttcccagtcgttttgaggcggtggaaaagtggcagaaacaggttcattttaaaaggctctaaaaacttttcattagccaagcattcccagctttcccaaggcaagctttccttgcacttgggcaaaatagacattaaactgctctggaaaataaccgccctgaccaggctattgtgaaattccctccagggcggcggctcccactgagtgagatcgagcgcatacacaattgttgggaaagtccacgttcccaacaactttcgaaaggaaaaatgccagatcttctcaacagttcaccccaagaattgaactctcaagatcattttaagcaaagtttacacgacgctgagggcccgccactgaagctcgcgggtgggcctctggggctgcggctgcagggggcggccagagttggccaagggttacttccggtctctcaggtccatcggggtgcagcttgtaccgctgtggcccaggtcgcccctttctgggaatccggggcggagttgcgggtagaaggggttcgggggttcggagccgggcggaaacggaagcgggggcattccgcaaagcccgcggtaaacaaccgagataaggaacctacaaaactgagtcaggttccagaagcgcccccgccatcccctggccactgccggccacctgcagtttcccggagcgcagggctgtgaggagcggcgcggggtgggacgcggggcgcggcggcgcagggcctgctgcaatgctgactcagggccgggcgtcggggcttggggtctgggacagctccggcgccgccagcgcgggggtcgagcgcggggcacgtaccgtcctgtcgcggccggactctcctgccgctgccacctcagccttcgctcccctagacgccgggaaggcgcacccaagatggaggcaaagaaaccgaaagcctggaagcggacttggtgctgggcgatcgctgttcgcggcgcttctctcctacacctcctcccgtggtccttgttgtctcagctgtcactggacaaaagtccaatagccggcactcactgtgtgaggccgagtccccacccctagctccgggagtcccttttagttgagactcgtcggtgaggctgcaagctcgctgtttcctgctatggcttgtgtgactgagtatgcagtaaccgggggtggatgtcgacacaagttccacgcgttaggagtaaacactgcgagtgtttttttttttctttctttctttccttcttttttgagacagagtctcgctctgtggcccaggctggagtgcagtggcgcaatttcagctcactgcaacctccgccttcctagttcaagcgattctcttgcctcagcctcccgagtagctgggactacaggcacgcgccagcacgcccgcctaatttttgtgtttagtagagacggggtttcactgttggccagaatggtctcgaactcttgacctcgtgatccgcccgcctcggcctcccaaagtgctgggattacaggcgtgagccaccacgcccggcgcgagtgtttacaattgttgtctgggagtcatagcaaacgtgaacacactttgtggttttttgtgtgtatgtttttgtttgtttttttttgttttccttcttgagacagggtctcgcgctgtcgcccaggctagaaggcagtggcgccatcacagctcactgcagcctggatttccc

SEQ ID NO: 930 - DNA, 6000 bp, Homo sapiens
tgctgatctgtaataaaattttcttggtgtactaaaaagataagaaaggccaagagcagcagtggtcatgcctgtaatcccagtgctttggaagacctaggcaggaagatcacttgaggcaagttcaaaaccagcctgggcaacatagcaagactccctgccacccacgacccccgcttctactagatatatatatatatatatatatatatatatatattttttttttttttttttttttttttttttttgagatggagtcttactctgtctcccaggctagagtgcactggcataatctaggctcactgcaacctccgcctcccgggttcaagcaattctctgccttagcctcctgagtagctgggattacaggcgcccgccatcacacccagttaattttttgtatttttagtagagatggggtttcactatctgggccaggctggtcttgaactcctgacctcgtgatccacccgcctcagcctcccaaagtgctgggattacaggcataagccattgcgccgggccacaaatttttttttaaagaattagctgggcatggtggcacctgtagtggcacacctagcatggtggcatgctaggacctgtagtcctagctactcaggaggctgaggcagaaggatcacttgaacctgggaggttaaggctgcagtgagctgtgatcgggtcactgcactccagcctggagtgagaccctgtctcaaaaacaaacaaaaaaccaaacttggataactgacagagtttaggatagaattacatggaaaaaccaacaaaacaagacaattattaactccagaaaaaactaaaagttgtgtgggaaaggaaaagtaatcatagtttggtacataacttggctgtgactaccgtttacatgattataatagcatatatactgaagattaatcaaacagaatataactatcttgggaagatggagagattaaaaaaaaaggttgggggtgaatatggggtgaaagtgatggagaaaaagagctgaagtctcctctggtgtctcagcactccacccaaggtagagcctctggatggaagaaggaatctcccacctctccaccacactcccccaggatttaccttcagcatcaggtagctaggggcaagatgagaaatgctgatatgctggtctctgactgggagctgtgggaagagagaggttctgagttgcagcagtctggagtggagtctcttgctgaacaaagggagaggtttggtttaaataccacagactgactctcacattctgatccaagagttttcatagattttttggaacagatgtttcttcatttgctgtttgcccttaggaccatttcaaaggctttaaatggttaatggttgtttgttgttttaaataattttcagtttcactaggggtgaatcccgagctcttcatgccgtcctgctgttagtctctcttggtattattcttcacctttcctgtgagtttaaaattatctcaagaaaagttaaagctctttaagaatcacaataaagtagttattaggaataaataaaaacgtagaggggcgcggtggctcacgcctgtgatcccagcactttgggaggccgaggcgggcaaggatcacttgaggccagcagttggagaccagccttgccaacatggtgaaaccccatctctactaaaaatacaaaaaaaaaaaaaaattagtcgggcatggtggcttgcacctgtggtccccgctacttgggaggctgagggctggatggtttgagagcgggaaatccaggctgcagtgagctgtgatggcgccactgccttctagcctgggcgacagcgcgagaccctgtctcaagaaggaaaacaaaaaaaaacaaacaaaaacatacacacaaaaaaccacaaagtgtgttcacgtttgctatgactcccagacaacaattgtaaacactcgcgccgggcgtggtggctcacgcctgtaatcccagcactttgggaggccgaggcgggcggatcacgaggtcaagagttcgagaccattctggccaacagtgaaaccccgtctctactaaacacaaaaattaggcgggcgtgctggcgcgtgcctgtagtcccagctactcgggaggctgaggcaagagaatcgcttgaactaggaaggcggaggttgcagtgagctgaaattgcgccactgcactccagcctgggccacagagcgagactctgtctcaaaaaagaaggaaagaaagaaagaaaaaaaaaaacactcgcagtgtttactcctaacgcgtggaacttgtgtcgacatccacccccggttactgcatactcagtcacacaagccatagcaggaaacagcgagcttgcagcctcaccgacgagtctcaactaaaagggactcccggagctaggggtggggactcggcctcacacagtgagtgccggctattggacttttgtccagtgacagctgagacaacaaggaccacgggaggaggtgtaggagagaagcgccgcgaacagcgatcgcccagcaccaagtccgcttccaggctttcggtttctttgcctccatcttgggtgcgccttcccggcgtctaggggagcgaaggctgaggtggcagcggcaggagagtccggccgcgacaggacggtacgtgccccgcgctcgacccccgcgctggcggcgccggagctgtcccagaccccaagccccgacgcccggccctgagtcagcattgcagcaggccctgcgccgccgcgccccgcgtcccaccccgcgccgctcctcacagccctgcgctccgggaaactgcaggtggccggcagtggccaggggatggcgggggcgcttctggaacctgactcagttttgtaggttccttatctcggttgtttaccgcgggctttgcggaatgcccccgcttccgtttccgcccggctccgaacccccgaaccccttctacccgcaactccgccccggattcccagaaaggggcgacctgggccacagcggtacaagctgcaccccgatggacctgagagaccggaagtaacccttggccaactctggccgccccctgcagccgcagccccagaggcccacccgcgagcttcagtggcgggccctcagcgtcgtgtaaactttgcttaaaatgatcttgagagttcaattcttggggtgaactgttgagaagatctggcatttttcctttcgaaagttgttgggaacgtggactttcccaacaattgtgtatgcgctcgatctcactcagtgggagccgccgccctggagggaatttcacaatagcctggtcagggcggttattttccagagcagtttaatgtctattttgcccaagtgcaaggaaagcttgccttgggaaagctgggaatgcttggctaatgaaaagtttttagagccttttaaaatgaacctgtttctgccacttttccaccgcctcaaaacgactgggaaatgtaaactggcttcaagatgttcttgcttgagggtgtctggatttggacagaaggccatgttcttttaatattaacagtggcacgcagtagaacaaaggccactgaaattcagaatcagtttttggctccacgggcaggaagtaaattcaaggacgccagaggtcttgcgaatattttaattggttgacatttgaaatttgttcttaagcaatgaggggtgaaaccagtagggggatagcgtatagcataagtaaagctttttggacatcaacaaactgcgataatctacaacagacagcgggctctggaaggtttgacctgctttagagagagatttccgataagaggaacggagtttttggcacttttcggtttggtgattcccctaaataaccttacaaaagtttcgttgaacaaaaaacctggctggagctccaagatcttttttttttttttttttttttgagacagcatttcactcttgttgcccaggctggaatgcaatggcactatctctgctcaccgcaacctccgcctgtcgggttcaagcgattctcgtgcctcagcctctcaagtagctgagattacaggcatgcaccaccatgcccggctagttttgtatttttaatagagacggggtttctccatgttggtcagtctggtctcgaactcctgaccttaggtgatccgcccgcctcggcatcccaaagtgctgggattacaggcgtgagccaccatgcccggcccaactccaagatctaaacaaaaaagactgggttgaaagggagtttttaatgtttactgtttgctttacatccattttcttgttttgttaatacttgctttacttaagcttttgggtcaaatgtcctcgttaaaatggctttctctagcgactttatgttttacgtttctgtttgtaactgacatttgaccttcttttaacacggtattacttgcttccttataccggtttccaaggtgaagccatttgcagggtcgctgggtttccccctccccccgaaagtcttgcgcgacccggggtgggccggatagtgtgcagttttttgagccttgggctggggacctccaggaagctgaagcggaaattgcctaggcccctggggcattggaggtcctaccgcagctcctagtaggtggtgggggcgcagcggctgtccccactcagtcctggtggggtcgcacgtaacggtcctgagctatgcataagccgtttgaccacgcatggagaattttaccacccagagacacgcgagtggccctgtgcaagtttcaactgcgcggggggcggggaattccgcagacaggattctagaatttatgtcttgtgtggtaacatttcagccggtgggtggcggggattaggcgtgaagcggttcagcaggcagaggttctcggacgccctccggcgaagccacctgttgatgcttttgactttctgtccttgttcctcgtcccatctggagcatttccaattctggttttgcggagcagcaggtctgagcttgtccggcgagggtgggagttggtcccggcggagatccagtgggaagagccggcggctgcccgggcgtgagtagaccgagaatcctgcccgatccccgcccctgggctggtgtcgccctgggctcctgggacgtcggggcactgtcccccgatactggcagaaaaggattgagtcctcgcttttggccctaggtctccttgagcctccagaggactcacaacactccggggcatgttgctctttcaaataccaggaatggactctggggaatggggcacccttgaagtctgattatttcttccctgtagagccccaggggctaattaaactcgtgtttatggactccaatgcctccttgcctttaattcagtataatcctaccaacatttattgagcttctctgggccaggcagagttctgggtgccgaggacatagaaatggatctaaacttggttcttgtccccataacctcacaatgtggttgaggaagactcagcagttacctacacaggtaacttcgagtcaaggcagtttagacaagatccactgacagcctgactggaggaagcctgtgggccatggtggggcagttatgacaccatgggttctttttgtttatttgtttgtttgttttgtcttttcttttagtatgcccaggtaacttgcagaacccggtcgttctttcttactatagatcagtgaggtgaaaagcactatcattattggaatgccctgtctctcccttatactctcttcctgtcatctcccctcagaagacttgacaccccaccctggtgccctttctctgtactttcatatgctcagcggctgtctttgcacttgcttcaggattgtacctaacattctgtactgtaatgcattttcttcagacactcttcagtcaagttgtattataattatgagttaaaatacatgcaaagtaaatagagaaaacctccaggggttcattccgtagagataaccaaaggt

SEQ ID NO: 931 - DNA, 6000 bp, Homo sapiens
aagtttttggatgtggcaaccaggaggtcaccagggcctcaacaagagctgtgtcatcagggctgggatactagcaggggcaaacgaggcactggcttcaggacaacatgtgagggggtgctcaaaaagtcagtcatcaagatagataatattttaatgcaatattttaaaaaacagacataaatgcaaaaaatctatgatgaacaaaataccaacattttaaataaagacagcgtcagtattgctgattgtcccttttgcctcagattccagtatggctcaggactgagtgtggctgtgtagaggagatggtggtgaggggatccaggtggaggcatgttgagaagtgaattgtggttgaagaaactgaagcactgagtacagactattccttcatgaggtcccagctttatgtgaaagggaataaagtgaaaggatggtaggtctaggggaccctcaggcttttttgagggtttggctttattttttaagatggaagagacttgcacatgtttacaagctgggaggagccgtctctggaggtagagaggatgaagagagtagacataggggattagtagagacaggagggcacacagggaggcttagccctaggcaagcagagggacaggagggaccagctggggcagtggaaaggtggaaggtggcaggagtttgtgcctgatacatggatgagaaatggcactgggggtggtgttgggatggaagagagttgtggagtgttggaggtttcccacactccttgaagggtgtgggaaaggagctgaacagagtcttcctgtaaatgaaactgttgagcagccgtaggggcccagctcaggaaaccaccagggtgtggtggtgagtagttttcagattgtgttatctcttctcccttccttcggaacttgctactggaggtgtaggagtggtagaggcttcctcattaaggcaggggtgctggagcgatcaaccatccctgtttgcctgggactgaggggtttcctgggactcggtcaccctagatgttgcagggctggcagtcaggagggaaaaaggccagataattgaaaatgctggccagagtttgtagcatgcgctgtctgattgttgtacctgagcgagttagagaaaacgccacactttgagatgaattaagagtccgtttatttagccggcggccaagagacagctaacgctcaaagttctctcagcctcgaagaaggggctagattttcttttatactttggtttagaaaggggaggggggggtctagttaaaacaattttacagaagtaaagtaggcaaaaaagttaaaaggataaatggttacaggaaagtaaacagttccaggtgcaggggctttaagactattacaaggtgatagacgcggggctttgggcgttatcaatctgacgaattcctgagaactgcggatattgctggccacagtatcttatcagttaattgcattcttggatgtgctgggagtcagcttgcacaagttaagtccttgcggaagggctgccagtgaaacagccaagatggagtctgtctggctctcttagctaagggagagtcaattcaggtgaaaacaaggctaagtgattaaaggaaagggagagtctaaaaacagcgttagtaaaaacaaggttgggcattacatgatcactgggtctccactgtcagagggtctttgagctcagttctagtggcagcctcctgatcctcacttccctggctgaggcaaggttgttgcagcagccccaggagtctttgttagaatcccaccccagagctccttcctccagtcctctcagcagttttgttagttccagtattaagtgtaatttctacaaaaaatgcctggaatatttctgtttccagaaccggatgctcctgttagctagtgtgtgaaagataactctgacttgcctaagctttgttgatgttttgaataataattggcgatagtctcttgacttctgcaagagaaatgaaacagaaattggtctcaagttttagttgctcttgtgaaggtcagggacagtttgtaccagggtgtgggtgtggaaaagaaggggagatatagtcattaaattagaatatgcctgtgaggggagttaaggggaattcctttaaaattctagaaaacacacacaggtgccaattttgtctggctagggaaaagtaaactgctgaaaacacttggggggagaaatgaagctaatggtatcttgatcagtcaggaggattgggtatttgaaagcagggaagaaaaataattggacttggatattcctttgccccttcatctgagtaaggtgaaagcaagtgactcttcagaagaggcgaatgggacactgagtccagcagctcaggcagggtggagttggtaactgatgggcacaagtcttttactgggctctaaagaactcattcatctgggtgtggtggcttacacctgtaatctcagcatttcggaaggctgaggtaggagaatcacttgagcccaggagtttgagaccagcctgagaaacacagtgggaccctttccctacaaaaaactgaagaccttatgagcttccctagtctaagagtaatttttatgttaatttcttggcttgggcttaaaccccaacaaagtggtgattattcggaccccagccctacctctccctagtatgctctcctttctcaagtactcaccacctctagccacagtgaactgcctccagcatacacacacgctgctattttgttgcatctgagtgggctggctccacacgggatctgtagtttccttttgatattttctttcaatgtgccagatgctaccactgagtaatctagattttgctgccaaactctacccccgttagcacagagggaagacagtatgccagtgctcttgctgagtgtgcgtgactggcagaaagcagtcatgggtgtgatggttggaagaaacaaactgagcagataatgttttttaaaatgattatctcattttgttaactcttggtggcattgttatattgttgatacttatgaattacaaaagttagatgactgtaaaaaaatagagaattaagcatttcatttctagtagttctgtttggttctttttcaaatatgtcagtgaatttgtataatatctcatttcttagtcttgtgtttaatgattttatttttgtgtttttataattccttctactgcatatattttatactttaatttataataacaactgttgacaaaattgtgactattcattaatacagtagaaaagaacttggcctccttttcatggaagctgatgatgagattaaagcactgttggcctgcgagtggagtatagatttgggctgtccagaacacataaaatttgtatttatctttctgataaaaaaaagtaaaatagtctgagtgccaatttttccactttcattgagcacatttaattttagtaaatttaacttagcaaatttaatttctccagttatttacaaataatcatatttaagtgaagttgggatgaatgggcaagcccatttcaaatttctaacctaatttttcctcttgttttcatataaaatttttctatttatgtgtttttattttaagatagctcaaatcttttgtggactgatactgtatgtatataaataaatggattcagtgcttctttcactaaatacagctagataaatatataaatatacttgaacacaaatacaaagcaaccattggcaatttagagttgggttgtgtttccacttattttttgttaataaatttgattttaacctgaaatattgtcttgtaggaacagataaagaacacaagaggtgatttaacataagttttagctgtgaaacttagagtagataggttagcaacttaaattttgaaagaaaataggatgagtttcaatggaagaaattaagaacacacccattgcatgagctccttacccctcctacccagccccctcccaggagtgagatctttccccagatcctctgtaacttccagatgttccactgagaacatcagaagcactaatggcaattgctgccatgtagcagtgcattgagagtcagggcctctggcacctccatggggctcagggtctgaagacgtgatccaaacctgacaacttggtggcaggttctgtgagcattcatgatgttgtgaaaagggcttggggtctaggaggatggcagcagaggtttctgccctcaggtgtgagtgaggggcttttgaagtaggagagcaactagaaaaaaggagtggcacagggacagaaacttcttttctccattgtttgttcaaggccacgtgggtggagtcattgaggtggaggtttaactctgtgacataagtttccctgatttagtcaggctgtctgtcgttgggcttttcccacttccttctactacgtacttcttccctattcctcctactgaggccattaaacccttagttgtaattttccctgaacatgctttacattctgatgaattctgaaaaagaatgtggggtttccttgcagatgagttcatctgttgtttcatttcctttacaatgtaggttttcttctctgtctttttggattagtctgtttttggttctgtctaccaaggatccctttctttagacttctatagatccctttctatagaacttaatctacttaagtcagggagaccacccagaaggaaagagcccatactttcaatcttaggcataagttagcttgataagattttcagaaaaattcccttttaaccacagaactcccccactggaaaggattctgaaagaaatgaagtcagccctcagaaatgaagttgactgcctgctggctttctgttgactggcccggagctgtactgcaagacccttgtgagcttccctagtctaagagtaggatgtctgctgaagtcatccatcaggttgaagaagcacttgatacagatgagaaggagatgctgctctttttgtgccgggatgttgctatagatgtggttccacctaatgtcagggaccttctggatattttacgggaaagaggtaagctgtctgtcggggacttggctgaactgctctacagagtgaggcgatttgacctgctcaaacgtatcttgaagatggacagaaaagctgtggagacccacctgctcaggaaccctcaccttgtttcggactataggtaattcatcaactcttcctgaggctgggtgggtgggagggagtgaagtgtctcagactctactgaatggcagaaacgaggataataagaagtgcagccactttactgtctctgcccacttatccaactgccagatgatgtcacttcattcctgtgagccctttaaattcttgaaacttgttttcttgctttctttttctttctttcttttttttttttttttttttttttttgagacagagtctcaccctgttgcccaggctggagtgcagtggcgtgatcttggctcactgcaacctccgccttctgggttcaagcgattctcctgcctcagcctcccaagtacttgggactacaggcgtgcgccaccatgcctggctaatttttttttgtatttttagtggagacggggtttcaccatgttggccaggctggtcttgaactcctgacctcaagtgatccacctgccttggcttcccaaaatgctgggataacaggcatgagccattgcctccagctgaaacatgctttctcaaaggaattgggatcatatgcaggtagaagggcagctggtatgtgtttgcctgaaggatagaatgacaagacgtgaagaaagataggaatgactaagagctagtcattcttgccagcctctgacagtgtgagatctgcagcagtgtttactagttcattttctgtgaagtcagtccttgataatttgtggtacaaagaaaggaaataacaagtctgacagtaatcttcctacctttgtagagactccat

SEQ ID NO: 932 - DNA, 6000 bp, Homo sapiens
ggtcacggacaccctaacccagtggtgctagaggaattagacacacatacagaaatatagagtgtggagtgggaaatcagggggctgacagcctttagagctgacagctccgaacagagagttacccacatatttattgacatcaagccagtgataagcattgtttctatagattatagattaattaaaagtatcccttatgggaaacaaagggatgggccgaaacaaagggatgggttctggctagttatctgcagcaggaacatatccttaaggcacatatcactcatgctattgtttgtggtttaggaatgcctttttgcagttttccgccctgggtgggccaggtgttccttgccctcattccggtaaaacaacagccttcagcgtggccatcatggccatcaagaacatgtcacagtgctgcagagattttgtttatggccagttttcgggtcagtttatggccagatttgggggactgttcccaacaccagggtgtggctgcagccaccctcctaggtgcaggacctgggcatctctgcagcctgcaccctgggggccccaggaaggaccccctcccaccccatcccgcaggcttgggggtgtctgctcccgctgcctggcctctcttcactcctggcaccttctccaatcttgaagtggggttggggccaagtcctggggccttgaatggcaatgggaggcagaagggggcaggtccccagtaaggtcctccttcaggccagggagggctgaaggctgggggtggggctgccagtcctgtggattgtagtagggactcatggtgcctcttctgggtgcccgtggacaaattggcagccacttcctcctctctgaggtccataaaagccctgggctcagccagagcagggcagaggatggccagaggacaaagagggcagagaggtggtgggatgaccagctgcagagaggagtactctctgctgatagctggagacaatgggatggctggctgcagagaagagctaccttctccactgagagctgcagagacaacctgccagcagagagaagccaccctttccagggcctcctctccactgagaactgagcactggacagatgacctgcctacagagaggagctacccactgtgggcctcctctgagctgttctagcactaaataaagctcttcttcatcttgttcacccttcacttgtctgtgtacctcattcttcctggacgcaggccagaactcgggcaaaggtgctgcagtcagagaggtttccagccagaaaattgataccccaaagatcccgtaacaaaggtatggagcaaagtgggggtaaggaggtcttggaggttgggggtgtcaaatctagaagacttgctacttcaagaccttctgaggaccctcataggttggggtggaggtttcagtgctctgagctcttctctagccagtatatcccttcctcctcccccatggcttatgccaatcctttaggagtcattactctttttttttggatggagtttcgctcttgttatgcaggctgcagtgcaatggcatgatctcggctcactgcaacctctgcctctcgggttcaagtgattctcctgcctcagcctcctgagtatctgggattacaggcatgtgccaccatgcccggctaattttgtatttttagtagagatggggtttctccatgttggtcaggctggtctcaaactcccgacctcaggtgattcacccacctcggcctcacaaagtgctgagatgacaggtgtgagccaccgtgcccagccaggagtcattaccctttagtctacccagacagagggtggggaacttggaccacagattgtatgtcaaggaaagccaaccactgctaccactaccccctactaatgtggaactaaagcagtagttgacatccacctctacaaaaggccatgaaggttttgattggcccttcacgtgcactcagtagactgcaaccaatcaggaaagagattgtaagacgtgtttattctaccaccatcaacatgccctcagtaactgtgtgtaggaggaagtagaaaatgctgagtacaaatatctgcactgcacgccatctcccctctgtaacctgattcaaatgtttccctggagcagtaggataaaagttacagttttacttcctgggtctttattctacctttaccttccagacctagatcaaatacttcctcctccaaggaatgtctgactgattgtcccttcttaaagcccctgtggcaccaaagtgaagcctcactgtggcatcaccaccccctgcccgcagttacagatgctacacgatgtcatactgagattcgggcaatggtagcccggggatcaagagcaaggggttcggagtcagagagacccacgtttgagccctgaattcttgctcatagctttgggatggtggcaagattccttgcctctctgaatctgggtttcctcatctattgaatgtggataataatgccagctaaggctgggagttgttatgagttcatcagagaagtttagaaatggtagtaccggtcgccatagttactatggaaagcaggtcactttgctttccaattgtgcccaattcagggctttgaattgcctgctaaatatttaatattattgaatcaaagttgaaagagttaatatactttatgaacagagtgagagaaagtgatagtttcaataagttgcctccctaaatggcccaataaatttaatatttataataaaacaactaaatagaagaccaagacttacggcttgtctttcttcctttttaagttattttccagaaaataatatttatattttaagttaaagtaactgcaaattggaaaccacagggggagccccaggctgggacaaataatgactagcctggtcccaacagaacaggcaaagaaggtggtccctacactctttatggtcagttggggccccctcctcactctgctgcagcattctagggtcagggccccaccttccctggaactggggtagtgagtaacccagcctgctgtgctccggcccccctttcccaagaaggttttttttttttttttttttgagagagtctttctctgtcgcccaggctggagtgcaatggcacgattttggctcactgcaacctctgcctcccgggttcaagcgattctccagcctcagcctcctagtagctgggattacaggcatgtgccaccaagcctggcgaattttatgtttttagttgagatgtggtttcaccatgatggccaggctggtcttgaactcctgacctcaagcaatctgcccacctcagcctcccaaagtgctgggattacaggtgtgagccactgtgcctggccaggacttgtctttttcttttctttttttttttgagaaggagtcttgctctgtagcccaggctggagtgtgatggcgtgatatccgctcaccgcaacctccacctcctgccttcaagcgattatcctgcctcaacctcccgagcagctaggattacaggtgtgtgccaccacgcccagctaattttttgtatttgtagtagagacagcgtttcaccatcttggccaagctggtctcgtgatccgcctgcctcagcctcccaaagtgctgggattacaggcgggagccactgcacctggccccaggacttgtctttcttaagcacagaagttctctgaatgatgcctaggacatggaaaggacattttaatacatttgctaatcaaagcatcataaatcttgctttttttccccatagataaaacatctttctaagactctgtacctctttccagagtgctgcacatttgagttagcttaattatagtgtagtgactttgatccaaacttgctggtttaaatcttggctcttccagccgctcactgtgtgaccttgggcaaattaattaacctttctgtgccttagttttcacatgttaaagcagcagtcatagtaatagtatttatcttacagtgttgttgggatggtgaaatgagtaaatatttgtaaatgccctggcacatggtagttgcaatattagtgtgcagtattgtttttatgattagaaataatgtcttcaaagtctcactttcctgctggtttgaatgtgctgtgagaacacatactgtcagttttgcctaccacaaatttgttgagtctcttgcaggtacctccaaatgggcttgtaattcaccatccccacttttcttttttttttcctttctttttctttttatttcttaatttctcccacaaagactgaaagtgaatccccacttttcttttatcttttaaaaattttatttgtgggccgggcacggtggctccatgcctgtaatcccagcactttgggaggccaaggagggtggatcacaagctcaggagttcgagaccagcctggccaacatggtgaaacctcgtctctactaaaaatacaaaaaattagccgggcgtggtggcgcatgcttgtaatcccagctactcgggaggttgaggcaggagaatcacttgaacacaggaggcagaggttgcggtaagtggagatcgctccattgtttatttgcatgtggacataagaaagggttaacatggccgacaactatttcatgagctttttggctttatttgaaaagtgaagtgtgtttggggaaggagttggttaggaaaacagatgcttccctttttgacttaccaaggaaatggagatccaaaggaaagcctgaagcactttgtggcttccacgggttcgtttctaggaagcttttgctttacctggggaaaccccaagctctacagtgagaaagttgtaaattagcctttaggagacgctgtttgtcaaagttatcttaaccctggaaaaggggagggaaaaaggcagataagcagtgatgacatcagcaggaaactagtatcaggctacccagtcctgaagattcagttttcacttaaacaaccagcaagtcttgaagtctcttcccaagcaaatgggagcttctttggaccttggagcacacagaggattctactttctttaaaactttgttttcaggcaatttccctgagaaccgtttacttccagaagattggtggagcttgatctgaaggtatgtaattaacaacccttcttactccagagtctcatgcttgaatcttttcctttgcttcatggcttcgtgttgtagaaacttgcaaaaacttgtcagcaatggcactattttttcttagatttctttgtcatgcctgggaaaacaaaagttaaaaaatccggaagcctccaacatagccttttaccggggcagaaatatgttagctcacagagacaaagtttggtagactcactaaaactagagatcagaattgtcaagaaaccacaaggcaaatgctagatgcggtagaatagaaaggtgtctccaataaaccactcatttgacctcagggctagtagcagggaagatcccctggattatcacattaaaaatgacatttttttgtttcttttaacaccaaaagtaatgtgtatgctcacatatgcataaaatttgagaaattcaattggaagcccagaaggaaatttgtattatctatagttatgtcacctcgatataaccactgtttgttatggaggttttgatttttgctgtgtcttccttcctttatttatttatttatttatttatttatttatctatttatttatttgagacggagtctccctctttcaccctccagcactcaagctggagtgcagtggcacaatcttggcttactgcaacttccgcctcccaggttcaagcaatcctcccatctcagcttcctatgaagctgggaccacaggcatacaccaccaagcccagctaatttttgtattttttgtagagacggggtttcaccgtgttgcccaggcttgtcccgaattcctggcctcacagtgatccacctgcctcagtctcctgaagtgcttctctg

SEQ ID NO: 933 - DNA, 6000 bp, Homo sapiens
aacaactccagcccttgggtttagccacctgctgctgctaaaaatgttgctgagagtgatggagaggtgttttagttcccattttacagatcagaaaatcaaggcccagagaaactaagtagtcttggagataggagccatggcctctccacttgagttatcatcttgaaacatcaaggacaagccaactttatcaacagttttaggcctgtgagaaatgggcttggtttatcttgaagattgtaaacaaataaaaaaatagactgctccattactgatgagaaatatgagtcattctgccaggaattgaaagtacagctgcccataaaaaagctatgccggggtccagcctctccaggtccttgtgtgtgaaaaaccactcagtcaaagttccccttttatttctctttgtgctcagtaggatgctgaaatttctggaaaagacaatggaaatcaggggcaggaagagaacagtgtggggtgctaaacagatctcagcaacctccctgcccacggccatctctgcgcagacacctcgaccccccatgcgcaggtggagcagcgtttcctagttctttccagaggcttccttctgcctgccttccagccacatcgcctgagattgacaacgccctacagcaagacggaaacctccctttacagcaccaccttgcgattctgcagccacaaagttgagacttctgaacgtggcactcttctgttcccttactgtttcacgtgtacctgtgtcatctttcttgtttcatcgtaaacatacttctaaaattcccattttctttatttagaaatagaactacaagcggatggttaaacaatttaaacaaatggtccatggggaaaagtgaatttcacactgtcccccaaactttcagtgccttttatggagataattattgtttctaatgttttgaatattctttcagagatattttattcttatataagcatatgtgtatttgtgtccttccctcattttccccccacaaacactagcagactgttttgcaccttggttagctcatttaacatatcttggagccaggtgcggtggctcatgcctgtaatcccagcactttgggaggccgaggtgggcggatcacctgaggtcgggagttcgagaccagcctgaccaacgtggagaaaccccgtctctactaaaaatacaaaattagccaggcgtggtggcacatgcctgtaatctcagctactagggaggctgaggcaggagaatcgcttgaacctgggaggcggaggttgcggtgagccgagatcgtgccattgcactccagcctgggcaacagaacatatagatctgcttgatccttttcatgactgctacagctccattgaatgtatggatcatcagtgctccagctagcaccttagtgatgggcatttagggatcacaaacttcataagggcagaaacaatatcttacccatcctctgtttctgatatggtttggatgtgtgtccctgcccaaatcacacgtcaaggtaatcccccatgtcagaggtggggcctggtggaggtgattggatcatggggatggatccttcatgaatgggttagcaccatccctttggtgctgttcttgtgatagagctctcatgagatctggttgtttaaatgtgtgtggcacctccccactctcttggtcaagttcctgccatgtaagatgcttgcccttgctttgccttctgccatgaataaaagctctctgaggcttccccagaagcagatgccactatgcttcctgtacagcctgtggaactgtgagccaattaagcctcttttccttatgaattatccagtcttaggtatttctttgtaacagtgtgaggatgagctaatacagtttcctacactgtaacctaaggcaatgctttgcacaaagggatgaaccagattgcttagtaattaaaacacaaatacaaaccacaagcatatccattcatgaattgggggacagcttttatttgattctgagttctgatacctgctgctttgctttgttaaaaatgtgctagttctcattcagcttcctatcagtcatatcaccaaccaacatgtataacatgtacaatctgccaggtcaggaggaaacttatggatacaagaaatgtccctcccttctaggaaatgataatctgctttgggagagaaggcaggtactttttggcaaaagtgacataataaaataatcaaaaaaagatggatctttttttcttttttgagatggagtcacgctctgtcacccaggctggagtgcagtggcgcgatctcggctcactgcaacatccgcctcccaggttcaagcgattctcctgtctcaggctcccgagtagctgggactacaggcacccaccaccacgcccggctaatattttgtatttttagtagagacggggtttcactgtgttagccaggatggtctcgatctcctgaccttgtgatccgcctgcttcggcctcccaaagtgctgggattacaaacatgagccactgcaccaggcgaaaagatggattttttaaaaaaggtgttaggataatcaggtccccacctgcaagaaagtaaagttagaagcccacctcagaccatgcataccagcacaaaaatgtcaaatggcttaaagataaaatgttaaaacaagtctagaaaggtattaaaagaaaatatagaaaatacagcaccagcaaaaatttccctacacaagatgtaaaagccagaagtcataaaggaaaaggttgataaattagaatagataaaaatgtaaaacttttgtataatataagacacaaagaatgaatttaaagacatacaatgaaggttaggaagatgaagatgttttggcgatgagtggtggttacacatcagtattaatgtacttaatgttactgaactgtacacttaaaatgatgaaaatggtaatttttatgttatgtgtatttcatcacataaaaaaagacatgaaatgaatcggggaaaatatttgctacataactaagaatgaaggcccttaataaaatctgtaaaactatacacacttttaggaatgaatcaacaaataatttctatgaattagaaaaaagtgacaatccaactaaaaaatgaataagggatataagcaatgtgtttcacagaaaaaataaaaattgacaatgaagttatgaaaaaatgttcagtctccttagtaattgcacaaaacaaactaaaacaatgagacattacccctaagattagtaaatgttaaagaaaaataataattggtgagggtgtggggaagtgggcacttacacctatgtttggaaatataaattggtgcaaccttatagggagagcaatctcacaacattttccaaagacttacatgcacaaccctatggcagagaaatttattcctcttccaggattttttttccttcaaaaacagtgatgtggatgaaaaacacatgttcactactgcacagggtataacagctgaaaactggaaacgataatactcacattcccttcagtaggggaatggttaaataaattttacaagccatctggtagataccaggcatgagctaaaagttagggtccagttagagatggaaagcacaccagtaatttgaaagggaaaatgtaatatgaagaattattaactagtaaaagaaggctaactgctaaaggtacaagagcactcaagctgtctgcagtcagcaggccccggctggtgagcaggaagctgcccgctgggaggctgccaaagttccctgaaggtgagcaccactggttctacaagctgctggcagtcatggcgttaagagcaggaagagaagcaccagaacccggaagagaaatccagtcctctgctaggccttgcaccgtccctctggcgccctctactgacaaagccagtaaaattgtgccgctagcaaaggagatctttttatgggatgtagcttggtgtcaccaaagagaacagagtggacttggagctcagatgcaacacaatgattgatactggcacagtatacttaccctgcttttgtaaacaaaatggtatatgtgatgtctctctttgtctctctgtatataaaacaatatttgtttctacttattatgtatttatgtctttactctgcatgccaggagctaagtattttgcatgtattaactcattttgttctcataataaccttcacatgcaggaatcattatagctactttatgaatgagccgaggaaggcactgagacgttaagtaacttgcccaaggtcacgcagctagtaagtggcagagcaagaattactatggctttataagcctaggaaaaagtctgaaagaatcaaaatgttaacagcggggacctcaaggaagcattgaagaggccatgggagaagttttcactttgttaaaaaatcagtccttcaaataaataaatacagtgaggcttccccagaagcagatgtcactatgcttcctgtacagcctgtggaactgtgagccagttaaacctcttttctttataaattatccagtcttaggtatttctttataacagtgctaggatgagctgatacagtttcctacactgtaacctaaggcaatgctttgcacaaagggatgagccagattgcttagtaattaaaacgcaaatacaaaccacaagcatatccattcatgaattggggggctgctttgtgtgcatagataaggtatattttttaaaaaaattatttttccaagaagaaaataaaccagttaataaacgacaactcacagtgccaggaagtgagaaacaagtgtgtgataaacggtggagaatgggagcactctccgcagtgggcgggaggagacgaggagggcgttccctggggagtggcagtggttggagcaaaggtttggaggaggtaagtcatgtgctctgagtttttggtttctgtttcaccttgtgtctgagctggtctgaaggctggttgttcagactgagcttcctgcctgcctgtaccccgccaacagcttcagaagaaggtgactggtggctgcctgaggaataccagtgggcaagagaattagcatttctggagcatctgctgtctgtgagattaagcactatgtatattgctttattcactccccacagcaaccttaccaagcagttcttttccacgtgaaaagatggaggctgggtggagcaaaaggaggtatttagagtcctcagcaagtgagaggcagagctgggatttgaatccagatctgcctgatactgaagtctaggctggttccacctctccggactgctttccagggagtagaagacagatattttaccttagctggctgcttctagaagtctgaccctgctggctcaaaacgactttagttccttgcccagaggctgcgggctgcgggtcaagacatcagtagaaggagggcccagccagagaggctgacatgggcttctactcaccgtcatctctccttccttccaggagcagcccctgggtgcgtccactttctgggcacgtgaggttgggccttggccgcctgagcccttgagttggtcacttgaaccttgggaatattgaggtaagcctgggatttccagaggaggtttgggggaaagagaagtggtgaacgctattactgttccctatctagacaccagtgggccgagtggagcagatgccagttgggaccttcccgccctctctttggttattaatccattattgttccctgtacactggtatgagtggatgggggaagtatttagccaagtttttgagacctgtactcggagctaaaatgcattgtcttcctatagtgcgggaccccacaactgtggaggagccgcaggggatactgggtagtacgcagacattatgcactaaatgacaatggctcacatagtgaaaagttattcttttttatttttttttttgagagggagtcttgctctgtcgcctagcctggagtgcagtggcg

SEQ ID NO: 934 - DNA, 6000 bp, Homo sapiens
ctgatcttaaactcctgagctcaagtgatcctcccacttcagcctctcaaagtgctaggattataaatgtgagccactgcacctagcctgatcttttttttttttttttttttttttttttttaagaaacagtcactagtgctgtatgtaggttacagtagctatgtaggcccttcagagtcacttcacttttctgagctttcgtttcttcaacgtcttcctgtctgtaagacacatgctcttctacccctgagaccaaaaaatgttaccagtgaggatctaatgatataaaatagggaaaatgctttaaaactgcacagtgcttaacaaatgcactgttattatatcattaaaagtgactcctgggtggtgggaatggttgcataacgacgtgaatgtacttgatgtcacttaaaactggttacaatggtaaattttatggtatatatattttaccacaattaatacattttaaaagatggttcttgacaattattcttagcgtctgaggtgccccatttcttgggtatgggcatatagtgcctcaagaatattggggatcctcacctcttctatgcccaaacctttaagaaaattctgggccaggcgcagcggctcacagctgtaatccaccactttgggaagccgaggtgggtcgatcacctaaggtcgggagttcgagaccagcctgaccaacatggagaaaacccgtctctactaaaaatacaaaattagctgggtgtggtggcacacacctgtaatcccagctactcgggaggctgaggcaggagaatcgcttgaacccaggaggcggaggttgcggtgagccgagattgcaccattgcactccagcctgggcaacaagagcaaaactccatctcaaaaaaaaaaaaaaaattctggaaaagctaggtcagtgacatgaatattggaatcagagtctaacaaactcaatttcttcctttctaaatccgtggtacggattcatgtctgcagtagtttttctgagaaagcagaaggggtaggtattggcaatcaacaagctgcagagtatgcagattgaggtcagtaactgtaaatgccccatgactgtctgatcattttaataccaaaagaaaaacttaaaatcccagttgctaaaatctttgtcttagacaactctttgagcctctccctacaaggcccagaaaggaatgagatagatgtgaatggaatctgttttcccttcccttgccacgctctggaggaggagtctagggcagtagccaaggccagctgccagtcaaggaaaggggagcggccccgttgaatccacaaaccacaccatcctggcccatgggttatatacaaactcccacattggcaacaaacaaagggcatgcacattcaggggattttgctttcactgtgagtgtttatctttgaagggtgtcacatcaagatgaatgggaagggtgtgttgcagttgagctgaggtttggtctttcttggcttttttagggacacttacaggtccaaatctgctttcagccggctggtggacatggtaggagacacagtagtctcaggaccaggcctccaggtgggagctgagattctagagggtggaaaccacttggagattgagtcaaagcagacctgtcctcattctgtgctgggcaggagccagctctccatgtccctgcagctccagcaacacctccggatctttcagcttccctgggactaaggaccatgcacattattaattctgatataaacagtcacacaggcacatgtctcaagatgagggtgagaagttggttacagcaaatgaagtaataatgatctttgtgcttcacaataggaattcaaccaacctgaggtttataattcacttattaacactttttatttttgttgagacggagtgtccctctgtcactcacgctggagtgcaatggtgtcatctcggctcactgcaacctccgcctcctgggctcaagtgagtctcgtgccttgagtggctgagactacaggcacatgccaccatgcccaactaatttttttgtatttttagtagagatggggttttgccatgttggctaggctggtctcaaactcctggcttcaagtgatccgcctacctcaatctcttcaagcgctgggattacaggggtaagccactgtgcctggccataattcatttatcagtcatatatatatacacacacactgggagaatctagggtcagtgccttacaaatggcacaagttgaagccctgagactcccactcctaccctgctccccccattctcagtactgctcctcagatgcctccagcagatcatccatttctgctaggctgggcctgggtacatgcagggagatgtgtacaggggctaagagcagaaacttttgagtgagacactcctgagttcatgcactggccctgccatttgtcagctaattgatgttgcatttaattgcatcatctgtatgtaagcctaataatttatagccatcttagagatgttgtgagcttaaataacatagtagtgaatatttatttatttgtttatttatttatttagacagggcctcgctctgtcacctaggctggagtgcagtggtgtgatcatagctcactgcagccttgacctcccacactccagttatcctctcacctcagcctcctgagtagcttgagacaacagatgcatgccaccataactgactaattttttaaaattttctgcagagacagtgtctccctatgttgcccaggctggcctcgatctcttgggctcaagcgatcatcctgccttggtcttccaaagtgctgggattactggtgtgagccactgcacccacagcctatttattgagaaatgtggaaggcccaggcactattctaagtgctccagctgttttatctcccacagttttgctcagataggagttccaaagctggagctggaagactcatatttttagaaatgttacagttaattctgaggtgggtcagattgagattcatggctatgcattaatgtttaggtggtgactaaccactcagggttttagagacaaacagaccttattctgtcactcactgactgagcgtggccaagtctttcagcctctctaagcctcagtgtcctcatccataaaatgggaccaatcgtagcatccacttctgagaactgttcagaagtggaaatgagctagtttaggtggctgtgtctggcatacgccaatggtttgataagtattagcttgtgcctttattaggccaactcctttttgttaggtgactgagaaaccaaggaccttctgccctttatgcaccagtcactattagtttaaatttgttgctcttccatccacatgattcattccaaatttgaagtgttggagaaagggagttagtatgtcatagaaaaatctctgtttttggctcagcaggactgagtttgactccatgtaactgtctgagtcttagtttcctcatccataacatgggagaacaataccctgaattagagaattctgctgccagaattagagatagttcatgtcaaggtgcaacatataggtaatgtgttattgctggtgttctggttataaaatgtacaagatgtgaaagcaaaagggcagaaaaccctttttaaaaattcatggctgggcgcgctgcctcatgcctgtaatcccagcactctgccaggccgaggcgggtggatcacctgaggtcgtgagtttgagaccagcctgaccaacatggagaaaccctgtctctactaaaaatacaaaattagccgggcatggtggcgcatgcctgtaatcccagctacccaggaggctgaggcaggagaatcgcttgaacccgggaggcggaggttgctgtgagccgagatggcaccattgcactccagcctgggcaacaagagcgaaactccgtcccccgaacaaaaaattcaaatgggaaagagaggcagatggcagagaacaggggaggggctgggcaccgtggctcatgcctgtaatcccagcactttgggaggccaaggcgggtggatttcttgaggtcaggagttcaagaccagtctgaccaacatggtgaatccccatctctattaaaaatacaaaaattagccgggggtggtggtgggtgcctgtagtcccagctactcgggaggctgaggcaggagaatcacctgaactcaggaggtggaggttgcagtgagtcaagatcgcaccactgtactgttgcctgggcaacgcaccgagactccgtctcaaaaaaaaaaaaaaaatgagagaacaggggagggtctagggctcagagctttggagaacagacctcagtagcaccaacactccaggatcaatgctacaaagacacgggttacaactaaactggagaacatggccaaggatgggaactcagcctgagcagggctgagccgagcagggctaagccaagtagggctgagccagaacacttcctccttttttctgaacaatctacctacatttcagctacagggctggctttacccagtccggcgggagggaggagagggctggtctgtgacttcagtgctgaggtttgatcaaggcaaagggaaacttcctattcccagaccctttgcaagaaagaatggcatattacttgccaccgacaggggttattattactaaatggagtcagtataaatgctttccaataaagcatgtccagcgctcgggctttagtttgcacgtccatgaattgtctgccacatccctcttctgaatggttggaaattgggcatctgttcctttaaacaggaaacatttcttgttcgagtgagtcatctctgttctgctttaggagtaaagtttaccctgcagttccttctgtggtgaagttttctctttctctcggagaccagattctgcctttctgctggagggaagtgttttcacaggttctcctccttttatcttttgtgttttttttcaagccctgctgaatttgctagtcaactcaacaggaagtgaggccatggagggaggcagaagagccagggtggttattgaaagtaaaagaaacttcttcctgggagcctttcccacccccttccctgctgagcacgtggagttaggcaggttaggggactcggagactgcgatggtgccaggaaagggtggagcgggtgagtgcctgttgccaaggtggcctcttcaacaggaaaccacaatatttttgtttcttgacttgctctagaaacagggctgtgggggtggggaagcaacttggatctgcccttctgaggacacctctgggtgctgcctggcccaggtctcctgtgtggtttctctctgagccgttgcctctgactttgctactttttcactctgagcagtctccagttcctctgctacctttttgtcctccaagcttccctgccgcctcgaatgcagatacacggtctccctcctgtggacccgtttggagagtccagaagactttatcaatccacttttttttctttttcatttggccctggggccgacggttaagtactttattctgtcattctgtcgaatcacgatgccctgaggtgcacagccccttccccctcttccgtgtctgaagggtttccttttatctctccacccccacccttgccctcctgccctctctcttgttccccaaagacagttctctaatgttttgatgtggattcgtgaatttatctgtatctttgcaaaatgtatttttcttttgtatgtgtacactgttttttaactatgcgatctcaggcaagtaattcctctgtgcctctgttatctcatcattaaatgattaataatgcctccagaggtgactgtgaggcttgaaggagataatacgcatacatcacttactacacgagttagcaattattattgcatattaatactattggtattttattttgctcattctgtttctatttcttttttatttatttattttttgagacaaagt

SEQ ID NO: 935 - DNA, 6000 bp, Homo sapiens
gggtacatgcagggagatgtgtacaggggctaagagcagaaacttttgagtgagacactcctgagttcatgcactggccctgccatttgtcagctaattgatgttgcatttaattgcatcatctgtatgtaagcctaataatttatagccatcttagagatgttgtgagcttaaataacatagtagtgaatatttatttatttgtttatttatttatttagacagggcctcgctctgtcacctaggctggagtgcagtggtgtgatcatagctcactgcagccttgacctcccacactccagttatcctctcacctcagcctcctgagtagcttgagacaacagatgcatgccaccataactgactaattttttaaaattttctgcagagacagtgtctccctatgttgcccaggctggcctcgatctcttgggctcaagcgatcatcctgccttggtcttccaaagtgctgggattactggtgtgagccactgcacccacagcctatttattgagaaatgtggaaggcccaggcactattctaagtgctccagctgttttatctcccacagttttgctcagataggagttccaaagctggagctggaagactcatatttttagaaatgttacagttaattctgaggtgggtcagattgagattcatggctatgcattaatgtttaggtggtgactaaccactcagggttttagagacaaacagaccttattctgtcactcactgactgagcgtggccaagtctttcagcctctctaagcctcagtgtcctcatccataaaatgggaccaatcgtagcatccacttctgagaactgttcagaagtggaaatgagctagtttaggtggctgtgtctggcatacgccaatggtttgataagtattagcttgtgcctttattaggccaactcctttttgttaggtgactgagaaaccaaggaccttctgccctttatgcaccagtcactattagtttaaatttgttgctcttccatccacatgattcattccaaatttgaagtgttggagaaagggagttagtatgtcatagaaaaatctctgtttttggctcagcaggactgagtttgactccatgtaactgtctgagtcttagtttcctcatccataacatgggagaacaataccctgaattagagaattctgctgccagaattagagatagttcatgtcaaggtgcaacatataggtaatgtgttattgctggtgttctggttataaaatgtacaagatgtgaaagcaaaagggcagaaaaccctttttaaaaattcatggctgggcgcgctgcctcatgcctgtaatcccagcactctgccaggccgaggcgggtggatcacctgaggtcgtgagtttgagaccagcctgaccaacatggagaaaccctgtctctactaaaaatacaaaattagccgggcatggtggcgcatgcctgtaatcccagctacccaggaggctgaggcaggagaatcgcttgaacccgggaggcggaggttgctgtgagccgagatggcaccattgcactccagcctgggcaacaagagcgaaactccgtcccccgaacaaaaaattcaaatgggaaagagaggcagatggcagagaacaggggaggggctgggcaccgtggctcatgcctgtaatcccagcactttgggaggccaaggcgggtggatttcttgaggtcaggagttcaagaccagtctgaccaacatggtgaatccccatctctattaaaaatacaaaaattagccgggggtggtggtgggtgcctgtagtcccagctactcgggaggctgaggcaggagaatcacctgaactcaggaggtggaggttgcagtgagtcaagatcgcaccactgtactgttgcctgggcaacgcaccgagactccgtctcaaaaaaaaaaaaaaaatgagagaacaggggagggtctagggctcagagctttggagaacagacctcagtagcaccaacactccaggatcaatgctacaaagacacgggttacaactaaactggagaacatggccaaggatgggaactcagcctgagcagggctgagccgagcagggctaagccaagtagggctgagccagaacacttcctccttttttctgaacaatctacctacatttcagctacagggctggctttacccagtccggcgggagggaggagagggctggtctgtgacttcagtgctgaggtttgatcaaggcaaagggaaacttcctattcccagaccctttgcaagaaagaatggcatattacttgccaccgacaggggttattattactaaatggagtcagtataaatgctttccaataaagcatgtccagcgctcgggctttagtttgcacgtccatgaattgtctgccacatccctcttctgaatggttggaaattgggcatctgttcctttaaacaggaaacatttcttgttcgagtgagtcatctctgttctgctttaggagtaaagtttaccctgcagttccttctgtggtgaagttttctctttctctcggagaccagattctgcctttctgctggagggaagtgttttcacaggttctcctccttttatcttttgtgttttttttcaagccctgctgaatttgctagtcaactcaacaggaagtgaggccatggagggaggcagaagagccagggtggttattgaaagtaaaagaaacttcttcctgggagcctttcccacccccttccctgctgagcacgtggagttaggcaggttaggggactcggagactgcgatggtgccaggaaagggtggagcgggtgagtgcctgttgccaaggtggcctcttcaacaggaaaccacaatatttttgtttcttgacttgctctagaaacagggctgtgggggtggggaagcaacttggatctgcccttctgaggacacctctgggtgctgcctggcccaggtctcctgtgtggtttctctctgagccgttgcctctgactttgctactttttcactctgagcagtctccagttcctctgctacctttttgtcctccaagcttccctgccgcctcgaatgcagatacacggtctccctcctgtggacccgtttggagagtccagaagactttatcaatccacttttttttctttttcatttggccctggggccgacggttaagtactttattctgtcattctgtcgaatcacgatgccctgaggtgcacagccccttccccctcttccgtgtctgaagggtttccttttatctctccacccccacccttgccctcctgccctctctcttgttccccaaagacagttctctaatgttttgatgtggattcgtgaatttatctgtatctttgcaaaatgtatttttcttttgtatgtgtacactgttttttaactatgcgatctcaggcaagtaattcctctgtgcctctgttatctcatcattaaatgattaataatgcctccagaggtgactgtgaggcttgaaggagataatacgcatacatcacttactacacgagttagcaattattattgcatattaatactattggtattttattttgctcattctgtttctatttcttttttatttatttattttttgagacaaagtcttgctctgtcacccaggctgcagtgcagtggtgcaatcacggctcactgcagcctcaacatcctgggatcaagcaattttcccatctcagccttcagattagctgggaccacaggcgcgtgctaccacacctggctaattaaaaaatttttcttcatagagatggtgtctcattttgttgcccaggctggtctcaaactcctatgctcaagggatcctcccaccttggcctctcaaagtgctaggattacatgcatgagccacggtggccatccaggcattgatattatgaggccatcttgacctagccctctctggtgaagagtccttttcagatacttcgttcagtcttctcagctatgagtccctaccctctgaaagcttatattctatttggggaaagacaaaaggcagtttcaaagaagagaggtgtttgattttcttttcctacttttaatatcagaaaacatttcatctaactctcagtatgaaggcaatattttgtttactggtatatccctagagcccaacatggtgagggccccaggatttgcttctttgataagatggtaaacccagctttcagctaacttcatggtttcctcagctacactcatatacaaggatcacctttggtaagatggacttaccatcttaccaaagagtttttgcattttagagttttttctttttagatttttttcattttagaatttttttatttcagagttttttctttttagaggtttttcattttagagttttttctttttagagtttttttttttttttaattttagagtattttaggctgctgagggtggaatctggtgaccttggggccacagagatgctccttggctaaaccaggggctttagctctgaaagttcacagccaccctgagaaccaagatgagagggctctgcagtgtccaatctcaagacctctctgaggtgctccatcaagattcattgaatgaaaaaattaaagtcttaatgatgaacccagaaaaatctttaaatcctaaatatgaaatgaaagtgttcttagttacaatccagtccaacgtccttgttttggaatgtggaaatgaggccccaaaggtaaaatggcccatccaaagtcacagccaggggccagtgctcaggtggccaggtgccctgcgtgcggtctcctggaccaccaggcctttttcctgcagctttagaagctttagaaggcactctgctcactcaggggcaagtggtaagcgctctttcccctctagtgtttgtgactcaggagtttcgaaacaggaagtagagctggctggctgtgcccttccgtccttcattagacgtttgctcttgtcttagatgctcagatggtagtggataggcctgtgacgaaggtgctaccatcgtgagagtaaggtaaggatttgcctctttgttaaggtcagaggggccttttgggaggaaggcctttgattctggagttttctaggctgctgagagtgagatcgggtggccctggggccatggaggtgatcctcgtatgtgagtgtggatggggaaaccatgaagttagtgtaagaggtagcagtccctctgagagccttgccgagggccgtgcagtttccagatctgaaggccattctagcttagactgatgaagtcctaggagcttctgaaatgctgcaagtttaactacttgtataaaggcctcatcctgatcccagtcaaacttgtgaaataatagaagccaaaatttaaatctctactgactttgctgctacagctatcctcccaccaacacacatacccaccaacatacacacttgccaacataaacgcacacacacatacacacaaacacacccatgtggtcctactaattcaattatttattttttaaagaaattaaaaaagactgggcgtggtggctctcgcctgtcatcccagcactttgggaggtcgaggcggtggttcacctgaggtcgggagtttgagaccagcttgaccaacatgaagaaaccccgtctctactaaaaatacaaaattagccgggcatgatggcgcatgcctgtaatcccagctactcgggaggctgaggcaggagaatcgcttgaacctgggaggtggaagttgtggtgagccgagatcgtgccactgcactccagcctgggcaacaagagcgaaactccgtctcaaaaaaaaaaaaaaaaaaaaattaaaaagatacagaacagttcaaaaaacaatataatgggaagactagatagacacaatcagagacctgcacttgtggggttaagaatttacaggtgaagttgcaagtttcattctgtttgaaaatgatgggattatatgtt

SEQ ID NO: 936 - DNA, 6000 bp, Homo sapiens
taaaaaccctagaagcaaaccaaggcaataccattcaggacataggcatgggcaaagacttcatgactaaaacaccaaaagcaatcacaacaaaagccaaaattgacaaatgagatctaattaaaactaaagagcttctgcacagcaaaagaaactaccatgagtgaataagcaaactacagaatgggagaaatttttgcaatctatccatctgacaaacgtctaatatccagaatctgtaaggaacttaaacaaatttacaagaaaaaaacaaccccataaaaagtgggcaaaggatacgaacagacacttctcaaaagaagacatttctgcagccaacaaacatgaaaaaaagctcatcatcactgatcattagagaaatgcaaatcaaaaccacaatgagataccgtctcacgctggttagaatggcaattattaaaaagtcaggaaacaacggatgctggcgaggctgtggagaaataggaactcttttacgctgttggtgggagtgtaaattagttcaaccattgtggaagacagtgtgtcgattcctcaaggatctagaaccagaaataccatttgacccagcaatcccattactgggtatatacccaaaggattataaatcattctactgtaaagacatgcacacgtatgcttattgcagcactatttacaacagcaaaaacttagaaccaacccaaatgcccatcaatgatagactagataaagaaaatatggcacgtatatactatggaacactatgcagccataaaaaagtatgagttcatgtcctttgcagggacatggatgaagctggaagccatcattctcagcaaactaacacaggagcagaaaaccaaacaccacatgttctcactcataagtgggagttgaacaatgagaacacatggacacagggagggtaacatcacacactgtgacctgtcagggggtggggatcaaggggagggagagcattaggacaaatacctaatacatatggggcttaaaacctagatgatgggttaataggtgcagcaaaccaccatggcacacgtatacctttgtaacaaacctgcacgttctgcacatgtatcccagaacttgaagtaaatttaaaaaaacaaaaagaaagaaaaatgtctgttcatgtcctctgcctactttttaatgggattgtttttttcttgttgagttgtttcagttccatgtagattctggttattagccttttgtcagatgtttagtttgcaaatatttttcccattctatagttatctacttactctgttgattgtttcttttgctgtgcagaagctttttagtttatttaagtcccatgtgtctattttgttgcctttgcttctgaggacttgttcataaattctttgcctcggcagatgtaaaaaagagttttttcttggttttcttctgggatttttatagtttcaggtcttacatttagggctttaatgcatattatgttaatttttgtatatggtgagaggtatgggccccgtttcattcttctgcatatagctagccaattttcccagcaccatttattgaatagggagtcctctccccagcatatatttttgttaactttgttgaagatcagttggttgtagatatgtggctttatctctgggttctctattctgttccattgttctatgtatctatttttatactagtaccatgctgttttggttactatagttttaccatgtaatttgaagttaggtaatgtgatacttcaaagctttgttctttttgcttaggattgctttgactattcagctctttttggattccacacgatttttaggattgctttttcaaattctgtgaaaaatgacattcttttgttctgacaattcttaaccccacttcagaccagttttctcatctgtaaaatggagataataataatcttcctcacaggttgtgtattaaatgagatctggaatgtaaagttcttagtatggaaatgctattatttttactgaaaatgttgtagggtctcagtatcctgtgtattgccggatttaaggtccttattttatttctgtcatttctacctcttggtatatgtgaatgctattggatttcaaaagcaaatgtgaaaggattctaatgaaatggtttgcttctttagtgtcatacatgttaaaacataggaaggcaaatgtcaaagtttgtgtttctttttattctatggaaagaaaattaaatatggctcatcaaataataaggccaataatatttaattattgttttgtgaattcgtataaatgagctgacctctctgggctgcagcttccttctctgcaagataagggaattaggccagatgagtgaactgtttctttttcagctaagtttgacccgattactactatttacatagtattaactagatgctatgtagtcatctttaatatgcttgaagacagttattaactcactccttagccttttgttgttgatcatggaaaactactgggtatctttgtttcttctgtgtatattctcagtatgtataatgagtctcagagcctcttgttttaagatctgggtaggctggtggctctagaatatggatgaccttttaggaaaggtcaccttgccatctgtaaattttcccccagatagacttcaggccctggggaaggcatgggttcccctaactggatagaggatcagagccaggaagactgtgtcaaattctagaagtgaatcttctccaggactcagggcatagctttgtcacttacctatagttcagaagtgtgagtgaatcatttccaaggacaaatttctccaaaggaccaaaagatgtgttagtaagaggggttcacaaagactgtgtttgtgggaaaattgaagtgtgaacaaagaaggtctaccaggacaggaaatacttttgatctgtcatttatcagatcaggagggagggacatgaagcctgcctcctcttacagctaggtcatcaaagagtttgactgtagcattttaaaatagcgaagaaaaaaaggtaacaacactaggggtttgttaaacaatttatgatataattagagaatggaatattatgcatcaattacaaataatgtttataaagatacttaaatgacatgggaaaatgttcaagatataacaaataatagtacatatctgatgaaaactataagtaaaacatgatattaaacatgtaaaaatcttaacagaccaacaggtggaaggcagtggaccagaatattagcagtgtttatattagggtggtaagaatgtggatgaatcttgttttaatgcttataatttttctaaacattctcaatgaaatatgccttacttttatagtcagaataaaaagcaatacaagttatcttttaaaacaacccacatacacaaaacccccaactagagtaattgcacaaagcttagattatcaaaaagaagaaaaaaattactggaaaagttttgaagaagtcattgagtacaagatactgacgtaggtgccggaagaagagagcagttggccgtgctggtggaataaccctctctgcaaagggcctgggagttgaagaagggtgcagtcgggtggtggttatgaatctcagaaatcctgccacggagcctccttttgtgccctattacttaaccttgagggacatagagagcatgagacaccaaggggcttttggttgccttactgtcccactaagaacatagaatgttgttttgactttccctttgcttagggaacctcccccagatactcagctggctggctgcttgcacgtagaatgggttttgcaaagttcctagaagtgagttggaggaggcttgacataaatcaagcactgtgtgctaaatgctccagagggctaccttatgtcctacacaaatgttacatttctaatatttgtaactcctttaaacgtttatgcagatgtttcccaattcctcagtagaattcttaccattatctttttgacacaacctgtccccatcctatgaaaatctctcctctgctagagactttattctttctttctctctctcccccttccttccttccctccctccctctttctttctttccatctttctttctttctttctttctttctttctttctttctttctttctttctttctttctctttctttctttcttttctttctttctttctttctctttctctctctttctttcttcctttcttttttctctctccccttccttccttctttccttcttttcttttcttttcttttcttttctttctctctttctttctgtctttcttttctcattctgttgccctggctggagtgcagtggcatgatctcggctcatagcagcctccacctcctgggttcaagcgattctcctgccttagcctccctagtagctgggattacaggtacccaccatgatgcctggctaattttttgtattttcaatggagacggggtttcaccatgttggccaggctcgtcttgacctcctggcctcaaatgatccacccactttggcctcccaaattgctggcattacaggcgtgagccactgcacccggcctgttccttcttaagaacactttgtctcccctttaatctctgctggatttcaagcaccccttttacacaactcttgatatccatcaataaagaataattcccataagcccatcatgtagtgaccgactatttttcagtgacaaaaaaaaagtctttaaaaatagaagtaaaagtctaaagtcatcaaaacaacgttatatcctgtgtgaaatgctgcagtcaggatgccttgtggtttgagtgccttgatcatgtgccctaaggggatggtggcggtggtggtggccgtggatgacggagactctcaggccttggcaggtgcgtctttcagttcccctcacacttcgggttcctcggggaggaggggctggaaccctagcccatcgtcaggacaaagatgctcaggctgctcttggctctcaacttattcccttcaattcaagtaacaggtaaacaatgttaatgtctttctttctgtaaatattttttgaggtcttccaattggcttagtttattttaaatttctaacaatgtgtgaaatttgaacatttgaagtgtagttttgctgtaatagggcaatgtgttattttgaaaatcattgattctcagactacaatatagtatcttaacaaaagtcccttggaaataaattttctaagctattagtttctctagctattagttgatagtgtcccaagaatttattattattattattattttaaattgagatggggtttcactatgttgcccaggctggtctcaaacttctgagctcaagcaatccacctgcctctgcctcccaaagtgctagggttacaggcatgagctaccatgcccggccaataatttttaatttatgtatcgtttctttctttctttctttttttttttaatttaagaaagctgctgtaagtagattggctctggaagctctgaatttaggttgcctatgttcctaacacaggtccaattctcactaggtaagcttaggcttagctattatttaaactctccaaacctcagtttccttaactgtaaagtgggaataataataaacctcacctcaaggtcattgtgaggtaaaatgaaataatccatgcgaagggcttagctcagtcaggcttcaagataaatgtgaactgtaattactctatctacctgaattgaatgagttccaacatgaattctggagtcaccacagaagctgctacaacaccaatattaataaattagttttcttttacaatcggccaaaatgtattttcttagattaaaattctttaagttcccaatgacgatgatgaggaggataatacatctagcactttgagcagcacacagttctcgtaactagaaggtaggtattacagttaacttcatttcagatgaagagactgaggg

SEQ ID NO: 937 - DNA, 6000 bp, Homo sapiens
agtttagttttcatctcaatttttttattccagatatatgaggaacaaagaaaaccacatgaagaaagcataagagagttctcacctgaatcccgttcgtagaacatgaacattcttgcatggttccattgcctctaaaacagttgacaaaactgaaaggcatatctcatcacactcattgatacgttcctattgaaatataattacaaaaacactacaggtgatgagcccatagtaaactatcttacccaagcaaaaccactgaactgatgtactgaataaaacgattgagtatcaaaccaacaattcctacagtcagtccacaataaacagcatctttgggaaataaaaagtcatacttactgaattttccagctgactgatacacatccttttatgcatcaacacttttttaccttcaccattatcactgaaaacacatttgatatttattatattccactgcttctgaaacaacttttattaaacattatttttacctcttcttggaattcaaggtcattacaaaggcaaaaacagttaaagtgcaggaatataagaactactgaagtacagaaggtaactagcccatctctaaagatccttaaatggttgtgcctttacaatttccctagatcctttcctgggtatcaagctgaaactttacttgtgagtcttctgattcacatctcctgccacattctaccactgctatctgggtctcaagggaagcctacaccccacagattcttctttcaggtccctttacttagggtactaagtttgattccagaaatagtgggcataatctggaaagtgaatagtaacaacacagcttaactagcagtactctacagtttaatcactagtctataaacctcacaaaaaatcacatctgaggaaacttagcctgaagagagagaagctcttttgctaaaattacataaccaatgaatcacaaagtcttaagtcagaaccaggtaataataagaaatggttatggttagaagaaaaaaaaggtttctttcctatgaaagggtttccttaacaattttacagcattccatccatatctactatgaaagaaaagaccacttgtctatgtgtttgaagggcaaattcattgatggcacactgtcctttcacctctaaaatgtctttacattattccaacaggtcagtgagacaccatcatccatacagatgttttgactacaaaaatctactactcatacctcaccaacacagatgtcatcccgatgcaaatatctgtccaaaatctagtaagagcatcactgaccaggtaaggtgatttattagtcacttttaaataactacataggaactaatacacagcctacaaataaacagggatattctgtggtttaaacaaatacacacacatacactaaataaaaattagttattccttaaggacatatggaaatcacagtaatgtaaaaagttaaaaactttcccatagctatgaacccaattattgaattctatagcaagacaggatatatgccagattatccccaaggaattcctgtcttttaaaaaattattattattattttcagacagggtctggctctgtcacccaggctggagtgcagtggcacgatcatggctcacggcagcttcgacctcccaggctcaagtgatattcccacctcagcctcccaagtagctgggaccacaggcaagtacatcacacccagctaatttttgtattttttgtagagatggagtctccctttgttgcccaggctggtcgcaaactcctgggctcaagagatcctcctgccttggcctcccaaagtgctgggattacaggtgtgagccaccacacctggctaagaaattacttcattatcactgagtttatacgtcagaagtgtacactcttaaaacataaatgattaacaagctaatccttccttccttacatttggcaccatttcagtgacattaaacaggacactgacattcttgctttagactaaaaatggctccctccatccaattttaaccttcttccaatacatcttccactcattcagtgatctaaaatacaaatttgagcacgtcaacccattgcttaaaattcttcaacggattcccattgcctacaggataaatgcatactccttagctagccgtaagaggctctttatgatttggttcctatttttctggcctcttgttctgcccctaagcctcttgcccctcactcctctcctttgatcgccatgtacaaaacttgttcccacccactcaaacatacaactccatcattctgtgcttcagctacaccaaactactttcagctcttcaaatttgccaaacttttcctctgggaacagtagggcatgcaatcctctctacttgaaacaccatccccttcactatcattctgctcatcagtttaggtatcatctactgggcctgaattccaattctaccatggactaaattctcttccttccccttcccttctctccttcttcaactacccaggctttctttgtatatcttgcatctctcctcactttagcttcttcaccactactcaaccctggggatggtaaatgtggaaggctttcataaatttccatagcaaaaggaagaaaatagctaacttaaggcctctaaatcatataatatatatgcagaaataaatataaaggaaactaccattccatttgatagtctcttttaagaaggctacatatctatatcccttcattctttcaaaatattctaaatcaagtaaatgcatgtttaaatctcctttttattttacctgggtcaccctcagcaaagtctgcaccaaaatagtgttctgagggattccaagcttcactatggcgtgaagactgaacagtaggtacttatactgcatgatcttggcttctctcatcatatgttcacagagctgattaaatgcagggtggctaaacatcagtcgtttttcaaagcgcttctggtcatcagacagtcttttggcaattgtccacattgctgtgaaatagttgctactaggaaatgtgggcgcttttgaaaatgcatctaacacatcactcagggaattacattcctcagacagttttctactgctgatacggtttggttttgtttccttggtaagaacatcttcattggagacttcatgattaaggtttactttcttcaattcatcatcagatttatcaacagggacaagagactgctttgagtcaaaaaacagtcttttagcataaagtagtctttcaattctaagggctgttagagtgcttatgccctttgtttgaaagccaacatctgatttaaaaatgaatgcatcctgaaagagatatctaatgatatcagttgattgcattctgttatgaaagttatttaaaatgttccagtttgaatgaactatttttggtttgcaaagtcccaaacaacatagcctcatagttctgcttgttgaaactaatgtactgaattgtctaaggttccagaaaaaggagcccgctttgttattcattttgctctccactgaaacacttccaaatggcttcaaagttgtcaacatgaaaccaacgtcacttctactagtgaaaaagaacacgtgctgtcgttttcctgtaggggaagaagtaatgaaaagaataaaaattaaaacaaaacttttacttaaagaaatgaaatgcatttaacagaagagaaaatggggaacctatggagccattaaacatttacataaaacagtaaaagttttttttaccaatgtgggctccctccaatctaccacaatgtgtccagtttcaaagaagccaggtcactttggaagtagtcattgtattaatgagatttttctggtgcaaaagcgttccataaagctttctctgtaggagagacttttgttggcattgttatggaaatgtcctcggtgaaaattaggggattagcattgatagatcattttcttttctcttctctgttttttttttttttttttttttttttgagacaaagtcttgctatgtcccccaggctagagtgcagtggcgcgatcttggctcactgcaacctccacctcccaggttcaagcaattctcctgtctcagcctcccaagtagctgggattacaggcgtatgccaccacgcccggctaatttttgtattttttgtaaagacggagtttcaccatgttggccaggctggtcctgaactcctgacctcaggtaatccacccgcctcggcctcccaaggcgtgagtcaccgcgcccggctgatagatcattttcaacatgacgatttagcaacggccgaacccagaccatcaagaatagggacctgggcaggtagaacggctcagtggaagaagcagaaaacgaaagcgatgtctgcacgtggcctgcgcttaagaggaagatcttatacaaccagccagcctcaccagaccccagaaccaacttcaagagcctgtccttccgcagctgggccgcccagcattaacccacctcctttaaacttacttccaggacaactcgtgagactcttctcctcgaagtaaaaagtctaggatgtgatacgggctgccgctaagcccaagctcgtcctccactcaccttagagcacaagaccgtgactacgtacaggagcagccatgacagcttccccgagaagctgcgcttctcacgagatcttacggattccctcaaaggtcaaaaagcatatgttcgcggctgtagctgaaggacttacttgaagaaagtttaccaaggagaatgactaatttccctgcatacaggagtggggctcggggataccacagagcttataagggcgatgtttgatcgtgtatcgcaacgtaacccattcaggtcctaactttaaacacctaacctctgctgggcgccagactttgtagtgcgcctgcgccttgcccttggctgcgtggttgccaggaaaccgcgaagccgcggtccctgcctctgagtctctctcgaccatggccaaattcgtcatcgcgggtgagtgatccccgcgtccgcccgcagattgctcaaaacgccgacaacagctcacctcccatggccgctcggcttggcagcctctatacggaccgctccatgctttgctatagatttattcaaagttttttactggaccgtgacggtgcgccaagcattgtgggacactggggatgcaatggagggaaacatatccctgccttagaggagctttcagtctcatggggcacagaacatgtacttttgatacggtgtgattaacgcgatgaaggagacctgcacaggcctctgggagcgtagactcctaatctgggtttgggggatgagggagaggtggacacaaggaactggctggggaaggtattacaggagctgagttgtgaaggtgtgagctgaggaggctattccaaataaaagcagagaggcaggaagcttcctggcctaacagaagatctggatatgtggggcgtgacaggacctggggctacaacaggagcaggagccaggtccttgcatttcatgtaggtcaagcaaaggtgtttgaactgtatcctgaaagcaatgaggaattatagaaaaattttaagcaggagagtagtcttaatgagtttgcattttaggaagcctgtcttggcagcaacggagagaatgattgaaagtgctggttgacagcaaggactcaactgagaaggcttttattacaacaatccatggtacctacctcctctcctcgtaaagtttcttaaaagagtagactgctcttccatctccagttctgccttccaatcagtcttggaagaaggcttctacttctgcttcctgacagaaactgctgtcaccaaagtcaccactgacttttatagaagctgtttagtctttgacttatttgatctctttgatgcattgaacacaattgacatctaccatccacaggagatttttttttttttttgagacaggctctcacttt

SEQ ID NO: 938 - DNA, 6000 bp, Homo sapiens
ggggtgcagtcaaacttattctacttattgattagggtctcatttgttctactaggtattagggaaaaaacataaatattattttgagactggtaagtagggacttgttttactagtattcaaatatcactagcacatgaacagtcattcctagaagccagtctaatacaccagttaatatttaatcaaattaaaacacattttgtgcatgagtgagttcaacaaactataaaggcttcttacctcccaaacctcaggacgttgtgtgattttatgtatccgaaaatcaggaagattcttttgtaaatagtctgccacaagttctgttttagcataatatggacaatctgctctacctaaaagagttcaaattagcaatgttttctttcatcatgcagaaattattatgtagttctaagtatttgctatgtaattacagaattagtcatagttatgatataatttgataacataaagttgcagtataaactgctattacataaacttctgatgtttattagattaatacaaataaaataaacttcataggaggtcagaatcttaagtaacaaaatgtggaaagaaaaaaaaccctactgaatatttattcttttctagtaatatgctagacctcacttcctctaggaggctgctaactactactaattcagcatgaattagtactgataatgaactactcactaatggccaccaaaaggtaaagtttgaagtgaggagtggtggtaaagtcacttttggatttgatgtgtgtcaggaagttgtgggggtgggaaagaagaatctgggataacttctattttccggcttgggcagatgatgctgaccttaactagagaaaaatcatgaatgagaaatttaactttagtcaagtgcagttggagatacttgtagtgtgtctaagtggatatgatcagcaagtagctggatatatatgtatatgtatatgtacatgtatatgtatatgtatacatatatatggggtgcaggtgccatgtaagggtttcagacacacaatttgtagccatcaacacccaggaagttaaagccactacaacagatggaattgggcatctgatagagcaggagggatggggaaaaatgcagagccctctctgtagcattcttcctcagttaagataacttaactcctaagttaccaacctgtctgaagctacccctgtctatcagccaccctgtctagttcaaatctatggttcatctcttcaaaccactttctggtccatgtcttaaattatctttctccactatccttttgggaaatgagcctgataaaagccccttatcctggatgaactcaattacttgccttttctgtagctgggtcctacctgctagccaccactacagaaacattgtagaaccaagcggagggcacctttaaaattcatggtcaccagctttaattggccctcaaccctgcgtggagatccctctgtttcccttatcagcactctcttctgttctcctcattactattccagtctttttcctcttcctccaaatcttttccttctccccaacattcctctgcattatcagaacacaacagacaactttgctttttactttacaaaaaccaacccaaacaaaacaaaatggcattagtttggaaaatctccaacctcgtccatcacatctacatgcctgtctgtacttggactcatcctttcctcctttcttcatttcaatggaagaggagtcctacctcctgtctaatctaatcccaccacttatgctctgaatcccatcctcatctgccttcataggaaccttgcttagttaattatcctctctttctagagtcttgtatctgtttctaatagtccctttctgtcatatttaaatatactcattacattatgtttctcctgtcctaagagacaaaaaactcatctccccctctagctattgcctttcgtatgtcctttttgatcaaaatatcttgaaagagttccctatatttgccatcctcagttcttcacttccatttatttctcacccactgcaatgtagcagaccccacaattctcttgaaggtcactgaagacttccatgccactaaatccagcagatactttccgatccttttcttgttgacccttggcagcatttgccaccactgcccccttccaggcttttgaaacactgctatagtgggggcattctcccagttctcctattctatggtcactcctttctatcctttgtaggtttccattcctttatcaacccattaaaaggtatcattctgagaagcatcttgtctttataacttacatattctttttggccaatctgcttcattcccttggcttcaagtagcaatctatatttccagctcagatctccttatctagatgcctacaccctcctgtattttcccatctccttcaaaatgtctcatagacactcagaaggtctatgatgtattttgtcaccattcccctactaaatgtgcttagtcgcttatatttattatgtccatctccctaattatctaagagtagtaagagtatccagagtattaaacctactcatccgcttttttttttttttcagtgactcctaatctctgcaattattcaaacctctgcttgggaacaatgtttaactcctttttctcccttatctgccctcctccagtcaattagacatccagttctatagattctgcctccctaatatctctccaatccattcacttctctccatctccattgtttgccactctaggccaggtcacaatcaactccctcctggactatagcactagtctcctaactggtttcttggtatccagtctttttgtcccacactatagccgtaacattcagataaaattcagatttgattaggccctcctccccttctaaaaacctttcatgtactctggataaagtctaaactactgaatgtggctcaaaagaatctacattatctaactctagcctcaccttatgaaattctcttccttgtactatttgcttcagtcctaataaacttatttcaattttatacttattttatattctcaattgtcaccaaactagttctccttgctctaaccccactcccagttacccatgcctaaattgctcccctcctttctacctcttctctgttaggtaattcattatcatctttcaggtatctgcttaaaatctctccctctgggaaacccttacctgattaagtaaggtccctgctatcgttcctatagaaccctgccctgtcagtgtcatacatgcaacattctctgtgtgttttccactgacttcccaccatgtggttagtcagtgttcaaaaatattcttctgggccaggtgtggtggtgcatgcctgtaatcttggcactttgggaggtcaaggtgggcaaatcacttgagcgtaggagttcaagaccagcgtgggcaacatgacaaaaccccatctctacaaaaatacaaaaattagctgggcatgctggtgtatgcctgtagtcccagctacttgggaggctgaggtgggaggatcgcttgagcccaggaggtcaaagctgctgtgagccacgattgcaccactgcaatccagcctgggtgacaaagtgagagcctgtctcaaaaaaaaaaaaaaatctcctgtggatggtagatgtcaattgtgttcaatgcatcaaagagatcaaataagtcaaagactaaacagcttctataaaagtcagtggtgactttggtgacagcagtttctgtcaggaagcagaagtagaagccttcttccaagactgattggaaggcagaactggagatggaagagcagtctactcttttaagaaactttacgaggagaggaggtaggtaccatggattgttgtaataaaagccttctcagttgagtccttgctgtcaaccagcactttcaatcattctctccgttgctgccaagacaggcttcctaaaatgcaaactcattaagactactctcctgcttaaaatttttctataattcctcattgctttcaggatacagttcaaacacctttgcttgacctacatgaaatgcaaggacctggctcctgctcctgttgtagccccaggtcctgtcacgccccacatatccagatcttctgttaggccaggaagcttcctgcctctctgcttttatttggaatagcctcctcagctcacaccttcacaactcagctcctgtaataccttccccagccagttccttgtgtccacctctccctcatcccccaaacccagattaggagtctacgctcccagaggcctgtgcaggtctccttcatcgcgttaatcacaccgtatcaaaagtacatgttctgtgccccatgagactgaaagctcctctaaggcagggatatgtttccctccattgcatccccagtgtcccacaatgcttggcgcaccgtcacggtccagtaaaaaactttgaataaatctatagcaaagcatggagcggtccgtatagaggctgccaagccgagcggccatgggaggtgagctgttgtcggcgttttgagcaatctgcgggcggacgcggggatcactcacccgcgatgacgaatttggccatggtcgagagagactcagaggcagggaccgcggcttcgcggtttcctggcaaccacgcagccaagggcaaggcgcaggcgcactacaaagtctggcgcccagcagaggttaggtgtttaaagttaggacctgaatgggttacgttgcgatacacgatcaaacatcgcccttataagctctgtggtatccccgagccccactcctgtatgcagggaaattagtcattctccttggtaaactttcttcaagtaagtccttcagctacagccgcgaacatatgctttttgacctttgagggaatccgtaagatctcgtgagaagcgcagcttctcggggaagctgtcatggctgctcctgtacgtagtcacggtcttgtgctctaaggtgagtggaggacgagcttgggcttagcggcagcccgtatcacatcctagactttttacttcgaggagaagagtctcacgagttgtcctggaagtaagtttaaaggaggtgggttaatgctgggcggcccagctgcggaaggacaggctcttgaagttggttctggggtctggtgaggctggctggttgtataagatcttcctcttaagcgcaggccacgtgcagacatcgctttcgttttctgcttcttccactgagccgttctacctgcccaggtccctattcttgatggtctgggttcggccgttgctaaatcgtcatgttgaaaatgatctatcagccgggcgcggtgactcacgccttgggaggccgaggcgggtggattacctgaggtcaggagttcaggaccagcctggccaacatggtgaaactccgtctttacaaaaaatacaaaaattagccgggcgtggtggcatacgcctgtaatcccagctacttgggaggctgagacaggagaattgcttgaacctgggaggtggaggttgcagtgagccaagatcgcgccactgcactctagcctgggggacatagcaagactttgtctcaaaaaaaaaaaaaaaaaaaaaaaaaacagagaagagaaaagaaaatgatctatcaatgctaatcccctaattttcaccgaggacatttccataacaatgccaacaaaagtctctcctacagagaaagctttatggaacgcttttgcaccagaaaaatctcattaatacaatgactacttccaaagtgacctggcttctttgaaactggacacattgtggtagattggagggagcccacattggtaaaaaaaacttttactgttttatgtaaatgtttaatggctccataggttccccattttctcttctgttaaatgcatttcatttctttaagtaaaagttttgttttaatttttattcttttcattacttcttcccctacaggaaaacgacagcac

SEQ ID NO: 939 - DNA, 6000 bp, Homo sapiens
gtatacatatatatggggtgcaggtgccatgtaagggtttcagacacacaatttgtagccatcaacacccaggaagttaaagccactacaacagatggaattgggcatctgatagagcaggagggatggggaaaaatgcagagccctctctgtagcattcttcctcagttaagataacttaactcctaagttaccaacctgtctgaagctacccctgtctatcagccaccctgtctagttcaaatctatggttcatctcttcaaaccactttctggtccatgtcttaaattatctttctccactatccttttgggaaatgagcctgataaaagccccttatcctggatgaactcaattacttgccttttctgtagctgggtcctacctgctagccaccactacagaaacattgtagaaccaagcggagggcacctttaaaattcatggtcaccagctttaattggccctcaaccctgcgtggagatccctctgtttcccttatcagcactctcttctgttctcctcattactattccagtctttttcctcttcctccaaatcttttccttctccccaacattcctctgcattatcagaacacaacagacaactttgctttttactttacaaaaaccaacccaaacaaaacaaaatggcattagtttggaaaatctccaacctcgtccatcacatctacatgcctgtctgtacttggactcatcctttcctcctttcttcatttcaatggaagaggagtcctacctcctgtctaatctaatcccaccacttatgctctgaatcccatcctcatctgccttcataggaaccttgcttagttaattatcctctctttctagagtcttgtatctgtttctaatagtccctttctgtcatatttaaatatactcattacattatgtttctcctgtcctaagagacaaaaaactcatctccccctctagctattgcctttcgtatgtcctttttgatcaaaatatcttgaaagagttccctatatttgccatcctcagttcttcacttccatttatttctcacccactgcaatgtagcagaccccacaattctcttgaaggtcactgaagacttccatgccactaaatccagcagatactttccgatccttttcttgttgacccttggcagcatttgccaccactgcccccttccaggcttttgaaacactgctatagtgggggcattctcccagttctcctattctatggtcactcctttctatcctttgtaggtttccattcctttatcaacccattaaaaggtatcattctgagaagcatcttgtctttataacttacatattctttttggccaatctgcttcattcccttggcttcaagtagcaatctatatttccagctcagatctccttatctagatgcctacaccctcctgtattttcccatctccttcaaaatgtctcatagacactcagaaggtctatgatgtattttgtcaccattcccctactaaatgtgcttagtcgcttatatttattatgtccatctccctaattatctaagagtagtaagagtatccagagtattaaacctactcatccgcttttttttttttttcagtgactcctaatctctgcaattattcaaacctctgcttgggaacaatgtttaactcctttttctcccttatctgccctcctccagtcaattagacatccagttctatagattctgcctccctaatatctctccaatccattcacttctctccatctccattgtttgccactctaggccaggtcacaatcaactccctcctggactatagcactagtctcctaactggtttcttggtatccagtctttttgtcccacactatagccgtaacattcagataaaattcagatttgattaggccctcctccccttctaaaaacctttcatgtactctggataaagtctaaactactgaatgtggctcaaaagaatctacattatctaactctagcctcaccttatgaaattctcttccttgtactatttgcttcagtcctaataaacttatttcaattttatacttattttatattctcaattgtcaccaaactagttctccttgctctaaccccactcccagttacccatgcctaaattgctcccctcctttctacctcttctctgttaggtaattcattatcatctttcaggtatctgcttaaaatctctccctctgggaaacccttacctgattaagtaaggtccctgctatcgttcctatagaaccctgccctgtcagtgtcatacatgcaacattctctgtgtgttttccactgacttcccaccatgtggttagtcagtgttcaaaaatattcttctgggccaggtgtggtggtgcatgcctgtaatcttggcactttgggaggtcaaggtgggcaaatcacttgagcgtaggagttcaagaccagcgtgggcaacatgacaaaaccccatctctacaaaaatacaaaaattagctgggcatgctggtgtatgcctgtagtcccagctacttgggaggctgaggtgggaggatcgcttgagcccaggaggtcaaagctgctgtgagccacgattgcaccactgcaatccagcctgggtgacaaagtgagagcctgtctcaaaaaaaaaaaaaaatctcctgtggatggtagatgtcaattgtgttcaatgcatcaaagagatcaaataagtcaaagactaaacagcttctataaaagtcagtggtgactttggtgacagcagtttctgtcaggaagcagaagtagaagccttcttccaagactgattggaaggcagaactggagatggaagagcagtctactcttttaagaaactttacgaggagaggaggtaggtaccatggattgttgtaataaaagccttctcagttgagtccttgctgtcaaccagcactttcaatcattctctccgttgctgccaagacaggcttcctaaaatgcaaactcattaagactactctcctgcttaaaatttttctataattcctcattgctttcaggatacagttcaaacacctttgcttgacctacatgaaatgcaaggacctggctcctgctcctgttgtagccccaggtcctgtcacgccccacatatccagatcttctgttaggccaggaagcttcctgcctctctgcttttatttggaatagcctcctcagctcacaccttcacaactcagctcctgtaataccttccccagccagttccttgtgtccacctctccctcatcccccaaacccagattaggagtctacgctcccagaggcctgtgcaggtctccttcatcgcgttaatcacaccgtatcaaaagtacatgttctgtgccccatgagactgaaagctcctctaaggcagggatatgtttccctccattgcatccccagtgtcccacaatgcttggcgcaccgtcacggtccagtaaaaaactttgaataaatctatagcaaagcatggagcggtccgtatagaggctgccaagccgagcggccatgggaggtgagctgttgtcggcgttttgagcaatctgcgggcggacgcggggatcactcacccgcgatgacgaatttggccatggtcgagagagactcagaggcagggaccgcggcttcgcggtttcctggcaaccacgcagccaagggcaaggcgcaggcgcactacaaagtctggcgcccagcagaggttaggtgtttaaagttaggacctgaatgggttacgttgcgatacacgatcaaacatcgcccttataagctctgtggtatccccgagccccactcctgtatgcagggaaattagtcattctccttggtaaactttcttcaagtaagtccttcagctacagccgcgaacatatgctttttgacctttgagggaatccgtaagatctcgtgagaagcgcagcttctcggggaagctgtcatggctgctcctgtacgtagtcacggtcttgtgctctaaggtgagtggaggacgagcttgggcttagcggcagcccgtatcacatcctagactttttacttcgaggagaagagtctcacgagttgtcctggaagtaagtttaaaggaggtgggttaatgctgggcggcccagctgcggaaggacaggctcttgaagttggttctggggtctggtgaggctggctggttgtataagatcttcctcttaagcgcaggccacgtgcagacatcgctttcgttttctgcttcttccactgagccgttctacctgcccaggtccctattcttgatggtctgggttcggccgttgctaaatcgtcatgttgaaaatgatctatcagccgggcgcggtgactcacgccttgggaggccgaggcgggtggattacctgaggtcaggagttcaggaccagcctggccaacatggtgaaactccgtctttacaaaaaatacaaaaattagccgggcgtggtggcatacgcctgtaatcccagctacttgggaggctgagacaggagaattgcttgaacctgggaggtggaggttgcagtgagccaagatcgcgccactgcactctagcctgggggacatagcaagactttgtctcaaaaaaaaaaaaaaaaaaaaaaaaaacagagaagagaaaagaaaatgatctatcaatgctaatcccctaattttcaccgaggacatttccataacaatgccaacaaaagtctctcctacagagaaagctttatggaacgcttttgcaccagaaaaatctcattaatacaatgactacttccaaagtgacctggcttctttgaaactggacacattgtggtagattggagggagcccacattggtaaaaaaaacttttactgttttatgtaaatgtttaatggctccataggttccccattttctcttctgttaaatgcatttcatttctttaagtaaaagttttgttttaatttttattcttttcattacttcttcccctacaggaaaacgacagcacgtgttctttttcactagtagaagtgacgttggtttcatgttgacaactttgaagccatttggaagtgtttcagtggagagcaaaatgaataacaaagcgggctcctttttctggaaccttagacaattcagtacattagtttcaacaagcagaactatgaggctatgttgtttgggactttgcaaaccaaaaatagttcattcaaactggaacattttaaataactttcataacagaatgcaatcaactgatatcattagatatctctttcaggatgcattcatttttaaatcagatgttggctttcaaacaaagggcataagcactctaacagcccttagaattgaaagactactttatgctaaaagactgttttttgactcaaagcagtctcttgtccctgttgataaatctgatgatgaattgaagaaagtaaaccttaatcatgaagtctccaatgaagatgttcttaccaaggaaacaaaaccaaaccgtatcagcagtagaaaactgtctgaggaatgtaattccctgagtgatgtgttagatgcattttcaaaagcgcccacatttcctagtagcaactatttcacagcaatgtggacaattgccaaaagactgtctgatgaccagaagcgctttgaaaaacgactgatgtttagccaccctgcatttaatcagctctgtgaacatatgatgagagaagccaagatcatgcagtataagtacctactgttcagtcttcacgccatagtgaagcttggaatccctcagaacactattttggtgcagactttgctgagggtgacccaggtaaaataaaaaggagatttaaacatgcatttacttgatttagaatattttgaaagaatgaagggatatagatatgtagccttcttaaaagagactatcaaatggaatggtagtttcctttatatttatttctgcatatatattatatgatttagaggccttaagttagct

SEQ ID NO: 940 - DNA, 6000 bp, Homo sapiens
accacccccaaggccaaagccactgagacacaatcctcccctcccccctgccgtctcctgctgcaatgatcctttcctggttcagcatttcttttcctttctttctttctttttgcgtttgtacccttaaagtttgaggatggcttgcggcaggtgaaggggaagcaagctgcacttctgtctcccatgggggagattttttttcttagtgccgacagtgcacagccgaaaaggaatggggatctgtacccctagaagacagagggtgccagcactctaagaacccagatcccttcaatttgtaacccagagcttgggttcctttcaattcccaggcacacacaggttaaaccccctcacatttgaaaatcaacttcaaacaaatcaaaccagtcaacacacagacatatttataaggcagccaatgtgggggcaattttggagggccgttgcccaaaagagtactctctctctctctcctttaatgcgaggaaactccggagaccagggcctttcctgagggcataaaagctacttcaacttctgaagattcaagtaccctctatccccggccctacaattgctcagagatgcccagtctcatacatttaatggcaacagagtgagagcttcccctgccccctacaacagagcacaattcacagttctagaatcccaggggctgaaagtggttaagaaagaaagatttacaaaacagaaaaactaagcagaatagaaatgtttgttttgattcctagtgtccctctggtctttcagttccatgtcgttactcaggcgcagagacaccgcgcatgaagggaccttgatccgagctgggcttggctgccgtcagatcaccaatgtcagctagccgatgccctccaagtcacccagcaagtgcgccgcccaaggcgccaccgcttacctcgctcgctcaggatgccgtcgatgctgtgtttggccttcttctcgctttcctctgcctccttcctctccaagtcggcctcctcctcttcacctttcccgaatttacttctcaggatgcggctgatggaactcactgggggcgggaggaggaaggaagcaagggagcgcacatggttgagacaagcagggctgtgcgggaaggaccccccacccccaaacaccagccagggccctagagccgctgccctgcactgctcgcgggtgtctcctcctgcatctctggacatcctcatccttctccagccctctcatcctgccactcaaacccccctccctattatctgtatctcggtactgaaagacggaggctgggaaaaccgtgcctccaagttagggccggatgccatctttgtccctcgattctgggcaggaagcatttcccttcctggactccgaagaccgggctctaggtctgcaatctaagagaattctcccaccagcccaccgggtaccctccttcctccccacctgaatgcatggatcctgcggttcgccttaagggaggaagaaccaaagccgacttgtccgcgcccccccccacccccccgtaaatcaagtttcttttttttcctttcttcccttttttttttttttttaaggctataaagggtttaaatttcaactgcagaatcgtttcctattgtaaaaatcaaaagaaaatgcactctctcccacttattttttccagattccagtctggtaaacaaatccatgctctgaaatatgtttctcacagagggaaaaagggagtttccttttaattaaaaacaaaccctcccgtgcgccctctcgctggccccgtgcttgcccctcttctccctccgcctcccccaggctgccgtggcggggggctccggaccgtccctgagactctcggaggaaatcggggccgttgtggaagcctccacggctttgcgcacacggcaaagtccctcccggcgcgggccccatctcccttcggttggggttaccaaaacatttgtttctctttaaaagggaacatcaatattaataaacgctctgcctccgcctcacgtttcctgccctgcctcctcgacagaaatcttctttggggcgtcctcagcggtggtctcgccaccctccgtccccaggacaagcagctcacccctccctccataaagtgccaagaacaccgggttggcaaatattgcagggcctcgggagaggccacctcccaatagctgagatcgataattggggtgattacgtctgggtcgacgtgccggggtaatagcgactgactgtcgcgcctcggggagaggttaatgggcctagtacctgacggcacggtgtttcgatcacagaccgcgtccttgagtaatttgtctcggatttcccagctgaacatgcccgggttctctcttttgtattcctcaattttcttctccacgtcaggcgttgtcacctgctttaagagaacaggcgggcaggcgttggtacccggtaccctgggccaggtggcggcggccccaccgcctctgggcctgtcgggatgctcctcgctgaatcctctgggacggtccccctttgtgagcaaaaagacctgaactctctgaggcactttagaaaggggcagaccagaacacatcccatcccatcccggagcagcctgggaagcctctaacttccccagacaagccccagacaaccgggataaattcagaagaattataacatcttgatgggggtagggtggggttatactttctcatccctggaaataaggcaactgcttacacagaaccaacatgaaaacgaaactaaaaaagcgatgtttgaaaaaggagctgaaaaatcaagttaaatctgcaacttgtgcttttccaaagggatatttatgctaaagtgaagactgaaatgtaaaggtatgtatttgggtttttaaaacttcgagtcgataacaaatattaattaagagagactgactcttctctctacccccaatatatattttttaaaaagaagaagaaggttccaaagattcttagaaaggctgtgaaagtgtttcagtaggtgggaaggaagaggagggtgtttggaggtcttcggtttaccataaccctcttgattttgcccggtggcaactagaagaaaagacagaccttgtgtaattccctcccactcagccctagctggtgtgactctttctttttaaaaacagaaccaaaaataatttaaggatagcaccaaactgcttatttttttttaatggagtcattggcttattacaaagaaaactgatcaccctagtatttgactcattgaaaacaatttgcactgggggagactgagggcggggtttgggagacaaaccattataaaacctaaagaagttccttacattcgttttggaaaggacggtgccatgggtgggagccgggaagacacttagggaagaaatcggcaacaggtgggcacatagagcttgcctgctttaggtgtttatccattaaaataatttgatgaggattgcaaggcttatgggctttaaaaaacagatgttatttttcctttgcaaaaaggcaagagctttccctaagtgttcatcaagaagtgtccagggcgcgtgcacacgtacacacacacacgcgcgcctttacgcaccttcacaaacctcagaaataactcattggagagccccagatgtcagccgttaccccccgcccggtcttccccaacacaggggaccacagtctgggagccaggagggcaaggcccgcccgctcaccttgggcttgctgccgccgatggcaccaggacgtatggagccagtctcctggtacctgcacaggatcttggagacgcagccgtgggacacgcgcagctggcgcgagatgacgcagggccggatgccgtggtgggccatctccacgatcttgtggcggatgtggttgggcagcggcctgccgttgataaaaacaccgccgagctggttgacgcggccctggccgaggggagtggacactgtgggaaggtgaaaaagagaagcaagggaaaagtcactggaggaaaataaaaagcaaagaacagcagcacgtaatttcgcagtcttctgtcctatcctcatgttacagcaccgacgctgaaactgctcgacatcggactcccagacccagacctcctttcaatcacatttgttcaaattattcagcaatatagcgcatgtaatcttgtgtaaagacagcaaatggggcaaaataattctccccagagaaagcgtcttccccttcgggcccggggagtggcaacttaggagaccctgcagctggtagagagtctagcttgctctagaaacagcctcctggcgaagagaagttcacccaggagctggccttgatgaactctgctcccaccgatccctgtccaattgggatctctccctttctaagggacttgggccagctgatagcccttggggtttctagccaaaagtgcagcagccaagggtcaaagagggtccagaaaggaggcccaagcagcagtgcctgtgtcacctgttacatcttgggacagagaccacagcagcggcagggctgttcctgggcccccagcccccattcttgctctgggtgttacattctactctaggctgggtgtgaagggagtgggtggcgggggcgatgagcatctctgctggggcgccctaacctggaaaaccattgaaaacggctcaggcttgcaagacttcctgcctccccgggattcccagaatcttcaagtggacggaaaggcgattcctaaacaagttatagaaacttctagatgctatttgagatacatagaattctaatttatttaattattctaaaaattccaatcacaatggcgcggcgttagccaccacaactttgcagggcaaaaaaaaaaaaatacttcctgaactaacatatgtttcacaagtgtgggcgcagccgggacaatttcgagacaacttcgagacaatttcgaatggacaaattgcggagaagttgcttctgccgctcagaagccggttcacctccttctccaccgcggcatttccaaaacaacagggacaagtctccccggctcgccgcaggcctgaccgcccagctccgccaggatttgcagagagcagcgcgctccatttgcagaaaggaaatcgagtaggtcctcgcccccgactggtgcttcttggggtgtggggtgcccagggaatgggcttcctggaagcaccaaaggagcctgcggagcctggggatggggtgaggcagccggtcccaggccctgggatccaggcggcgcgctgaggccctcccttaccttccagcgggaacccgctacgcgggtagttctgccccgggcccggccgcatcatcctgggcacagcgccggccagcgtggtcatcctgggggcagcttcgctcggaaattatatccaggtgaaggcgaaacggaaaggcgagtgcggcgcggatgaccctcgggaactatccggagcgtggagagcccctccccaaaacggctggagagagagggagggacgcggggaggggggctgtcggttcctagtccagaggccggagctggaacccgggaaaggggaggacggggaggccccggagtccaggatcccgagcccagggcggaaaagtttggtacgagtctgggcaaatgttccagcgactggggtccctgaaaagggggctcagagagccacggcgagccggggagcctggtgaggctggagcgcggcctgcctgagtctcctcctgtggtgacaccgagtgcggggatccgggctcgggagcatttattagttcttttacccaaagcttggtcaggagccctgagctgcgattggccgacgggtagaccgtcccgggtggcggagacacgcgctgattgggcaacagcgaccactttctcttcccatctctggtggtgccgaggcctctgctggccccgagggggacccgcgctgcgccccttgcccaggagagaaggttggcccggtggaaactgagagagaca

SEQ ID NO: 941 - DNA, 6000 bp, Homo sapiens
ctggttcaggagctggggccgcgtggagtcagaaggagtccagtcctgatccgagcgaaagaaagacctgttagttcccccttcccagtaccctcctcccccaagagcaggacacacagccccagctctttatgtaccggcgcccggaggcaggagttcctggagtggtcactcgcctacttttttgctccacgagtcaaggaaaccaacggaccccaaggtttcttttattcacttcctccagctctgttcccgcccccacctcactcacagccttcacctgcctccgcacagatcagattttctggtctttccaaggcctaggctgcccgctcccaatacaagacggtcccccagctaaataaggtccttcaacccttacccctttcacacacaccagattctttcacacacacacatacacacaccccgaatacacacaccccgaatacacacaccccgaatacacacaccaaagagcagttaccgaagaatctgtcttctaaacatcacccccaccccaccatgaacttttacctaattgagcagaacattttttggaagattagacaggacttacttattttttacaagacatcctattcttcccgccctggagaatcgggcggcggaatcctgtcttccttgtttgcctaaaaataattttctcagacccaaatgaactaggacaccagctgctgtgagatttattcttctctccctccctcactgcctttaaaaaaaaaagtacctctctcttcttttcctcttttctttttcctttcctattttccttctctcttcctatcttcccacaaaccatatgttccttattgtaaacccgctcacacgttccctggggctcccccagctgaaggagcaaacccacttcggctggcctacaccatgtttcaatgggatgtccacatcctcatctagtcccttaatccgaactcatcccgactgatttttcgatggggagaagagcggcgccaatgcttttgacaaataactgcggggggcctaatgactgtcactgaggcagcggctgcgaaggaccacgggtttaacccgggcattcaccaatcctgtatcatcacatccggaccggaagctcatgatcacgaacctggcgttttgatgtcctccccgtgagcccccggcagcctttctgtgggattgagggtttctcggcgtttgcccaacttttactgcatcctgagaatcacgcctggggccgggcgggtggccaggaacttctctgctcgaccgtgtcagcctgccagagctcggcccttcagacgggaggaaaaaggtctgggtggcagacaccacccccgctccccactaggtcagggacattattttgcatagatcataatttcctcttaagacctgtgtctggctgagtatgaagtcaaccctcagaggccctgagaagtccacgggccatgaaacccttgtgccagtgtccccaagtgcggaggctgttcgctaaagggtgcttcacagcccaggccggtcaccaaagtgcgactgggctgtagacgcacgcatccaaacgggctgcgagggagaactttcaagctaacaagggcacgctccactcaggcctggacagccagcccgctgttattttcacctgtagtgtctctgaaactgggggcagaggcgcagaggggacaatagaagctatctcccccgcccaccttttttttttttttgtcaaattatccaaatatcgtcttcaaggctcccgtttcatttcgaacgtgcacagagcgtgagtggaccctacactcgttcacaacaccgttgtggagagtcccactgatgctttctgggtaatttgttagcccaggtaaaagtcactgcctcccaaaccagggttcaaggatgcagggcgcgggccctcgccttccaagccccaccgctgggtcatccctttaccaattagcgcctgtaccgcggccaaatttggcaccaggactccttggcccaccggctgcggatagggaagtggcctggactcccatccagctgcggggtttgggtgtggggtggcttgggctccggagagacttcagaaagaaataaaggggaggcccaagactcggagacagagaaagagtggctggaatcacccggcattcctgagacctgttgcgccctgttctgcggagtcacggctctgagccgggttaggtttggcggcgtgcgggcgccctaggccaggcagcctcagccaactttgctgtcctggccatcccaggtcggacttcggggacacaggccacaagaaatttagattcattaagtctttggatgtggcccagctgtccagagcctaagggtgccctcccacccctctccgggtgtccagggacctctggccactggccggtgagaagggccgggctgatcatctgggtacatatgaatctcagagcgctcggcagaaaagaaagaggccggaaaggagagaaaatgagtcgcctcctgattccggagctttaggtccccagcacccccacatccttgtggcctccatttgtacatgtttatagcaagtgacagctagtttatgaacccatgggcacttaagacccagctcagccggcagtacctccgttcaacggtcccgcggactctgcaatctacgggaccgggagaaggaatcttgcagcaagcgcttccctccagcatctgccggctcttaggagagaaaactcccggcaggagagagacgggtggacgctgggagggcttggagaccaagcctccggctcaaaaacaaatgagactcagctctagatgttctttaactgctcgcggggtccaagagtttattttagctgagagttgagcctacttttgccttcttgaaattacacttctggtacctccttcacacagcaattaccgctgaccccagaaagtgctctgtcgactctgcttaacctttgggaagaagaaaacttggaaaaagtctagctctcaaaatgctatcgctgagaagtggcttaaaacgtacggacacaggctttggtggccccaacgccttaaaaagaaaatgagaaaattttccccttgaaaaattgaatcatttaatgtaaaaccaggttaaacaaggcacatgcctccttcatgggtccagacatttctgggagtctcctgagacctgtctccgtggctctgagggtcaaccaagccttctggcatcaggcaggctgaaagcttgcctggtttccccaatggtgagtgggtttttaaagggccaacttgtggactgctgagcggctataccccacacccccctacatcttgccttctgagtttgccttaattagggaatggggaagtagggttgggggcccgagttcacgtcaaaactgtcaaaggaggtgggggagggggacagagagagaggagtggagaactccctccaggggcaggaaaaattcaaaaatcataaaaggaaaagggggaacttgaagcccagaagtcattgtttcctttatttcaaagggaaaaacctgcccgattctcatccttttgattgattaaggccctgaatacctcgcggccccggagtgacagtccctgaataggctcgagcgaataaagcgcagtgcagagcgcggggctggcactcgggggtgtaaaggaggcgagttcgctggcacttaccaagttataaataaaaggctatgcacaatggtaccttctctaaggacagacagtctttacaacactcctggcgtcatatcctgctggggacacttcagctcctagccaagacttcgttccttttatttttccagcagtttagtctgaatgccataataaattcctgagaacaaacgctgaacccgggcaaaactttaacatacagacacatctctgtcgacgcatcggggatctatatgtagagatttagaaccgcagcttgccagagcggtttttacaccaagaagaggagccaggtttttttctgcaccctcccccatacccccagccttcaactaacgagtgcttgggcctagcgacggctgcctgtgcttcacattagccccgcttgcggacggagaagacaaaagaacatcagcgcaccctggactcctcccaggaggagccccatcgggaggaccccttaacaagcctaggccaaggggcactgaccacaggaaggaaagctaaatatgtctggggccccagatgccttcttattggaattgtgccccctccagtggcagtaagccaagagaaatgagagcgagacctacaggtagaaaaaatgagacatagagagagacacaggaaatcacaagaggaatagaggctgagcgagacacacacacagaggcacagaaagagacagagagggaaatagaaagtcaaggaaagagtgatcagagaaagacacacacacacacacacacacacacacacacacacacacacacacacacagagtgacacagacagagagacagagacagagagacaggaacttctccgccctcagcaactgccatctccctggggctgtctctctcagtttccaccgggccaaccttctctcctgggcaaggggcgcagcgcgggtccccctcggggccagcagaggcctcggcaccaccagagatgggaagagaaagtggtcgctgttgcccaatcagcgcgtgtctccgccacccgggacggtctacccgtcggccaatcgcagctcagggctcctgaccaagctttgggtaaaagaactaataaatgctcccgagcccggatccccgcactcggtgtcaccacaggaggagactcaggcaggccgcgctccagcctcaccaggctccccggctcgccgtggctctctgagcccccttttcagggaccccagtcgctggaacatttgcccagactcgtaccaaacttttccgccctgggctcgggatcctggactccggggcctccccgtcctcccctttcccgggttccagctccggcctctggactaggaaccgacagcccccctccccgcgtccctccctctctctccagccgttttggggaggggctctccacgctccggatagttcccgagggtcatccgcgccgcactcgcctttccgtttcgccttcacctggatataatttccgagcgaagctgcccccaggatgaccacgctggccggcgctgtgcccaggatgatgcggccgggcccggggcagaactacccgcgtagcgggttcccgctggaaggtaagggagggcctcagcgcgccgcctggatcccagggcctgggaccggctgcctcaccccatccccaggctccgcaggctcctttggtgcttccaggaagcccattccctgggcaccccacaccccaagaagcaccagtcgggggcgaggacctactcgatttcctttctgcaaatggagcgcgctgctctctgcaaatcctggcggagctgggcggtcaggcctgcggcgagccggggagacttgtccctgttgttttggaaatgccgcggtggagaaggaggtgaaccggcttctgagcggcagaagcaacttctccgcaatttgtccattcgaaattgtctcgaagttgtctcgaaattgtcccggctgcgcccacacttgtgaaacatatgttagttcaggaagtatttttttttttttgccctgcaaagttgtggtggctaacgccgcgccattgtgattggaatttttagaataattaaataaattagaattctatgtatctcaaatagcatctagaagtttctataacttgtttaggaatcgcctttccgtccacttgaagattctgggaatcccggggaggcaggaagtcttgcaagcctgagccgttttcaatggttttccaggttagggcgccccagcagagatgctcatcgcccccgccacccactcccttcacacccagcctagagtagaatgtaacacccagagcaagaatgggggctgggggccc

SEQ ID NO: 942 - DNA, 6000 bp, Homo sapiens
tcacactctggggactgttgtggggtggggggaggcgggagggatagctttaggagatatacctaatgctaaatgacgagttaatgggtgcagcacaccagcatggcacatgtatacatatgtaactaacctgcacattgtgcacatgtaccctaaaacttaaagtataataataataaaataaaaaaaagaaaaaaaagaaggaaagaatatactatttgattgaaaatgttgggacgatttgtcatctacatggaaaaagataaaagtagatctcataattcagaaaataattacaggattaagagatctaactgtaaaagagctaaactatgaaactttttttaaatgtaggagaacattcctataatcccaggaaaggaaaaaaaaattttgacaaggtacaaaagacaaaatgtcaaaacaaaatcagtttgagattatagtgaaaacagtattatacattaaggcaccaataactcaaagataaaccaaagattggaataaaatatttgctatacactttaatgacaaaagttttgtatccaaatatataaataacttctaattaattagcaacaaaaaggcaaagttcacaatagataaacagacagaaagttgcactatgcagttcacactgaaggaaatataaagggccaattaaaaaagaaaaaagtttacaaactcactggtcaaaacaagatctcatttcacaccattaacatctaagcacaccaagctttgccaaagacatagggaaacaggcactctggtacattgttggtacaacccttttgcagatgaacttgtcaattcctaatatatttaaatttgttttctctacgaaccacttaggaattcaaattctagttgtcacagtggtgcatataccaaaatatgcattgcaactttataaaatgaaaatataaagacaagcttactttgtttagggagatggaaaaatgaatcatactttatataactagatactatgcagcagctattactacaaatacatcatatctatatgtaccaacatggataaaatccaaaaacataatatggagtgataaaaagcaagctccaatagatacgtgtaatgtgaaactatttatcacatatgaaagaccacaaaacaataatacttattttttacggagaacagacacacacacacaaaactgtgcagggaaattacatacataaactttttgggatggaagagggagtaaagaatgtgtgtatgactttctgtattcagattttttttttcctaaaggtagaaatctgagaacaaacaagtcaaagtatattaatacttgcttaatctcagggatagataagttggtgtctgttccattactttttgttttctaatttaactgaaagtgcttaaatttgaaaatgaagcccggtgagaaggcatcctccccaaatgtaggtgtttttcacgttttgacatttgcttctcatattgctgccctgtctggaatgctaaggcaagaagaaggataaaccatgatatcttaatgtgtgaacatcaccttatccagaaatcaaagaaggggctttctatacctccactcccaggtctattgcctgagacaacaacaaggtgccgccctatttcaagtgggtgagctgggccctgacagctataaaacctggggatgcgctgggcagccagcctggaactggatgcctgtgcaaagtagcagaggtatttaattctcggcacatcagtccaaattgtgtgggtggacagttccaccccgtctaaacaaacttagcatgtagagtcaacaccgctgctatttccctgttttgagaaatgctaaagtaaaactgaataaattggagcgaaacacatccttaactggagtagaacaaaaataataaaatataatggctccaaagttacatttagctctcacttatacattgtttggcccacactatgtttttgtaaagttttggcttagttgctaatatttagaatttgagaagtttctaataaaaactggattcccaacttctctcttgaagtgatgctggcacaattgggcttgaattctagcatgctaacaactaggttctgaagagtctctcttaccccattgccttactccttacttcacctgctggccccactggggtttcaactctcattttacacatgagaaaactgaggctcagagtggtcaacagccttgcccaacagcagagtttctctgtgaagggagccatgttggtgcacattgcccgattatcagtgaacgttgtgattcctttttctacaagatgaaggcacatttcattattttactggcatattttctctctaacccagcaggtacactggaaatgataatcctgaaaacttgttaatgaaagacttacttcaagtgatgagaaaaacaatacaaatggattaatttcagcaagaagtcaccaagatttggccaaactcaaaacagaaaagtttacatgtaaaaataacaaaggaatgtaacaacagaattgaaaatggtataactagagtttgcatggtccccaagcattactttttcaggctgatcctcacataagtacaattcttccaccccttcccaatctcattcctgttcttctaaattcagaaacatgtgcaaaccctgctctggatctcttctccaggcttccccacaacacacatttcctttaggattttgcttttttggatttatttgtcctggttaaagctggtagataatccccactgagttttatctatcatgcctagtagcatttaaatacctggtctgggaattcctaatgtatgcaaagtgcatttttgttagaaccagctacacaaacagattacatagattacaaatgtcctttagaatgtgaaacagtgaataatctaaatgtaaactgatagggaaatggttcaattaactttggcatattgtgaaatactgtgcaacaaagcaaaaagaaaaacaggaggatcttaaatactgacatggactggtctacaggttgcaaaggaatacagcacagtatcatttatgttaaaaggccaacaaaaacatacatatatgtttgtgggttcatatgtgtgtgtgtaaattcatggacaatgtttggaaaactacatgaaatatgaaagtggtgaaagtggacacctcttggaagacaaggaaatggggagaggtatggggggtgtcagagagggctttagtttcacctataatgtctgcaatgtcttcatttaatttaaataggaaaaacatatagaacctatatgtgaccataggttctaaaattcttttcatgtaacatatataaatatttatgtgaccgttaatttccaatcataatctcaatgataacatttgtaaaaacatctgctcatccttggaaatgaaatttcctatgccacgttatcacccaaatcaactttttaaagtgtaaaaataacaagtatctgaaaagttaaagtttactttcacaaggtaaaatcaagtgagtcaactctaggaggcacaatcgttttgaggacaatcaatttctatttaatggcaaagaataagaaatatgggatggatttaaataaatccagtttcactcaaattccaagtcaaaaatcaaatcaaagtgtcagattgcttaaatgattctaacctgagttcgatttctaaggtgctcttaatttttcagtgatagcatttgcttttcccaacaatagcaaaggaaaactggagggcaagttttgcaaggaagaaactgagccccagagaggtcagggtttagtgtgacgtcccagctaggaagtggcggctgggactccctgcaggtgtctcctgccagccctctgtgcgctgggccaagctgcttgatttgattcaccagcgtgacaccgtgcatctccacatccggtgttctcacgtatcatccctggcgattatctatgtgtctattttttaatttactgacctctggaggcctgtccccgccatccctgactcctaggcactggacaagccccctcctcgcctcttcccccagccccgcgcattccacctgttccggggcatccccgcttgctcccttccgctcgctgcctgtcccgggacctgcgtgaagccctcagcctcgccactagcccggcagccgctccactaccgcgccgctgcgggtggggccagcgcgtcccccggacgcgtggaggagggatggaagtgcgggggtgggggtcgcgcagcccccactcaccttgctggctgcgggcgccgccgccaggagcaccagcaggagcggcagcaggagcacctgcggcctgggggcggtccgggcgctcatggtgggcgcgcgctcagagcctgggcgagtccggggaccctcaggctctcaggccaccgcgtctcctgcgcagcgcggctctgggagcccggctggaaagctcgcctcgccactcggccggggcgggttttgtagggctcggtcgcgcggttcgtccctccccacccaggctttttggttgtggcttcaagggagggaagacgtggctcaggtcccgccctcataccccctccctcccaacttaccaggcagtgtcccttctacccgggcatcgtgcccaggaggcgagaaagggctgggcgcctgaggggcaggtgggcgcggatccagggtaaggggttaaggaggtgatgctcccaaggtccgggggcccaggcggggaagtggggtgcggtcggaggtggggcgtttgggggtgtgcggtggggaggtggctgcgcggtggggaggtggctgcgcagggtggagggagtggccagcggccctgcccagattaagcgggaggcgcgccgggcgtctgcactcgggaggccccgcttgttccccgcgcccgcggcggtccgcgttccccgcctccagcccgcctccaacttgcggccgccgggcttggctgcgagagcgccgcgaagaggcagcggggcgcgggtggattggggctggaggtgcgcgtcccgtggggtggcaaggcggcagctcctggcgctgcgggcgtccccacaggtaaggcgcccataggtggggcaaccgctgtcccggggccccggcacctgcctgggaggggcagtggagggagcgtggcattcaaggggtggtggcgggcccagctggggagttgtggcccgggggtcaccagaggagagcgcgtctggctcctgggcttgtctgcctgggctttaactgggtgctgtgtgttttgattaatttggaggctcgagttaccggcctggcagtcggggcactccaaaatgccaagagaaagaggcagctgaggagaaagagaaagcccatcttattctccgctgagttgaactgcttttcaggccaaatcttatctgcggaaatgcagggcaaaacaagactcagctctggtcagggtgcgctcttcctgggggtggcctgcgatgcaaatgtgccagggcacggtcctccagccggctctcgccgtttcctgtgctacggaccacactggctctggtaaagcaattagactgtttctcagaagaatgttgtgaaatgcataaaatacaattaaatcagaatcagttttattggaatgcaattatggaagtcctcaagtcgtgatatagtaactaacacaggtgcatcatcattattgcattaaatagcttgatttaacagcaggccgattaagcaacagtaatgtcaaagtagtgatgtctgcaaatggtattttgagataatagcccaaactgaaatgtgacatgaaaataccggtgggtgcaaattatcaagaactgccaatactactgtgctctgttgcctgtgctcataagggaaggacatgttgaacttctgtgacatgttactaaaagtaaagatgcaacttattttcctatgtgagtttcctatacagatcacctgaattccatcctcaggttaagaatctttgctttggaacagtgttgctgatat

SEQ ID NO: 943 - DNA, 6000 bp, Homo sapiens
atgctattctcatgatactgagtgagttctcatgagatctgatggttttacaaggggcttcccccttcgctcagcactcattctctctcctgctgccctgtgaagaggtgccttccaccatgattgtaagtttcctgaggcctccccagccatgcagaattgtgagtcaattaagcctcttttctttataaattacccagtctcaggtgattcttcatggcagtatgagaacagactaatacacttaacaaataatctctgaacattccctcaaaggctttgtaatatagaacaacaaatcaccacatattatttctgtgctatataataaagttctggacaaaggtgttcacagggaccatgctctttaatccttgacctagatcttaaagcacaggtagttgtagaagacagaccaagaaggaggtccctgtgggcagaggcaatagtaaatacgaaggtgtgaggtgaggaagtctgtatagtgaaccagagaaatcataaaaagcttgggatgacacaagagataaaacaaaaatgttgacttgagaccacactattctattccaagaaatgtgaaatcagttgtgaagttaaaggggaacttctggaagcttttaaacaaacaagtggcacgatgtgtgtgatgagtattactgacatttgccacctgtttcccactctttccaggcatgtggtagatttcatttccctgccccttacagaataaagcatgatcacgtgatccacttagccagtgaaatgtgagtagaagtagcctgtgtcacatctaggaggaaggttgaagggtagttttactttagcacattctcttccccttctgaggtgattagagaagatgttgagagggaatttccaggaggtccctgagtggctacaataaacagaggacccccaccccattcccacctccccatgtcccgtgatgaatatgtagtagaaatgataagaaaacttccataatgataagcctctggactggggggattgtttgtaactgcctctaaagtcacctgtccttgctagcataatttgcaattttaattggtaactctgataattacatagaagatgagtttcagagtagaaagcctgcaggacagaaaactagctagatagctaccataatccacagatgatagtgcaaggcaggagccacgaacttagagaagcagaagaggagtccagagatgcaatggcaagaaatgatatgagttggtaatcactcagattctaaaagcacccaagagcctaattgtttcagaggtatggaaaagagaaagttcttaaaaggaaaaggatggctaagaggggagatgaaatgaaacaagattaatgaagcagctgtgggcagcataagaggtgtatcttgtatctcattaaaagtagaggctcgtccctctacaatgaaggctagaggtagatcatgaacttaggaagaaaccagactaagtgtgaatgctgggtgaatttgacaagtcattcaacttcatttgtgctttcattaattcattcaggaaacagtaacagcctcactcattcattcaacatcagtaaagaacacaaaaatggcccctgccctaatggggcttacattgaaatgtagtgaagcagacacaactatttaaacagtgtgtagaaaacggacatgatactgtgaaaacaaattacataggacttgtcaaagacaataaccactcattttgtttaaaactcctacatggcatcaaagtaaaaaaatagagacctctgtgtcctttgaatgtacgaaaagaaccatcctcctttcctcttgctgttttacatttaaagaaccaactgtgaaaaatcaactctcttgacccaaagacaatttttttaacaatcaagccttccagttaattaacaccacctgtttgtttgacaggtgagcctgtcaaacattgttctaaatgtggcaggtggggaataggtggttaaatgtggcttttagataagcaacttctcagagttttaagtaccaggtgcatacgaatcacctggagatcttggtgaatgtgggatctgattcagtggatccagagtgagaccagagactctacatttccagcaagctcccagggaggccaatgctgctggtcccaagggatgccaaggcaaggttctagaggccttggaagtgtattaacctcaagggagttcataggctatgcttgcctccagccattttagtactgagctcagaagagcatctctaccacgtgccaccatttctcatcagggccacctattttcctttgtacaaaaaaaaaaaaagaatcaaatttcactatgtgactactgtgtgaagattctgcacaaagggtttttgctatctcattagattccaacaactccctgaggtgggtatggtgagtatgtctattttatagaaggaagactccagcccagagaggttaggtcacactagtaagtatggaaaggattcaaaactccagagtctactccagaggtcaagctctccagcattgcctctttcttgctgtatttacatcacaagtttctttccagctctgtatctgcaacagaaatgacttgcagttgactattacttcctgttccaaaattgataaaaccaagtctagtcctccaacaaaatgacttggtttcaggaaaaggcaattaaaattcaaattgaggaatcttctggaatttggcaaagagaagcatttaacattagcattgagatttttttgtttgtactttttaaaattaaatactgtcagtttgtgaaacataatcatgtgactctcagaactcttggacactgtcacctcatcaacagaacacctaccgtttcattccacaagagtggcagaagtttccagaagaaccttccctaccaatggaaagaagctactgcataccacacagcaacatctgcgatatggtcataaattccgcagtgttcccaagttgtaatgaagagtttaatatatgtgctttttattattctactaagaatatatcctaattcaacatgtgcgtgaaattttcacatgttcgtgaaaacaggagctctcatacttgattgtgcatgggaatgtacaggaaattttaaaacagctagagagtctgataaaattggcttggaatggtctgggtagcaacattgttttatcctcccaaagattctaatgcacaacgatagttgagaatcactggcataaaagacagaaagaagactgtaagattcatgctatagtcaaaataaaaagaatgggaggagtgtcttcattcactgttagggttttgcctacctgcatggctacaaagttctaagataccaatagatcccaaatttaactgcaagcaagtggttccctaaaatcagtgaccaactgcatgatcatacttggtgtctgaagccaattgcagcaaatatcagcaacactgttccaaagcaaagattcttaacctgaggatggaattcaggtgatctgtataggaaactcacataggaaaataagttgcatctttacttttagtaacatgtcacagaagttcaacatgtccttcccttatgagcacaggcaacagagcacagtagtattggcagttcttgataatttgcacccaccggtattttcatgtcacatttcagtttgggctattatctcaaaataccatttgcagacatcactactttgacattactgttgcttaatcggcctgctgttaaatcaagctatttaatgcaataatgatgatgcacctgtgttagttactatatcacgacttgaggacttccataattgcattccaataaaactgattctgatttaattgtattttatgcatttcacaacattcttctgagaaacagtctaattgctttaccagagccagtgtggtccgtagcacaggaaacggcgagagccggctggaggaccgtgccctggcacatttgcatcgcaggccacccccaggaagagcgcaccctgaccagagctgagtcttgttttgccctgcatttccgcagataagatttggcctgaaaagcagttcaactcagcggagaataagatgggctttctctttctcctcagctgcctctttctcttggcattttggagtgccccgactgccaggccggtaactcgagcctccaaattaatcaaaacacacagcacccagttaaagcccaggcagacaagcccaggagccagacgcgctctcctctggtgacccccgggccacaactccccagctgggcccgccaccaccccttgaatgccacgctccctccactgcccctcccaggcaggtgccggggccccgggacagcggttgccccacctatgggcgccttacctgtggggacgcccgcagcgccaggagctgccgccttgccaccccacgggacgcgcacctccagccccaatccacccgcgccccgctgcctcttcgcggcgctctcgcagccaagcccggcggccgcaagttggaggcgggctggaggcggggaacgcggaccgccgcgggcgcggggaacaagcggggcctcccgagtgcagacgcccggcgcgcctcccgcttaatctgggcagggccgctggccactccctccaccctgcgcagccacctccccaccgcgcagccacctccccaccgcacacccccaaacgccccacctccgaccgcaccccacttccccgcctgggcccccggaccttgggagcatcacctccttaaccccttaccctggatccgcgcccacctgcccctcaggcgcccagccctttctcgcctcctgggcacgatgcccgggtagaagggacactgcctggtaagttgggagggagggggtatgagggcgggacctgagccacgtcttccctcccttgaagccacaaccaaaaagcctgggtggggagggacgaaccgcgcgaccgagccctacaaaacccgccccggccgagtggcgaggcgagctttccagccgggctcccagagccgcgctgcgcaggagacgcggtggcctgagagcctgagggtccccggactcgcccaggctctgagcgcgcgcccaccatgagcgcccggaccgcccccaggccgcaggtgctcctgctgccgctcctgctggtgctcctggcggcggcgcccgcagccagcaaggtgagtgggggctgcgcgacccccacccccgcacttccatccctcctccacgcgtccgggggacgcgctggccccacccgcagcggcgcggtagtggagcggctgccgggctagtggcgaggctgagggcttcacgcaggtcccgggacaggcagcgagcggaagggagcaagcggggatgccccggaacaggtggaatgcgcggggctgggggaagaggcgaggagggggcttgtccagtgcctaggagtcagggatggcggggacaggcctccagaggtcagtaaattaaaaaatagacacatagataatcgccagggatgatacgtgagaacaccggatgtggagatgcacggtgtcacgctggtgaatcaaatcaagcagcttggcccagcgcacagagggctggcaggagacacctgcagggagtcccagccgccacttcctagctgggacgtcacactaaaccctgacctctctggggctcagtttcttccttgcaaaacttgccctccagttttcctttgctattgttgggaaaagcaaatgctatcactgaaaaattaagagcaccttagaaatcgaactcaggttagaatcatttaagcaatctgacactttgatttgatttttgacttggaatttgagtgaaactggatttatttaaatccatcccatatttcttattctttgccattaaatagaaattgattgtcctcaaaacgattgtgcctcctagagttgactcacttgattttaccttgtgaaagtaaactttaacttttcagatacttgttatttttacactttaaaaagttg

SEQ ID NO: 944 - DNA, 6000 bp, Homo sapiens
cagaggaaggtgccctgcttctggggggcaccacacatttgtcaccgtgggagggagggctcagctcagtctccaaggcggcacaaggccacagcagccttccaggaggacaaccaggatgctcccgttctgtgccgtcaggggctggctctgtatggcagggcctgagccaaggaggagagaggaccagggtgggggaggcaagcagccgtcacatgagagatgagatagagaggagccatgaggaggtgaatggctaggctgggagaatcccaagcctgagggctggcttgaatttgcaatgttgaatgtgggcatcactgggttatggacccctctgcgccccactctgtgaccacacagcagccttgagtgagcaggctcttatggaaatccagcatcctccaggtcacattccacaggagctgatgggggcccacccgcttccacaccatccagggccaggtatgagacccaggcctgactgcttaacaccttccccatgtccagccacagctggcttggaaatggacagagtacagaagctgcccaccccaagggatctcccagagctacctggacagcccgacttttttccactggcaaagcctgaacttgtgaggtatatacagggagctgtgggctttatcctgcaattacaccaggacagtctgtctgagagtggagccatcacaggggagcacagatggaaagagactcctggatccagctatgcctgaaaccaaccgacctctctctggtcacacaaatcaacaaactgccctgtgcttaagccagtctggtgggctggtatcagcgctcagaagcccactcaccaaccagggaccgagttccatgctaggtcaacactggggcagagagaggagtcagttgcatggcaagagtggatgtaagagttctgcagagacagaaaatcagggccaaaggtgaccggagaaatgtaggctcccaagaagtcaaagcactcttgggaaattgagggctgggactgggcctcctccaggtctcagtggacaggaagacctcagctaactccagcatgacccaagttttttaaggtctgaataagggtttgcggtctaggtactccagattgcttaatctcctcatctgctctctttttaaaatttgttttagaaacccgtctttgctaagttgcccaggctgagtgcagtggctattcacaggcactacagccctgaactcctgggctcaagcaatcctcttgcttcagtctcccaaggagctgggactactagtgcggtgtcaccatgctgggcttgatctcttcataaacactgaggtcatttttttttttttttgagacaaagtctcgttctgttgcccaggctggagtgcagtggcatgagctcggctcaccgcaacctccgactcctgggttcaagcaattctcctgtctcagcctcccgagtagctgggattacagacatgcgccaccacgcctggctaattttttgtatttttagtagaaacggagtctcaccttgttggtcaagctggtctcgaactcctaacctcaggtgatccacatgcctcagcctcccaaagtgctgggattacaggcatgagccaccacgcctggcacacttaggtcattttcagttccttactgctagcaatgttccatattgaacatccagagacacagctttacctggtttctgcagctcctgggatgcagaacatgtctatcaattatgcccagtggcccactacccccatgtcagagcccaggagacggctccaacaggagacaggaagcaggaagtatgagttcattctgcacaggaggaaactgagcctgtgaatggggcaggaagttgcctgaggctacacagcgggaaggttgcaggtgtgagcttcctggtctcctgcctgcaagtacaggctcttcccctgacagaggtacttcaggaaccatggagttagaccccaaggtttacagtctggccatgcccagtcttgcagtgactccttgggcgagatcttttccctctctgcatttctgtaatgctatctacagggaatcccaaacctgactgctcttcagaaatctgaggcgcacactgtccaaggagctctagactctacattaaagagttcattaaaatgcaccctcagattttactgtactacagcttttctgaaaaagcagctaacaatgactgagcacttactacatgacatggattaagaattcagtcctcccaggctgggcgctgtggcttacgcctataatcccagaactttgtgatgccaaggcaggtagatcacgaggtcaagagatcgagaccatcctggccaacatggtgaaaccccctctctaccaaaaatacaaacaattagccgggcgtggtgtcaggtgcctgtagtcccagctactcgggaggctgaggcaggagaatcgctggagcccaggaggcggggttgcagtgagccgagtttacgccattgcactccagcctggcaacagagcgagactccgtctcaaaaaaaaaaaaaaaaaaaaagaattcagtcctctcaacaatcctaggaggtaggtattattattcttcctacttcccagacaggaaagtcatagcagatagaagttccatagctttcctagcttctggtaatgttcctgacaggtttcggtattaaaattacattgacctcataaaatgagttgggaaatactccctcatttttagtctctgtgcaggtttgtatgagactggtggtatttttttaactgttgagaagaatttctcaatgaaaccatctgaacctagaattttctttgtgggaagattttaaattacagattcaatgcatttaattggtgtaggactatccagattttctatttcttttagtgtcagttttggtaagttgtgtatcatctaaaatttcaaatgcactgtcaaaaagtcctccatactatctttttatccctttaatgcttgtagtatctacagtgatgtcctctttttcattcttgatagtgaaatttgtgttatcttttttcttactcaatctttctggggatttatcagttctattaatctcttcaaagaaccaatttttggctttgttgattttctctattttttgctttattccattaatttctgctcttatttttattatttcctttcatctttagttttattgttcttttctagcttcttgagtggaagcttagagcagtaattttatttttctttttccttttttttttttttttttgagatggaatcacactctgttgtccaggctggagtgcaggtgggatgatctctgctcactgcaaccttcgcctcccaggttcaagcaattctcctgcctcagcctccttagtagctgggattacagacacctgccaccacacccaactcattttttgtatctctagtagagacggggttttcaccattttgacccggctggtctcaaactcctgagctcaggtgatctgcccacctaggcctcccaaaatgctgggattacaggtctgagtcatttcacctggcctaattttcaatccttcttctaaagctatcaaatttcctctaagcagtgttttagttgcactgtacagcatttgatatgtcttatttttcactgttcttgtcaacatattttaatcttccactgtgattattgacccattgattatttagaagtgtgacatgtaatttccaagcatttgcagattttccagtaatttttctgttattgacttttaattcagagaggacacactgtaagatttcaatccgttgagatttgctgagacttgtataaggtccatgatatggtctatttcgataaacatcctatgtgcacatgggaagaataagtattttatagtgttgtacacacgtgaattaggccaagttggttaatcctattgttcaaactgtgtgaggttgattcaaggataaagaaataaaccagtgggatagagttccgagacacacacacacacacacacacactcttcagctgatttatgttgagatgttggggactcctccaattcggtggaaaaaaaatgatgcttttcaataaatgatgccaggtcaattggatatctacacgaaaaaaaatgagctctagccccgtaccacaccattcacaataattaatatgtaatcaatcatagatctaaatatgagccctaaaacaagcttctaaaaggaaatacaggaggatatcccaataaaaaggtactaaccataaagaaaatattgataaattggacatcactaagagtaactcctgttcatccaaagcaaaagtaaaccacaaaatagaggaagatatttgcaataacttcaataaatgcgaatccaataatccatctacaatacaaagggcatgcgtccggaccaagaacacgtctccagactctggaaagaacctctacgaacgaagaagacaacccaattttcaaatggaccccggggaacacccaggcggctggggctggctctaggtccccactgctctgccttgcgggggccgctccggcctggtcgccttctccgggcgcatccagggaactcgctcggtcctccttaagcggggaagctcggaaagcgtctccccgactccgcccccagggttgcctttcccttagaaggccaagccccaagcccagcctctcgccagctgggagtcgcgcgctgcccacctcgctgcccaggcccccgacgccgcggcaggagccccccaagagcgcgggaagccccgtggacctggcgctcccggctcgggcgtggacggggcgggcgccggggcggggcgcgcgtcctcgcgggtctgaatggaagggtcgaggtcgtcgtcggcggcgagcagatcctgaagccagaactccaccccggcgcccgcgccatgcggcgggagaggtgagcgcggcgggcgtggcgtccgtgccggggtgcccggggtgccacgggaacggcgaggccggggacacgcgcgcaggacgccagcggcggaggtgggcggccccgggccggggcggggagggccgggtcctggcagtcgccgtgggggacgcgctgggctgtgccctccgcccccgccgcccacgcactcgtcttcgagggcgggcccggcggccccggagcaaaccgccgtctccccgcggccccaccggtccctggcagcctcggggaatgtctgtagctgaattcgggctctgaaagaaggtggcgctgggtttttaaagatttggggcacaaaaaacgagagcggacccggcgccggctacggcccttcccgagggccacgcccagcccggcgccccgcgcgccccgttccccgcgccgcctccctccacccggctgagcgcttgtgcccgcaggtgcggcgccccccacccgcgtcgccgccatggaggtgctgcggcgctcctcggtcttcgccgccgagatcatggacgcctttgaccgctcgcccacagacaaggagctggtggcccaggccaaggcgctgggccgggagtacgtgcacgcgcggctgctgcgcgccggcctctcctggagcgcgcccgagcgtgccgcgccggtcccgggacgcctggctgaggtgtgcgcggtgctgctgcgcctgggtgagtgcgccctggtgggatccccagctgcgcctcctcccctgctgggccgcagcctccctccgaggccgagatgggggtccggcccaggggcgcccaccccctgcctgggacggccaggcgctcgggacagggccacccaggcgggtgctcccggatctgccctctcaggcctcccacgccacaggcccccccatcagctgcctgctcagcccagatttcagtcatgctggccataaacaatagaaagctccagaaagaataatctattagtgggtggctaagcttccacagtgacccttgttctcagctgggcacagaaaccctttgtaggagcacgtgtcccg

SEQ ID NO: 945 - DNA, 6000 bp, Homo sapiens
aaagaaattcataaaagcctgactctctctccagaaaagagtacatttctgcatttaattttgggaggttggtcaccattcttttcctcgcttctaaataaatgcttatatagcatttatattccagtcactttacaaatattgtcatttaattctcatgcaaaccaacgaggtaggaactattgttatccccattttacagatggggaaactgaagtacaaagagctgaagtaacttttccaaaatagatgtggttttgaacccaagaaatgtgatacaactatgacatgaggcagtcccaatgcattgaatccttatgactgcaatgcaagggaggtataattaactgcattttatagatgcagaaactgaggcttgaggctatttggtgtttctggtgtagatctaggagccaaactccagcctacctagactctttgcctctgctgtacccctggaccatgtgttaggaattcttggtacagggtggtagtgctcaatatggtagtggttttagtctgttttctgttgcttataacagaatgtctgaaactgaacaattttgaaagaaaaggaatttattccttacagctatggaggataggaagtccaagattgagggggcacttctggtgagggccttattcctggtctctgaagtgtctggaggtggcacagggtatagcgtggagaggggactgggcatgctgacatgctatgctttggtctctcttcctcttcttataaagccaccagttctcctcctgtgaaaacccacaaatccattaatccatgagtgggttagtccattcataagggcagaggcttcatgatccaatcacttcttaaaagtcccaaccgctcagtactgccacattgggggattaagtttccagcacatgacatttgggggacacatttaaaccatagcagtagccatttgccacatgtggttattgagcacttcaagtatggctaatgtggctagtgtgactgagaattttttattttattgaatattttaatttttttttttttttttgagatggagtctcactctgtcgcccaggtcagagtgcagtgtcatgatctcggctcactgcaacctccgcctcccggggtcaagtgattctcctgcctcaacatcccgagtagctgggattacaggtgtgtgccaccatgcccggcaaatttttgtatttttagtagagacagggtttcactgtgttagccaggacgatcttgatcttctgacctcatgatccacccacctccgcctcccaaagtgctgggattacaggcatgagccactgcgcccagcctcacattatatttctattggaacacagaatggtctagagaattgggatttgacaaacccagctgtgacaagtcaccaaaatttgggggccatacccagggtgccgttcctgtcacgatacccataggtccatgtggaggctgcagggatacaaagctcgtgaaatatcccaggatggcatgggcactggagtcagctgccccaagttcaaatctgaaatcagtctttttgttttttttttttttttgagatgcagtttcactcttgttgcccaagctggaatgcagtggcgcaattggctcactgcaacctccgcctcctgggttcaagcgattctcctgtctcagcctcccgagtagctgggattacaggtacatgccatcacgcccggctaaatttttgtattcttagcagaaaccgggtttcaccaccttagccaggctggtctccatctcctgacttcaggtgatccgcctgcctcagcctcccaaagtgttgggattacaggcgtgagccaccgcgcccagcctgaaatcagtcttatacgaccagctgggtggtcttgggtaggtcccttaccttaactcttcttgtctgcagaatggaggtgacttactgtttttctctgtctccctttcacatctttgcactcttcaccccttctcttccctcagcttttagtttaaacatcacctttctgataagccctgctgaaaatggccaccctcagtcatgacggagaacaagtctttcctattttattcaagaaaatgcatgatgcaatctattttaaatgatcatggttttaattttattttcctgataatggtctatctctccactgatttataagatttgtaagagcaggggtggatcattctggtcactgctgagtccccagcatttagaacaggggctgacacagcacaaaacaacgttagttgggaatgtacaagcaaacccagcacaccttcagaggggtgctcaggaaacagccctcccacctttcttcacccctcacagctgtgggatcttcctaaccatttcggtgtcccaggatagaggatgagtttattcacccctccccagcaggggagttgccaggattaaatgagatcccagaatgccctggtataccctgaaggctctgggacacaggtgagctggtccccagggatttggaaacaggaaaacaaatatgactccaccctgcctcccatccagcctctgcctagaggagttattttattttattttactttttttttttttttgagacggagtcttgctctgtcgcccaggctggagtgcaatggcgcaatctcagctcattgcaactcctgcctcctgggttcaagcgattctcctgcctcagcctcccgagtagctgggactacaggtgtgttttttgtatttttagtaattttttgtacttttagtagaaacgggtttcaccgtgttagccaggatggtcttgatctcccgacctcgtgatccacctgcctcagcctcccaaagtgctgggattacaggcataagccaccacgcccagcctctagaggagttattttacttacttacttatttatttattacacaggatctcactctgtcacccaacctggagtgcagtggcacaatcacgtttcactgtaacctgaactcctgggctcaagtgatcctcctacctcagcttcctaagtagctgggaccacaagctcgtaccaccatgcccgctatctttttctctttgtaaagacagggtcttactatgtcatccaggctgttctcaaactcctggcctcaagcaatcctcccgtcttggcctcccaaagtgctaggattacagacatgagccagctcacccagctgaggagttattttttgacactggtgaattcagatcaaaagggatttctaagaaaggtgctggacccaggccgggcgcggtggctcatgcctgtaatctcagcactttgggaggccgaggcaggtggattatctgaggtcaggagttcgagaccagcctgaccaacatggagaaaccctgtctctactaaaaatacaaaattagccaggcatagtagcgcatgcctgtaatcccagctacttgggaggctgaggcaggagaatcgcttgaacccgggaggtggaggttgcagtgagccgagatcgtgccatcgcactcaatcctgggcaacgagtgaaactctgcctcaaaaaaagaaaaaaaaagaaaggtgctggacgcctaggacgcagaggggtgtttcaccccaaatcaagtagcaccaagccctcccaggccttgggtgcaagcatattaaaggcctctttccctctctgtctccattgtttacactccactgagcatccgcaatgtgccacacactgttctaagcgtcttacacatattaaattatttaatcctcacaacaactttatgaagtgagcgcaattatgagcccattttatggagcaggaagttgaggcagggttttaggtagcttttctggggtagcactgtgggttggagcggaggtggagtgcactcttaggccagctggctctaggggctcttcaccactaggccgcactgcctctagcaaagggacgcggggaagctcagcagaccttaggcctcccaagggcgccacggtggttcctttgagcccagagtcagctcttaagtccataggccttcctgaagcttctgaaccacttgcccatagctgggcctcaggctggctctcagtagaatgtggagaatggagattcccgcatgtccacttctcctaaaggttttataaggcagtgctgggaatgtgctttataaaaaaggggaagcaccccgacaacagtcactgtttgctcttttaagcaccatcctgagaaggaggaatgttcttcccatttcataggtggggaaaccgaggctcagaagagcaaatttttggccgggcgcggtggctcacgcctgtaatcccagcactttgggaggccgaggcgggtggatcacgaggtcaggagatcgagaccatcctggctaacaaggtgaaaccccgtctctactaaaaatacaaaaaattagccgggcgtggtgcgggcgcctgtagtcccagctactcgggaggctgaggcaggagaatggcgtgaacccgggaggcggagcttgcagtgagccgagatcgcgccaccgccctccagcctgggcgacagagcaagactctgtctcaaaaaaaaaaaaaaaaagagcaaattttttttccaaggtgatagggagagtccgtggctgatgtctgcactgaccagacgcccctagggggccagcgagggcgggtcccaggtgcagcggatgcagaggagagaggcccgggcgcggcgcgggggatggtgcgatcccgggcccgagggcatcagacggcggctgattagctccggtttgcatcacccggaccgggggattagctccggtttgcatcacccggaccgggggattagctccggtttgcatcacccggaccgggggccgggcgcgcacgagactcgcagcggaagtggaggcggctccgcgcgcgtccgctgctaggacccgggcagggctggagctgggctgggatcccgagctcggcagcagcgcagcgggccggcccacctgctggtgccctggaggctctgagccccggcggcgcccgggcccacgcggaacgacggggcgaggtactcggcggggtgcggcctgcggactcgcccggaggccggggggcgggagggggcggccggggaagggggcgccggaagcctctgggcgtctgcgtgttgccgcgtgttacacgcacgcacgccccttacacaccttttcacagaccccgccgtcggggcgcggccaggtcagatcccttttgatccgggcctgggctgagtgctccccccgggcttcaggtgacgcggccccgcggagcgtggggtcgcccgagttgggctggggaagccagggacggaggtgtccggccgtcacccctagaggagggcgtgcgggggtctgttttgcgtgagtgcgggataggggagtcgtgtggtgcggtgaggggcttgtggggggcactggaggactctgggggtggcgggggatccgagggggtcctcgtgaacccgcaggggagagtcctgggtgagggtgggtcccgagcacctgtgtctcaggagatggtgagagctgtctggagggctgggcacttggtggcaggggttggcggtgcaggggacaccgccgggacagggctggggtgccctggagcgggggagccgagggagtgggagcgggggcgcagcgcgcgatctctggcccggcagggccgctggttctccccagtgcgcggctccgggtttgcaggtggacggtgcgcgcgtgtctgcggtgtgtgctgtgcctgcagaccggggagggcgggggacgacagccacctccttccctctgcctcacccccctcctgtcccagggccgcgcttcaatttccgctgaaacttctgactcggacacccgccgcctttcgcttgggctcccacgggaggggcctggctgcggggggcggggcggggtgggggtgcggccttgctcgggtagaccatgggtgtgacagctgggagggctgtgtgtgtgtgtgtgtgtgtgtgtgtg

SEQ ID NO: 946 - DNA, 6000 bp, Homo sapiens
acaactatgacatgaggcagtcccaatgcattgaatccttatgactgcaatgcaagggaggtataattaactgcattttatagatgcagaaactgaggcttgaggctatttggtgtttctggtgtagatctaggagccaaactccagcctacctagactctttgcctctgctgtacccctggaccatgtgttaggaattcttggtacagggtggtagtgctcaatatggtagtggttttagtctgttttctgttgcttataacagaatgtctgaaactgaacaattttgaaagaaaaggaatttattccttacagctatggaggataggaagtccaagattgagggggcacttctggtgagggccttattcctggtctctgaagtgtctggaggtggcacagggtatagcgtggagaggggactgggcatgctgacatgctatgctttggtctctcttcctcttcttataaagccaccagttctcctcctgtgaaaacccacaaatccattaatccatgagtgggttagtccattcataagggcagaggcttcatgatccaatcacttcttaaaagtcccaaccgctcagtactgccacattgggggattaagtttccagcacatgacatttgggggacacatttaaaccatagcagtagccatttgccacatgtggttattgagcacttcaagtatggctaatgtggctagtgtgactgagaattttttattttattgaatattttaatttttttttttttttttgagatggagtctcactctgtcgcccaggtcagagtgcagtgtcatgatctcggctcactgcaacctccgcctcccggggtcaagtgattctcctgcctcaacatcccgagtagctgggattacaggtgtgtgccaccatgcccggcaaatttttgtatttttagtagagacagggtttcactgtgttagccaggacgatcttgatcttctgacctcatgatccacccacctccgcctcccaaagtgctgggattacaggcatgagccactgcgcccagcctcacattatatttctattggaacacagaatggtctagagaattgggatttgacaaacccagctgtgacaagtcaccaaaatttgggggccatacccagggtgccgttcctgtcacgatacccataggtccatgtggaggctgcagggatacaaagctcgtgaaatatcccaggatggcatgggcactggagtcagctgccccaagttcaaatctgaaatcagtctttttgttttttttttttttttgagatgcagtttcactcttgttgcccaagctggaatgcagtggcgcaattggctcactgcaacctccgcctcctgggttcaagcgattctcctgtctcagcctcccgagtagctgggattacaggtacatgccatcacgcccggctaaatttttgtattcttagcagaaaccgggtttcaccaccttagccaggctggtctccatctcctgacttcaggtgatccgcctgcctcagcctcccaaagtgttgggattacaggcgtgagccaccgcgcccagcctgaaatcagtcttatacgaccagctgggtggtcttgggtaggtcccttaccttaactcttcttgtctgcagaatggaggtgacttactgtttttctctgtctccctttcacatctttgcactcttcaccccttctcttccctcagcttttagtttaaacatcacctttctgataagccctgctgaaaatggccaccctcagtcatgacggagaacaagtctttcctattttattcaagaaaatgcatgatgcaatctattttaaatgatcatggttttaattttattttcctgataatggtctatctctccactgatttataagatttgtaagagcaggggtggatcattctggtcactgctgagtccccagcatttagaacaggggctgacacagcacaaaacaacgttagttgggaatgtacaagcaaacccagcacaccttcagaggggtgctcaggaaacagccctcccacctttcttcacccctcacagctgtgggatcttcctaaccatttcggtgtcccaggatagaggatgagtttattcacccctccccagcaggggagttgccaggattaaatgagatcccagaatgccctggtataccctgaaggctctgggacacaggtgagctggtccccagggatttggaaacaggaaaacaaatatgactccaccctgcctcccatccagcctctgcctagaggagttattttattttattttactttttttttttttttgagacggagtcttgctctgtcgcccaggctggagtgcaatggcgcaatctcagctcattgcaactcctgcctcctgggttcaagcgattctcctgcctcagcctcccgagtagctgggactacaggtgtgttttttgtatttttagtaattttttgtacttttagtagaaacgggtttcaccgtgttagccaggatggtcttgatctcccgacctcgtgatccacctgcctcagcctcccaaagtgctgggattacaggcataagccaccacgcccagcctctagaggagttattttacttacttacttatttatttattacacaggatctcactctgtcacccaacctggagtgcagtggcacaatcacgtttcactgtaacctgaactcctgggctcaagtgatcctcctacctcagcttcctaagtagctgggaccacaagctcgtaccaccatgcccgctatctttttctctttgtaaagacagggtcttactatgtcatccaggctgttctcaaactcctggcctcaagcaatcctcccgtcttggcctcccaaagtgctaggattacagacatgagccagctcacccagctgaggagttattttttgacactggtgaattcagatcaaaagggatttctaagaaaggtgctggacccaggccgggcgcggtggctcatgcctgtaatctcagcactttgggaggccgaggcaggtggattatctgaggtcaggagttcgagaccagcctgaccaacatggagaaaccctgtctctactaaaaatacaaaattagccaggcatagtagcgcatgcctgtaatcccagctacttgggaggctgaggcaggagaatcgcttgaacccgggaggtggaggttgcagtgagccgagatcgtgccatcgcactcaatcctgggcaacgagtgaaactctgcctcaaaaaaagaaaaaaaaagaaaggtgctggacgcctaggacgcagaggggtgtttcaccccaaatcaagtagcaccaagccctcccaggccttgggtgcaagcatattaaaggcctctttccctctctgtctccattgtttacactccactgagcatccgcaatgtgccacacactgttctaagcgtcttacacatattaaattatttaatcctcacaacaactttatgaagtgagcgcaattatgagcccattttatggagcaggaagttgaggcagggttttaggtagcttttctggggtagcactgtgggttggagcggaggtggagtgcactcttaggccagctggctctaggggctcttcaccactaggccgcactgcctctagcaaagggacgcggggaagctcagcagaccttaggcctcccaagggcgccacggtggttcctttgagcccagagtcagctcttaagtccataggccttcctgaagcttctgaaccacttgcccatagctgggcctcaggctggctctcagtagaatgtggagaatggagattcccgcatgtccacttctcctaaaggttttataaggcagtgctgggaatgtgctttataaaaaaggggaagcaccccgacaacagtcactgtttgctcttttaagcaccatcctgagaaggaggaatgttcttcccatttcataggtggggaaaccgaggctcagaagagcaaatttttggccgggcgcggtggctcacgcctgtaatcccagcactttgggaggccgaggcgggtggatcacgaggtcaggagatcgagaccatcctggctaacaaggtgaaaccccgtctctactaaaaatacaaaaaattagccgggcgtggtgcgggcgcctgtagtcccagctactcgggaggctgaggcaggagaatggcgtgaacccgggaggcggagcttgcagtgagccgagatcgcgccaccgccctccagcctgggcgacagagcaagactctgtctcaaaaaaaaaaaaaaaaagagcaaattttttttccaaggtgatagggagagtccgtggctgatgtctgcactgaccagacgcccctagggggccagcgagggcgggtcccaggtgcagcggatgcagaggagagaggcccgggcgcggcgcgggggatggtgcgatcccgggcccgagggcatcagacggcggctgattagctccggtttgcatcacccggaccgggggattagctccggtttgcatcacccggaccgggggattagctccggtttgcatcacccggaccgggggccgggcgcgcacgagactcgcagcggaagtggaggcggctccgcgcgcgtccgctgctaggacccgggcagggctggagctgggctgggatcccgagctcggcagcagcgcagcgggccggcccacctgctggtgccctggaggctctgagccccggcggcgcccgggcccacgcggaacgacggggcgaggtactcggcggggtgcggcctgcggactcgcccggaggccggggggcgggagggggcggccggggaagggggcgccggaagcctctgggcgtctgcgtgttgccgcgtgttacacgcacgcacgccccttacacaccttttcacagaccccgccgtcggggcgcggccaggtcagatcccttttgatccgggcctgggctgagtgctccccccgggcttcaggtgacgcggccccgcggagcgtggggtcgcccgagttgggctggggaagccagggacggaggtgtccggccgtcacccctagaggagggcgtgcgggggtctgttttgcgtgagtgcgggataggggagtcgtgtggtgcggtgaggggcttgtggggggcactggaggactctgggggtggcgggggatccgagggggtcctcgtgaacccgcaggggagagtcctgggtgagggtgggtcccgagcacctgtgtctcaggagatggtgagagctgtctggagggctgggcacttggtggcaggggttggcggtgcaggggacaccgccgggacagggctggggtgccctggagcgggggagccgagggagtgggagcgggggcgcagcgcgcgatctctggcccggcagggccgctggttctccccagtgcgcggctccgggtttgcaggtggacggtgcgcgcgtgtctgcggtgtgtgctgtgcctgcagaccggggagggcgggggacgacagccacctccttccctctgcctcacccccctcctgtcccagggccgcgcttcaatttccgctgaaacttctgactcggacacccgccgcctttcgcttgggctcccacgggaggggcctggctgcggggggcggggcggggtgggggtgcggccttgctcgggtagaccatgggtgtgacagctgggagggctgtgtgtgtgtgtgtgtgtgtgtgtgtgcgtgcgcgcgcgcgcttgcgcttgatgtaacccgccctcatttccctgggtcccgagtgtggcagggaacagcaagaggtagatattaggggctgctttcattccacatcacagattctattctgcagtgtggtctgcaaaatgccttgcccaagatgtatagactcagttaccgcatctgtccccatctgggtggagcttatcccaggccccaacaggctctgagggatggccggggccaaggcagcctggactactgatgtggcacaggccagag

SEQ ID NO: 947 - DNA, 6000 bp, Homo sapiens
catcttggaggaagctagatgctacaaactctaaattgtatattgcctatttctaaactgtatataagtagaatcttcctacattattcttttgccattttttccattcaatatgtttctgagattccctttttttttttttttgagagggtgtcttactctgtcacccaggctggagtacagtggtatgatcacagctcactgtagccttgacctcccaggcttaagcgattcttttgcctcaatctactcagttgctagggacaacaggtgtatgccaccaggcctggctaattgttctttttctgtttttgtttttgttttattttgtagagagggggtctcactatattgcctaggctggtattgaactcctgggctcaagcatctttccgccttggactcccaaagtggtgggattacaggtgtgagccaccatggctggtctgtttctgggattcttcttttttttttgaggcagagtctcactctgttgcccaggctggagtgtggtggcatgctctcagctcattgcaaactctgtctcctgggttcaagtgattctcctgcctcagcctcctgagtagctgggattacaggcacctgccaccatgcctagctaatttttgtatttgtagtagagacggactttcaccatgttggccaggctggtcttgaacccctgacctcgtgatccacccgccttggcctcccaaagtgttggtactacagacgtgagccactgtgcccggccaaagttagcatgtttttagatagtgttatataattaaaaataatagctggacgcaatggctcacgcctgtaatcccagcactttgagaggccgaggccggcggatcacaaagtcaggagttcgagaccagcctgaccaacatggtgagacaggagaatcacttgaagccgggaggcacaggttgcagtaagccgaggttgtgccactgcactccggccttggcgatagaacaagactctgtatcaaaaaaaaaaaaaaaaaaaagagggaggctgaggccagagaatcgcttgaacccaggaggcagaggttgcagtgagccaagatcatgccactgcactccagcctgggcaacagagcaagactccatctcaaaaaaaaaaaaaaaagaaaaagaaaaaagaaaaaaaatacaaagttatgtgtagacaacatagagaagtataaaaaagaaaacttattttctttagatttaaatgtaacttattttctttaaattagattccagtcaaagatcatttgagagccattttcaagacttgcaaaattctttttccaaaatatgtatccatctttccaaaatataaatttcttcatgttctttctggtttaaaaaaatctttgctggctcctctggtgctatttgatgtgctgctcgcatggatacacatttatattccatcccctctccaccactcccctcagccatcccaatttatttccaggacaccatgggctctcacgctgggctgccaggccttcgctcaagcaatatcttctgcttaaaatgctcctacatcctttctcacccaagcaaaattctattcttttgagggccagttcagtaaagcccctatctgtggacagagtttatctgccctctgctgggctcccaaagcacactgaggcttccataatgatagttttcacattgagataattgtggcaccataggttcaaaaatgtaaatcagaccgggcgcgctggctcacacctgtaatcccagcactttgggaggccaaggtgggcggatcacgaggtcaggagttcgagactagcctgaccaactggtgaaaccccgtctctactaaaaatacaaaaattagccgggcgtggtggcaggtgcctgtaatcccagctactcaggaggctgaggcaggagaatcacttgaacccaggaggcgaaggctgcagtgagccgagatcgcaccaccgcactccagcttgggtgacagagcaagactccatctcgaaaaacagcaaaaaaaatgtaaatcagagccaggtgtggtggctaatgcctgtaattccaggactttgggaggccgacatagacagatcacttgagcccaggagtttgagaccagcctgggcaacatggggaaactccattctctacaaaaaatacaaaaattagctgggtgtggaggtgcgagcctgtattcacaactactggggaggctgaggtgggaggatcacctgggatggggaggtcgaggctgctgtgagctgagatcacaccattgcactgcaggctgggtgacataccctgtctcaaaaaaaaaaaaaaaaaaaaggccgggcacggtggctcatgtctgtaatcccagcactttgggaggctgaggcagtcggatcacctgaggtcagcagtttgagaccagcctggccaaaatggtgaaaccctgtctctactaaaaatacaaaaattagccgggcgtggtggtgtgtacctgtagtcccagatactagggaggctgaggcaggacaatcacttgaacctggcgggcagagtttacagtgagccaagatagcaccactgcactccagcctgtgcaacagagcaagactccatctcgaacaaacaacaataacaaaaaaaaaaaaaaaaatgaggaaagagttcaacagaaagaccacctgaaaaaggggtaaacaatatgaagaaaattcaccaatacaagatccaccaccctccaaagaaagactaaaaaatatgacaaattgctcaacttcattcataataaaaaaagaaatatgaaagtgccttcggtttttacccatctaattggcaaggataaaacatttgataacacactgtgtggttcagggtgtaaggaaattggcggggcgcggtggctcacgcctgtaaacgattctcctgtaagcgagtctgctgcctcagcctcccgagtagctgggattacaggcatgcgccaccacgcccagctaattttttgtatttttagtagagacggggtttcaccacattggccacgctggtcttgaactcctaacctcaggtgatccgcccgcctcggcctcccaaagtgctgggattacgggcgtgagccaccgcgcccggcctgtcctatggagtttacaattaataactctcttaatcatcacaatagctcaacgagagaggttggtactattacccattttacaattgaggacattgaagcacagagcagttgagaaacttgcctaactagcagagttagaatccagacaaagtgcttaaccacaaggcgatgcttcttctatatataaactgacggacggatgaaataggctgattgactgatgagtgactgactgactgactgaatgaataaatggaaatgtgattataaatgttgattttttgcgcctcccgattccccagatctaccgcgagggggcgatctctccccggtcctgatgccagtcactcaaggcgcgcactccctttgcgtctcgggctcgcgcgcgttgccgcggcaccggaagtgactgagcttgcaagttcccctgtctcttcaggggaaactgaggccggcttgttcgggagagacggcgcgagcagtcagccaggtaggccggcagccaggtaggccggcccgggtccgcggcgcggaactcggccgcgaagagctcttgcgtctggaagctaccgggccgatgaagggggatgtggccccccacggctcgcggggctcgcaggtgagagcgccgcctcccctgtgcgtgacagccgttgcgcccaataggagccttcgccgtcccgcttccgtgccggctgggctcgctgattggctgcgctggggcggaccgccgggggcgaggcccctcctctcaggaaggtctagggggcgcccccgggggagggcggttgcctagcaacggggcggtggctcggcgggtacccggcctagtgagctcgagaagccgctaggccgcagccggcccaccctgggctccggagaggtgcagcccccggccccggagccctcccgggggcgccagaaagccactttgggcctgtccccaggaaaacgtggtctcagctgtggggccgtcgagcaggcctcgacccctcttcctgacctgaggagaggcccagcgcctcaccctcacccagtctttgtgcagggcgccggcggccattgtgtccgggcggggaatggaggacccggcaatccccaactgccacgttctgggcctttggggaattcagagcaaaccagcggcatttgttgggggtctccggccttcaacatcacagacaggcctgggggtggccttcccaaagtcagattgcagatctgaggcagtttccccctccctgcgtccctcactgaaaccttgaaccccattgagaagtccctttagggtttcggacgcctccacctcaccctgggctggtgcttaaatagaaaaaagaaaaacaaaaaccaactaaatccataccagccacctccgggagagtactcctggctcccagtaggaggcggagagccaaggggcgtgcaagagagagggggctgggctcccgggtggcaggaggccgcggctgcggagcggccgccctcgatccgggcgatggaggaggaagcaagcgagggggctggttcctgagcttcgcaattcctgtgtcgccttctgggctcccagcctgccgggtcgcatgatccctccggccggagctggtttttttgccagccaccgcgaggccggctgagttaccggcatccccgcagccacctcctctcccgacctgtgatacaaaagatcttccgggggctgcacctgcctgcctttgcctaaggcggatttgaatgtaggtggtgcgggggagcgggagtggggcgggggggactgcccagggagtgactttccgaggaaggcatttcggagaagacgggggtagaaaaggctggtgggagattcagagtccactggtgctttcgatttgacttaagtgaagtatcttggaacctagacccagaccttcgtaagacccacaaagaaaccagttctggtacctggagggggaatggaatttttagggtaaatggcatgcatattaattatttttttttcctgaagctctttctctcccttcagaatcttatcttggctttggatcttagaagagaatcactaaccagagacgagactcagtgagtgagcaggtgttttggacaatggactggttgagcccatccctattataaaaatgtctcagagcaaccgggagctggtggttgactttctctcctacaagctttcccagaaaggatacagctggagtcagtttagtgatgtggaagagaacaggactgaggccccagaagggactgaatcggagatggagacccccagtgccatcaatggcaacccatcctggcacctggcagacagccccgcggtgaatggagccactggccacagcagcagtttggatgcccgggaggtgatccccatggcagcagtaaagcaagcgctgagggaggcaggcgacgagtttgaactgcggtaccggcgggcattcagtgacctgacatcccagctccacatcaccccagggacagcatatcagagctttgaacaggtagtgaatgaactcttccgggatggggtaaactggggtcgcattgtggcctttttctccttcggcggggcactgtgcgtggaaagcgtagacaaggagatgcaggtattggtgagtcggatcgcagcttggatggccacttacctgaatgaccacctagagccttggatccaggagaacggcggctgggtaagaaccaagccccttgtgtgtcccttttctttggcctctggtcagagatccccaacagcccttcttctgtatctctttctgttgtgttgggtgattgttggagacgttgatagttgaggaaacctgactggcctcatttcaccacaagaggttaactccttggaaatacaaatga

SEQ ID NO: 948 - DNA, 6000 bp, Homo sapiens
aataatgtattatttcatacaatttctgagcatcaggaatccagcttaatggagtggttctggttcagggtctctaataaggttgtcatcacctgaaggcttgactggggcaggaggaccctcacatgactgtcggcctctccatagggctgctcccaacatggcagctggcttcccccagagtgagagagagaccacaaacacaaagacggaagccacaatcttttgggggtttttgttttgttttttgtttttttttgagatggagtctccctctgtcacccaggctggagtgcagtggtgggatctcggcctactgcaagctccacctcccgagttcatgccattctcctgcctcagcctcctgagtagctgggactacaggcgcccaccaccacgcccagctaattttgttttttttatttttagtagagatggggttataccatgttagccaggatggtctcaatctcctgacctcatgatccacccgcctcggcctcccaaagtgctgagattacaggtatgagccaccgcgcccagctgaagccacaatctttcgtaacaaagtcttgaaagtgacataaccccagcttgggcaatatggcgaaacaccgtctctacaaaaaaatacaaaaattagctgggtgtggtggcacatgcctgtggtcccagctactagggagactgaggtgggaggattgcttgggcctgggaggtcaaggctgcagtgagccgtgattgtgtcactgcactacagcctgggcaacagcgagaccctgtcaagaaaagaaagaaagaaagagagagagagagagaagaagggagggaaagaaacattccatcgctgtaatttgtcattagtcacacagaacaactgtggttcagtgtgggagggaaacacacaaaggcatgaatacgaagaggcagggatatttaggtgccatcttggaggaagctagatgctacaaactctaaattgtatattgcctatttctaaactgtatataagtagaatcttcctacattattcttttgccattttttccattcaatatgtttctgagattccctttttttttttttttgagagggtgtcttactctgtcacccaggctggagtacagtggtatgatcacagctcactgtagccttgacctcccaggcttaagcgattcttttgcctcaatctactcagttgctagggacaacaggtgtatgccaccaggcctggctaattgttctttttctgtttttgtttttgttttattttgtagagagggggtctcactatattgcctaggctggtattgaactcctgggctcaagcatctttccgccttggactcccaaagtggtgggattacaggtgtgagccaccatggctggtctgtttctgggattcttcttttttttttgaggcagagtctcactctgttgcccaggctggagtgtggtggcatgctctcagctcattgcaaactctgtctcctgggttcaagtgattctcctgcctcagcctcctgagtagctgggattacaggcacctgccaccatgcctagctaatttttgtatttgtagtagagacggactttcaccatgttggccaggctggtcttgaacccctgacctcgtgatccacccgccttggcctcccaaagtgttggtactacagacgtgagccactgtgcccggccaaagttagcatgtttttagatagtgttatataattaaaaataatagctggacgcaatggctcacgcctgtaatcccagcactttgagaggccgaggccggcggatcacaaagtcaggagttcgagaccagcctgaccaacatggtgagacaggagaatcacttgaagccgggaggcacaggttgcagtaagccgaggttgtgccactgcactccggccttggcgatagaacaagactctgtatcaaaaaaaaaaaaaaaaaaaagagggaggctgaggccagagaatcgcttgaacccaggaggcagaggttgcagtgagccaagatcatgccactgcactccagcctgggcaacagagcaagactccatctcaaaaaaaaaaaaaaaagaaaaagaaaaaagaaaaaaaatacaaagttatgtgtagacaacatagagaagtataaaaaagaaaacttattttctttagatttaaatgtaacttattttctttaaattagattccagtcaaagatcatttgagagccattttcaagacttgcaaaattctttttccaaaatatgtatccatctttccaaaatataaatttcttcatgttctttctggtttaaaaaaatctttgctggctcctctggtgctatttgatgtgctgctcgcatggatacacatttatattccatcccctctccaccactcccctcagccatcccaatttatttccaggacaccatgggctctcacgctgggctgccaggccttcgctcaagcaatatcttctgcttaaaatgctcctacatcctttctcacccaagcaaaattctattcttttgagggccagttcagtaaagcccctatctgtggacagagtttatctgccctctgctgggctcccaaagcacactgaggcttccataatgatagttttcacattgagataattgtggcaccataggttcaaaaatgtaaatcagaccgggcgcgctggctcacacctgtaatcccagcactttgggaggccaaggtgggcggatcacgaggtcaggagttcgagactagcctgaccaactggtgaaaccccgtctctactaaaaatacaaaaattagccgggcgtggtggcaggtgcctgtaatcccagctactcaggaggctgaggcaggagaatcacttgaacccaggaggcgaaggctgcagtgagccgagatcgcaccaccgcactccagcttgggtgacagagcaagactccatctcgaaaaacagcaaaaaaaatgtaaatcagagccaggtgtggtggctaatgcctgtaattccaggactttgggaggccgacatagacagatcacttgagcccaggagtttgagaccagcctgggcaacatggggaaactccattctctacaaaaaatacaaaaattagctgggtgtggaggtgcgagcctgtattcacaactactggggaggctgaggtgggaggatcacctgggatggggaggtcgaggctgctgtgagctgagatcacaccattgcactgcaggctgggtgacataccctgtctcaaaaaaaaaaaaaaaaaaaaggccgggcacggtggctcatgtctgtaatcccagcactttgggaggctgaggcagtcggatcacctgaggtcagcagtttgagaccagcctggccaaaatggtgaaaccctgtctctactaaaaatacaaaaattagccgggcgtggtggtgtgtacctgtagtcccagatactagggaggctgaggcaggacaatcacttgaacctggcgggcagagtttacagtgagccaagatagcaccactgcactccagcctgtgcaacagagcaagactccatctcgaacaaacaacaataacaaaaaaaaaaaaaaaaatgaggaaagagttcaacagaaagaccacctgaaaaaggggtaaacaatatgaagaaaattcaccaatacaagatccaccaccctccaaagaaagactaaaaaatatgacaaattgctcaacttcattcataataaaaaaagaaatatgaaagtgccttcggtttttacccatctaattggcaaggataaaacatttgataacacactgtgtggttcagggtgtaaggaaattggcggggcgcggtggctcacgcctgtaaacgattctcctgtaagcgagtctgctgcctcagcctcccgagtagctgggattacaggcatgcgccaccacgcccagctaattttttgtatttttagtagagacggggtttcaccacattggccacgctggtcttgaactcctaacctcaggtgatccgcccgcctcggcctcccaaagtgctgggattacgggcgtgagccaccgcgcccggcctgtcctatggagtttacaattaataactctcttaatcatcacaatagctcaacgagagaggttggtactattacccattttacaattgaggacattgaagcacagagcagttgagaaacttgcctaactagcagagttagaatccagacaaagtgcttaaccacaaggcgatgcttcttctatatataaactgacggacggatgaaataggctgattgactgatgagtgactgactgactgactgaatgaataaatggaaatgtgattataaatgttgattttttgcgcctcccgattccccagatctaccgcgagggggcgatctctccccggtcctgatgccagtcactcaaggcgcgcactccctttgcgtctcgggctcgcgcgcgttgccgcggcaccggaagtgactgagcttgcaagttcccctgtctcttcaggggaaactgaggccggcttgttcgggagagacggcgcgagcagtcagccaggtaggccggcagccaggtaggccggcccgggtccgcggcgcggaactcggccgcgaagagctcttgcgtctggaagctaccgggccgatgaagggggatgtggccccccacggctcgcggggctcgcaggtgagagcgccgcctcccctgtgcgtgacagccgttgcgcccaataggagccttcgccgtcccgcttccgtgccggctgggctcgctgattggctgcgctggggcggaccgccgggggcgaggcccctcctctcaggaaggtctagggggcgcccccgggggagggcggttgcctagcaacggggcggtggctcggcgggtacccggcctagtgagctcgagaagccgctaggccgcagccggcccaccctgggctccggagaggtgcagcccccggccccggagccctcccgggggcgccagaaagccactttgggcctgtccccaggaaaacgtggtctcagctgtggggccgtcgagcaggcctcgacccctcttcctgacctgaggagaggcccagcgcctcaccctcacccagtctttgtgcagggcgccggcggccattgtgtccgggcggggaatggaggacccggcaatccccaactgccacgttctgggcctttggggaattcagagcaaaccagcggcatttgttgggggtctccggccttcaacatcacagacaggcctgggggtggccttcccaaagtcagattgcagatctgaggcagtttccccctccctgcgtccctcactgaaaccttgaaccccattgagaagtccctttagggtttcggacgcctccacctcaccctgggctggtgcttaaatagaaaaaagaaaaacaaaaaccaactaaatccataccagccacctccgggagagtactcctggctcccagtaggaggcggagagccaaggggcgtgcaagagagagggggctgggctcccgggtggcaggaggccgcggctgcggagcggccgccctcgatccgggcgatggaggaggaagcaagcgagggggctggttcctgagcttcgcaattcctgtgtcgccttctgggctcccagcctgccgggtcgcatgatccctccggccggagctggtttttttgccagccaccgcgaggccggctgagttaccggcatccccgcagccacctcctctcccgacctgtgatacaaaagatcttccgggggctgcacctgcctgcctttgcctaaggcggatttgaatgtaggtggtgcgggggagcgggagtggggcgggggggactgcccagggagtgactttccgaggaaggcatttcggagaagacgggggtagaaaaggctggtgggagattcagagtccactggtgctttcgatttgacttaagtgaagtatcttggaacctagacccagaccttcgtaagacccacaaagaaaccagt

SEQ ID NO: 949 - DNA, 6000 bp, Homo sapiens
acagagatcattatttttgaagcttccaatttcatcttgttccctaggttaatccaataccctctcgtgttaatgtccaatagctatcatgacttttttttttttttttgaaagagagtccctctctgttgcccaagctggagggcagtggcaggatctcagctccctgcaacctctgcctcctggatgcaagcaattctcacgcttcagcctccagagtatctgggactacatgtgcacaccaccacacccagcaaatttttagtagaaatggcgttttgccatgttggccagagtggtctcaaactcctggcctcaagtgatctgcccgccttggcctccagaagtgctgggattacaggcatgagccactgcacccagcctatcatgacttttgtgtttgttattctcttaccacgtaggtatataaggtatatatatatatatgttatctactattggagagcaaattacccccaaacttagcagcttaaaatcacaataatgtattatttcatacaatttctgagcatcaggaatccagcttaatggagtggttctggttcagggtctctaataaggttgtcatcacctgaaggcttgactggggcaggaggaccctcacatgactgtcggcctctccatagggctgctcccaacatggcagctggcttcccccagagtgagagagagaccacaaacacaaagacggaagccacaatcttttgggggtttttgttttgttttttgtttttttttgagatggagtctccctctgtcacccaggctggagtgcagtggtgggatctcggcctactgcaagctccacctcccgagttcatgccattctcctgcctcagcctcctgagtagctgggactacaggcgcccaccaccacgcccagctaattttgttttttttatttttagtagagatggggttataccatgttagccaggatggtctcaatctcctgacctcatgatccacccgcctcggcctcccaaagtgctgagattacaggtatgagccaccgcgcccagctgaagccacaatctttcgtaacaaagtcttgaaagtgacataaccccagcttgggcaatatggcgaaacaccgtctctacaaaaaaatacaaaaattagctgggtgtggtggcacatgcctgtggtcccagctactagggagactgaggtgggaggattgcttgggcctgggaggtcaaggctgcagtgagccgtgattgtgtcactgcactacagcctgggcaacagcgagaccctgtcaagaaaagaaagaaagaaagagagagagagagagaagaagggagggaaagaaacattccatcgctgtaatttgtcattagtcacacagaacaactgtggttcagtgtgggagggaaacacacaaaggcatgaatacgaagaggcagggatatttaggtgccatcttggaggaagctagatgctacaaactctaaattgtatattgcctatttctaaactgtatataagtagaatcttcctacattattcttttgccattttttccattcaatatgtttctgagattccctttttttttttttttgagagggtgtcttactctgtcacccaggctggagtacagtggtatgatcacagctcactgtagccttgacctcccaggcttaagcgattcttttgcctcaatctactcagttgctagggacaacaggtgtatgccaccaggcctggctaattgttctttttctgtttttgtttttgttttattttgtagagagggggtctcactatattgcctaggctggtattgaactcctgggctcaagcatctttccgccttggactcccaaagtggtgggattacaggtgtgagccaccatggctggtctgtttctgggattcttcttttttttttgaggcagagtctcactctgttgcccaggctggagtgtggtggcatgctctcagctcattgcaaactctgtctcctgggttcaagtgattctcctgcctcagcctcctgagtagctgggattacaggcacctgccaccatgcctagctaatttttgtatttgtagtagagacggactttcaccatgttggccaggctggtcttgaacccctgacctcgtgatccacccgccttggcctcccaaagtgttggtactacagacgtgagccactgtgcccggccaaagttagcatgtttttagatagtgttatataattaaaaataatagctggacgcaatggctcacgcctgtaatcccagcactttgagaggccgaggccggcggatcacaaagtcaggagttcgagaccagcctgaccaacatggtgagacaggagaatcacttgaagccgggaggcacaggttgcagtaagccgaggttgtgccactgcactccggccttggcgatagaacaagactctgtatcaaaaaaaaaaaaaaaaaaaagagggaggctgaggccagagaatcgcttgaacccaggaggcagaggttgcagtgagccaagatcatgccactgcactccagcctgggcaacagagcaagactccatctcaaaaaaaaaaaaaaaagaaaaagaaaaaagaaaaaaaatacaaagttatgtgtagacaacatagagaagtataaaaaagaaaacttattttctttagatttaaatgtaacttattttctttaaattagattccagtcaaagatcatttgagagccattttcaagacttgcaaaattctttttccaaaatatgtatccatctttccaaaatataaatttcttcatgttctttctggtttaaaaaaatctttgctggctcctctggtgctatttgatgtgctgctcgcatggatacacatttatattccatcccctctccaccactcccctcagccatcccaatttatttccaggacaccatgggctctcacgctgggctgccaggccttcgctcaagcaatatcttctgcttaaaatgctcctacatcctttctcacccaagcaaaattctattcttttgagggccagttcagtaaagcccctatctgtggacagagtttatctgccctctgctgggctcccaaagcacactgaggcttccataatgatagttttcacattgagataattgtggcaccataggttcaaaaatgtaaatcagaccgggcgcgctggctcacacctgtaatcccagcactttgggaggccaaggtgggcggatcacgaggtcaggagttcgagactagcctgaccaactggtgaaaccccgtctctactaaaaatacaaaaattagccgggcgtggtggcaggtgcctgtaatcccagctactcaggaggctgaggcaggagaatcacttgaacccaggaggcgaaggctgcagtgagccgagatcgcaccaccgcactccagcttgggtgacagagcaagactccatctcgaaaaacagcaaaaaaaatgtaaatcagagccaggtgtggtggctaatgcctgtaattccaggactttgggaggccgacatagacagatcacttgagcccaggagtttgagaccagcctgggcaacatggggaaactccattctctacaaaaaatacaaaaattagctgggtgtggaggtgcgagcctgtattcacaactactggggaggctgaggtgggaggatcacctgggatggggaggtcgaggctgctgtgagctgagatcacaccattgcactgcaggctgggtgacataccctgtctcaaaaaaaaaaaaaaaaaaaaggccgggcacggtggctcatgtctgtaatcccagcactttgggaggctgaggcagtcggatcacctgaggtcagcagtttgagaccagcctggccaaaatggtgaaaccctgtctctactaaaaatacaaaaattagccgggcgtggtggtgtgtacctgtagtcccagatactagggaggctgaggcaggacaatcacttgaacctggcgggcagagtttacagtgagccaagatagcaccactgcactccagcctgtgcaacagagcaagactccatctcgaacaaacaacaataacaaaaaaaaaaaaaaaaatgaggaaagagttcaacagaaagaccacctgaaaaaggggtaaacaatatgaagaaaattcaccaatacaagatccaccaccctccaaagaaagactaaaaaatatgacaaattgctcaacttcattcataataaaaaaagaaatatgaaagtgccttcggtttttacccatctaattggcaaggataaaacatttgataacacactgtgtggttcagggtgtaaggaaattggcggggcgcggtggctcacgcctgtaaacgattctcctgtaagcgagtctgctgcctcagcctcccgagtagctgggattacaggcatgcgccaccacgcccagctaattttttgtatttttagtagagacggggtttcaccacattggccacgctggtcttgaactcctaacctcaggtgatccgcccgcctcggcctcccaaagtgctgggattacgggcgtgagccaccgcgcccggcctgtcctatggagtttacaattaataactctcttaatcatcacaatagctcaacgagagaggttggtactattacccattttacaattgaggacattgaagcacagagcagttgagaaacttgcctaactagcagagttagaatccagacaaagtgcttaaccacaaggcgatgcttcttctatatataaactgacggacggatgaaataggctgattgactgatgagtgactgactgactgactgaatgaataaatggaaatgtgattataaatgttgattttttgcgcctcccgattccccagatctaccgcgagggggcgatctctccccggtcctgatgccagtcactcaaggcgcgcactccctttgcgtctcgggctcgcgcgcgttgccgcggcaccggaagtgactgagcttgcaagttcccctgtctcttcaggggaaactgaggccggcttgttcgggagagacggcgcgagcagtcagccaggtaggccggcagccaggtaggccggcccgggtccgcggcgcggaactcggccgcgaagagctcttgcgtctggaagctaccgggccgatgaagggggatgtggccccccacggctcgcggggctcgcaggtgagagcgccgcctcccctgtgcgtgacagccgttgcgcccaataggagccttcgccgtcccgcttccgtgccggctgggctcgctgattggctgcgctggggcggaccgccgggggcgaggcccctcctctcaggaaggtctagggggcgcccccgggggagggcggttgcctagcaacggggcggtggctcggcgggtacccggcctagtgagctcgagaagccgctaggccgcagccggcccaccctgggctccggagaggtgcagcccccggccccggagccctcccgggggcgccagaaagccactttgggcctgtccccaggaaaacgtggtctcagctgtggggccgtcgagcaggcctcgacccctcttcctgacctgaggagaggcccagcgcctcaccctcacccagtctttgtgcagggcgccggcggccattgtgtccgggcggggaatggaggacccggcaatccccaactgccacgttctgggcctttggggaattcagagcaaaccagcggcatttgttgggggtctccggccttcaacatcacagacaggcctgggggtggccttcccaaagtcagattgcagatctgaggcagtttccccctccctgcgtccctcactgaaaccttgaaccccattgagaagtccctttagggtttcggacgcctccacctcaccctgggctggtgcttaaatagaaaaaagaaaaacaaaaaccaactaaatccataccagccacctccgggagagtactcctggctcccagtaggaggcggagagccaaggggcgtgcaagaga

SEQ ID NO: 950 - DNA, 6000 bp, Homo sapiens
agtgataagccctgaacacagataactgacaagttgttttttctttttttctttctttctttcttttttttttttttttgagacggagtcttgctctgtcaccaggctgatgtggcgcgatctcggctcactgcaacctctgactccctgattcaagcgattctcctgcctcagcctccccagtagctgggattacaggcatgcgtcacaccacacccagctaatttttgtatttttagtagaggtggagtttcaccgtgttcgccaggatggtctcaatctcctgacctcgtggtccacctgcctgggcctcccaaagtactgggattacaggcgtgagccaccgcacctggccaggttgttttttctatgtaagagtagattatatcctcactcccatttacaatagttcagagcccattatgaactccagaactactacagttcctttgctggattggaattttgtcacgaatatactctgttgaataaggggcattgatcaggctctgcagactgtcaagggggattttgctgcaatgctgggggatttgggcaggatttttcttactgttagcactgcacctttgcattgattcactgttcttccaattctgtttagaaatctgctgtctggtaatctcacttttgattgcagtttatttgcttttggagtatagtgttcattaggatggtaatagtctggcccaagaggagatgagccagaaatacctgtattctttccctggagggaagaggactggcttggctgggatgggaagatcaagtggggggagggggtgttgattgttcagttctttttttttttctttcattttttcactttttggcctatcattcttgtttcctataactgttcagttctgacactattgtttatttttactatagtggcattaaaaaaagaacctgggggccgggcacggtggcttacgcttgtaatcccagcactttgggaggccgaggcaggtggatcacaaggtcaggagatcgagagcatcctggctaacacaggtgaaaccccgtctctactaaaaatataaaaaattagccgggcgtggtggcaggtgcctgtagtcccagttacttgggaggctgaggcaggagaatggcgtgaacccaggaggcggagcttgcagtgagcagagatcacaccactgtgctgcagcctgggcgacagagctagacttcgtctcaaaaaaaaaaaaaaaaaaaaaaaagaagctgggcctggcacagtggctcacatctgtaatctcagccctttaggaggccaaggcaggaggatcatgtgaggccaggagttccagaccagcctggtcaacatagcaaaaccctgtctctacaaaaaacttaaaaattagccaggtgtggtggcatgtgactgtagtcccagttgctctggaggctgaagtgggaggattgcttgagccggagttagaggctgcagtaagccatgatctgtgccactacactccagcctcatattttaaaaataaaaaagctgatgatgttgtggaaagtcctcaaatagcccaagtggtcaactgctctcttgtgggaccagcaacctgacacatgagcatttgccagagtggaaaatggcctttctgaaagacagaacactcaacaacaaatatttttctaaaggatacttgatcttttccaagttgctttattttttttttttgagacagagtctcattctattgcccgggctggagtgcagtggtgtgaccacgacccaccgcagcctcgacctcctgggctcaggtaattctccctggtagctgggattacaggcatgcaccactatgcccagctaatttttttttttttttttgtattttttgtagagacaggttctcactctgttgccagggttggtctcaaactcctgggctcaagggatcctcctgccttggtctcccaaaatgttgagattataggcatgagccaccacgcctggctggggttttgtttttgtttttttaacatttgtcacatttcacaaaggtatttcagaatctctgagaaaagtgctataatgtctaatgatactttatatttggacagcactttcgtttgttttttttggcggggggggtgggagaagtcaagtaacttacatatagtgaaatttacccttcttgagtatgcagttcagtgagttttgataaatgtgtaatggtagtgtaatcactaccacagtcaagacatggacaattttcattaccccacgaagtgccctcatgtgtggttagagtcagccctcccatcagcacagtcctggcagccactgacctggtttctgtccctactgttttgccttttccagaatgtcatttaagtgacatcattcattatggagacttgttttattttttattttttattttttgagaaggagtctcgctcttgttgcccaggctagagtgcaatgctgtgatttcggctcactgcaacctccgcctcccgggttcaagtgattctcctgcctcagcctcccgagtagttgggaccacaggcgtacaccaccatgcccagctaatttttttttttttttgagatggagtctcgccctgtcacccaggctagagtgcagtggcatgatctcggctcactgcaagctccgcctcccgggttcacgccattcccctgcctcagcctcccgagtatgcccggctaatttttgtatttttagtagagacggggtttccccatgttggccaggctagtctcaaactcctgacctcaagtaatccgcctgccttggcctcccaaagtgctgggattacaggtgtgagccaccgcgcccagcccattatgtagctttttgtgccccacttctcccacttagcataatgtttttgagattcatctgtattactagtgcatctgtagttctttcctttttatggctgggttgttttttgtttttgtttttgttttgtttttgagatagggtctcactctgttgcccagggtggagtgcactatcgcagctctccgcaacctccacctcccaggctcaagatatcctcccacctcagcctcctgagtagctggaaatacaagtgtgtgtgccaccatgccggttaatttttttttcttttttttttttttttttcaatttttgttggaagcaccatggagccgcctgagcctggctgagcctaaaagccctgtggtgcatgcctggccaatttttgtattttttagtagagacgggattttgccatgtcgcccaggctggtctggaactcctggtctcaggtgattctcctgcttcggcctcccaagtagctggggttacaggcatgtgccaccatgctcagccctcccgtcagcacagtcctggcagccactggcctggtttctgtccctactgttttgccttttactggtctccatgctcacctaaatttttttgtattttttgtagagacagattctcgcaatgttgctcaggctagtctcgaactcccggcttcaagcaatcctcccacctcagtcctccaaagttctggaattacaggcatgaatcactgtgccagtgttgcattccaaagcatggatacatcacagtttttaaaatgtttaccaatgtaaatggcccgttttaatatgagaataactaatgttgaagagagtgctacaaagaggatcatggtcgtgatgtgtagacacaaaaatgaggttagaagacagtaaggtgagggccgggcacagtggctcatgcttgtaatcctagcactttgggaggtgcaggtgggaggattgcttgagcccaggagctggagacaagtccaggcaacacagcgagtccctgcctttataaaaaattagaaattaaaaaagccttggcgtggtggctcacgcctgtaatcccagcactttgggaggccgagacgggtggatcacgaagtcaggagttcaagaccagcttggccaagatggtgaaaccctgtctctactaaaaataaaaaaaaaaaattagccagtcgtggtggtggcacctgtaatcccagctactcaggaggctgaggcaggagaatcgcttgaacccaggaggcggagtttgcagtaagccaaggtcgcgccactgcactccagcctgggcaacagagtaagactctgtctcaaaaaaaaacaaaaaacaaaaaaacaaaaaaaaaacaggccggcgcagtggctcatgcctataatccaagtactttgggaggccaaggcaggcggatcgcaaagtcaggagttcgagaccagcctggccaatatggtgaaaccctgtttctgctaaaaatacaaaaaatagccaggtgtggtggcaagcgcctgtagtcccagctactcaggaggctgaggcaggagaatcgcttgaacccgggaggcagaagttgcagtgagctgagattgcgccactgcactccagcctgggcaacagagcgagactccatctcaaagaaaaaaaagccaaaacatagtaaggtgagggtgaaacttctcttttaaaaaaatgtttacatagaaacaaactaaatggacaaaatggatataaacaaaaatgttatcggtggttatttttgggcagtagaattataggtttttaatttcttttgcttatttatagtttcaaaaattttcaattttaatataaattaatgtgctctatttatagagacaatacatgaaatatacttaataaaaattcaaatgttatagaactgaaaaagatgaaaagtaaaaacaacctattccccagaggtagccactgtccatagtttctattttagattctttcctttatacaagattattatagcttctattttttggtgtatgaactgtagtcctagaggattttattagttatgagttctataactaagatccatcatcttagttgctaagaacgtagatactgagaacatcatttaaaaaaacatttttggctggcacctctatgatcactggagtctcgcgggtccctcaggctgcacagggacaagtaaaggctacatccagatgctgggaatgcactgacgcccattcctggaaactgggctcccactcagcccctgggagcagcagccgccagcccctcgggacctccatctccaccctgctgagccacccgggttgggccaggatcccggcaggctgatcccgtcctccactgagacctgaaaaatggcctcggggcaaggcccaggtcctcccaggcaggagtgcggagagcctgccctgccctctgcttctgaggagcaggtagcccaggacacagaggaggttttccgcagctacgttttttaccaccatcagcaggaacaggaggctgaaggggcggctgcccctgccgacccagagatggtcaccttacctctgcaacctagcagcaccatggggcaggtgggacggcagctcgccatcattggggacgacatcaaccgacgctatgactcagagttccagaccatgttgcagcacctgcagcccacggcagagaatgcctatgagtacttcaccaagattgcctccagcctgtttgagagtggcatcaattggggccgtgtggtggctcttctgggcttcagctaccgtctggccctacacatctaccagcgtggcctgactggcttcctgggccaggtgacccgctttgtggtggacttcatgctgcatcactgcattgcccggtggattgcacagaggggtggctgggtggcagccctgaacttgggcaatggtcccatcctgaacgtgctggtggttctgggtgtggttctgttgggccagtttgtggtacgaagattcttcaaatcatgactcccaagggtgccctttggggtcccagttcagacccctgcctggacttaagcgaagtctttgccttctctgctcccttgcaggggtcccctctcaagagtacagaagctttagcaagtgtgcactccagcttcggagggcccctgtgtgggg

SEQ ID NO: 951 - DNA, 6000 bp, Homo sapiens
aaatttttttctgagacaggatcttgctctgttgcccaggctggagtgcagtggtgtgatcttggcttactgcagccccaacatcattggctcaagtgatcctcccacctcagcctcctgagtagctgggattccaggcacatgccaccatacccagctaatatttttatttttattttgtagaggcagggtcttactttgtttctcaggctggtttcaaactcctggcctcaagggatcctcctgtcttggtctcccacagtgctgggattatataggtaggaggcatcacacctggcctttgggtgagaatttgaaggtatttgagattgttatgaccaggaattaatgaatcaatcaatcagtagattagttggttcatttattaaatcaacaactatttagtgagtaacaattaagtgccaggtactgtgttaggttctgagtttactgtggtaaatgatacagcaatctttgctcttctggagcttagaatctggaagggaaagcagtccacaaatgggtaaaaagcaaacaaatataaaaacaaaaacaataagtgttctgaagataataatggtcaggaatgctgatagagaatcttgaaggggaggaactgtcttaaatcttgtggtcaggaaagattcctctgatgtgtgcaattaagctgagacctgaagggtgagcgccccaagtctcattcctgggggttcccaaagaattattaatggaccctctcatcaagataaaatgaaaatatcttaatctggcattcaagtttctccaagattagggttgccagataaaataaataatgcccatttaattctgaatttcagacagaaaacatttttagtatgttattaaatattgcatgagacaaatttataaaaaattcattatttgtctgaaattcagatttaactgggtgtcctgtatttttatttgctaaatctgttaaccctcttcgtgatcttctccagccagcctctccaccttttcttccacacatttgaagctctgtccacaaggaagggtccaattgccttgtctttgctcatgctgttccctctgcctgggtcaccattctcccactgtatcttcttggtaaactcttctttccctttaaacccctgtccagatgttacgttctcagggaaacctctagcagagcacattagccccagttcagggtgctcaccaaacctggttcttataggattttgccttataattctgtgttttagaactggtctctacaaaaacagacaagactgattgcctaaaaaggaaaggttataaggaattctctcattcttcctgccctctcccttgcccctatcccactcaactcctttttctttcttttttttttttttttttttgagagacaaggtcttgctctgtcacccaggatgcagtggcacaatcctggctcactgcaacctctgcctcctgggctcaagtgattctccagcctcagcctcctgagtagccgagactacaggcacgtgccaccacatctggctaaattttttttctatttttttgtagagacagggtctcactatgttgcccaggctggtctcgaactcctgggctcaagggatccgccttggtctcccaaagctctgggattacagacatgagccaccgtgcccagctgccaactccttacaatattaatataagacacacagcacttttctgtgccaggcactgtgccaagtgctttgcatacagcatttcatgtaaaccctccataaccttatgaggtagatttggttgaatctccactttgcaggtgagaaaatcaggcatgtagaggtgaagttcattgccactgtttccacatctgtaaaataagactcatatcaacattttctccatgaggttttcacccaaactagaatgtaggtttccagaaggcaggagctttgttttataaacttccatatcctcagagcccagaattgtgcctagcattgagtaggctctcagtaaatacttgttgaatgaatgaatgaatgaatgagtcatgttacagataaggaaagtgtaatttagggacagagaaagtaacttacccaaggacccatggctagatatggtggaacttccactagaaccagaatcagggtgtgttgggtagatgtttaacaactggctcggctgggtgcagtggctcatgcctgtaatcccagcactttgtgaggccaaggcggggggattgcttgagctcatgagtttgagaccagcctgggcagcatggtgaaactctatttctacaacaacagcaacaacaacaacaacaacaaaataagccaggcatggtggcgcacgcctgtagtcctagctatttgggaggctgaggtgggcttcagcccgggagggggaggttgcagtgagctgagatcccgccactgcactccagcctgggtgatagagcccgagcttgtctcaaaagcaaacaaagaaacaaaaaaaccctacaagtagctctctggaaaaacaacaacattaacaaccctgatttgtagcatttgctgatttacattgtacaaatactcctagcatggctgatttcaagctatcaacctggtgtcaatcagcttgcaagtttcctacaaatttaaccatgggcttttgtagacctgtctgtgcaagctggcatcaacataccatgaactagaacacaggggtctgggtccaaagggtacaccctcaccattactctctcctgtcttcccaaacaaggcacagtctatattctattttttttttttttttttgagacgtagtcttgctctgtcgccaggctggagtgcagtggtgccatcttggctcactacaatctccacctccctggttcaagcgattcccctgcctcagcctcccaagtagctgggactacaggcacgtgccaccacacctggctaattttttgtattttagtagagatgggttttcaccatgtgggccaggaagatctcaatctcctgacctcgtgatctgccctcctcggcctcccaaagtgctgggattacaggcgtgagctaccacacccggccgggcacagtccatattcttatataagtaggagggggaaagacacccaaatagactgaattcaatgcagattgcataggtgatcctttaaaaacataagcccagtcacaaaactaccttgcttaaaactttccttatgccgttagcataaaatccaatctctctctcttttttttttttttttttttgagacagagtcttgctctgtcacccaggctggagtgcagtggtggaatctcagctcactacagcctctgcctcctgggttcaagcgattctcctgcttcagcctcccaagtagaggcatgtgccaccatgcccagctaatttttgtaatttttagtagagacgaggtttcaccatggtggtcaggctggtctcaaactcctgacttcaagtgatctgcccgccttggcctcctaaagtgctgagcttacaggcgtgagccaccacgcccggccacgcctagccaaaatctaatctctttaccatggcacacaaggcccattatgaaacctctccctctaccaggcactgtactaggcttgggggatacagtggtgaacatgacacacacatgtcctgcttgcatagagcttgcaatccagtaaatgaggctgtcaagaaacaaatagtcaaccattaagcacaaaattacagaatgagatatatacgtagtggagcaggtacttggaaaaagaataatgaggagagaggttgattacctggaccagggtgagttgaagaagcccttgtaagaaagtgacatttgagacccgaaagatgagagaattggatgaggtatggtgctgatggccaggcagaaggggagaggatttgtcattctgaggaataagaataatttctgtataattggagccagtgcagatgggatggggaccaaaattataaatatgaagggcatataaatataatataatacataaatataattataaatataaaggacaggggcttatggaaggaggtttaatttcctttgaagatggagccttaagtcccaggtgcattctgatcttgtttaagatcagatgcactctgaatgattctcttccaattatgggcaactttctcctccagaaacctttttatatcacctgggtagcaaggggatcatctagtgaccgttagacttcgcatagatgagcagacacaagcctagagagggacatgtgatcaccaatagtttctcagccagtaatagttgtacagccttggaacaagtcactttttgagccagcactatctgatagaaattaatgggaaccacaaatgagagccacatgtgtaatttaaaactttctactaaccacatttaagaagtaaagagaaacaggtaaaattcattttataatatatgaatttgacccagtatatccaaaatatcatttcaacctgtaatcaatgtaagtcttagaaatctggtgtgtattttatttacacttatggcacatctcacttcggagtagccatatctcaagcgctcggtagccatatgtggctagtgagtaaagtattggatggtgcagttgggagcgtcagtttccttttctgtgaaatgaggataaatcactggaagctcgtgagagcgcacacgaaacacccggcactccgccctggacactagggacgcgcaatcaagtttggtttcttctggtccctgctctcccctcccgcccctcctctaagtctccgccccctttccccgccccctcaggctccaggcggaagcaaccctgttccaaatgcagcgcgctttacggcggcgcgtccttttaccgcggtgtggccggctcgcttgtcgctcgcacttttgccctattggctctgcggctccgctcgccgcactttacggcagtgtggctggagccgcggctgacgggcccgcggtctgggcgtgagtgcagggaagtggagtatttgctgggccgggtaccatggacgtgggcgaacttctgagctaccaggtatgaggggcagggagggccgagcgaccgcgttctcacctgggcaggggtcgcaggagccagagccctttcatctcacctcctctcgcctcactcccgggccctctaacttctcatgccacccggggtctcagcccctcgttttactttgctctccgaagccctcctgggccctttcgattcatcccttctcaagacctgagcccttcacctcctcttcctcaccctggggcctggttccctgaaactcctctgaaaccccagactatcctttttttcacaaccatgtcctctcagctctcatgtccccccagtcattgaggtgatggtggtggcggcggtgggagtgcactggtctcacttggatttgatctccagcttctccactgactggctatgtggcttttggacaagtcattccccccctctttgaaccaagtttttgtatctatatagtggagacactaataactgccttagtagggttgtttgaggactgtaccaactgatatgtatgaaagctggttttaaagtgtggaaagctgtgcttgtgtttactgcgatttgcaggagatgttgggaattctagcatggaatgagtttctaggaatcttgctcagggtcccccttgcctaggaaacttgtggggaaactgtatgggacctagagagcagaaagggcttgtccaaagtcactcagaaacaaggagctggaatttgagctcaggcgtactgacttccaccccaaagtttttcccccactttgattccataggagggtcattgcgaggagcagtagagctgcactgccgaatgtcgtagccactagccacataggctgttgattgcttgaaatgtgactagtctgaattgagaaatactgtaagtataaagacacatttgggttggagactagtatggaaaaagtgaaatttttatattga

SEQ ID NO: 952 - DNA, 6000 bp, Homo sapiens
cttgtgttcttgcccacaatgcatgtgatcagtctttaacatctttgccatttgttttgttgttatttctgtactcagtggttcctgcattagactctgttccttttaggagatggacggtgtcttgtttgtctctagtgcctaccacagtacttgccttgctgtaggtgttcagtaaacatgagagagctcatgtagtccctgtcgtctttattacatccccattgcttgaacctaaggatacattatgaggaagctatgctgcgggtaatgatactggaaatttaagaaattcagtttacttctttgaacaccagtatttccttcgcccgcttggtagatacacgtctctcaatttggagcagagtttctgcaggttatgttcaccatctacatcttaggtaccttagtgttacagttcattaactgggtttaagacaatgtgattttatttaaaaaaatcggtagtgttttccattcagacaaaatgtatatactattttagttttaaaatctgagcatatgaaaattgaaattgtgcataaagaacttttttttttcatgtcgaaaagcagttaggaaactacattgtgttttaaccttgagttcttgaattctcactggtgcagtgtctttcgtaattctctagatcagcgaggtgaaattaagatgaaaattgctagagtgtattcggatgaaactttccggttgagatcagaaacattcaaatttattttcccatatatccaattgtcattttgatcgcatacccaaaaatgcctctcttcatttgactgcatttgagattcagttgacagttctccttatgcaccctccaatttgcactgcctgatctttctcctaaacaccacattgactagagtgtgctgtttccctagaaagtcctttaatagttcttctcttcatttttgcagggacagaattacttagtttactgattttcaacctttttggtctcaggatctccttgtactcttaaattattgaatatcccaaagtgcttagaaaattctggcaaatacaagaatagacaagcacacatttcattagccatcagggcagtgatgtcatcatgtcatggagcccttcagaaaactccattgtacactcctgaaagaatgagagtgaaaaaggcaaatggtgtcttagatttattataaaatagttttgatcttataattccctgaaaggatctccagccaccccgctaccccatcctggggtcctaggactacactttgagaactgctgatttacttggatggagggagcatcatgttcccccagcagtgattgcatttaggacttaccaatttctgtggctttcccagtgtttttgaactttgctggtcatttgctgatattcacccttgtggttgaaggagaatatcctgctggtctgaagcaaatgcacatgggcagcctaggaaaatattctctgtcatattagatggaatcgatgaccccatctcagcctgggttactgttttaatatgttgctctattgctttcccgtcacctctaactttatcctttcccccagctgtgagtcatctattgctgaaggtatgcctaattcctaaagacagttctctgcaaatagtagtgtgtgctttaaatgagtaggctcatgagtaggctgtgcttggtcaggcaaaacagaagacgactgttataacaaacttgagggtacatagattcattgagtacttgtatgtgccagctattattaggcactgtatatatattatctcttttaatcctcactataggaagataaggaaatcagggtctagcaataagttagttaatattctgtgtcttccttgatcaggttgggacaccacgctctgtgttccagtgacacttctcttggtagtaccaggcatgcttataattaatggtttgtaatagattatttatatttaatggaggccagaaactgggattattttatctgttatatcctcagtgcctaacacagtgactggcacctagtatgtgcctagtaaatatttgtcaattcactgttcatggccacacctctagtaaatagcatggctgggagtatgacccaggtcagtctcattcccaagtccagcatttctcacggtatcttgttactcacataacactggacccagtatatttttgtaatatttccctgcttgcagttttattctctgcttgtttgttttattttgataattttctgacttcctaaacttaaaagcactgggttaagaccatatttggaagaagaatttcaaagttggaaggaactgagaagcacagtctattctaccatctaactcttggtatttttttttttaatgtcatcctttattaactatcccagtgagaaggatctaactttccaaagaaagctattccatcatttggcagctttgactcttaaaatttcaactcagaatgagaaagcatttcaacaaattcttatatgagatgtatctagactccttagaatcttggttgtttccctgaattggtttccacatccctcctaaaagatggttccttgaacagatgtcacaaagttttagggtcattgaatcagcataactctgtattgtcctcttttaagtaccctaaaaccaccgtagcacttgtggcagctgttttcatctgtgcccccatttacaggcatctcccaagtttctgtgttggaccaaggcctgcgtcaggtgctggatgtccagagatgaataagaaattgtctctggcagaactggctcatgttctgatttgtattacagttatggttcaataaagccatcaagttcagaaagaaacacatgtgcccttatgaaactgtatctctcccagcctttacatttgtacttgactttttggttcattgcagttttctgtgtggatcccaggtatttttcctttggttagatttggcacatcattattgcctgtcaggaacttttgaattgattctgtcagctgctgtgcttactgtctctttaagctttgtgtcatataacattttttcattttgccctttatctatctttgctcatgttattgattaaaaaaaaataataaaatacttgatctaaacaggcctaaggacagacccctccaggtgactaacaatcgttcaattactttatttatttattttttgagacagagtctcactgcattgccgaggctggagtgcagtggcacgatcttagctcactgcaacctccacctcccaggttcaagcaattctcctgcctcagcttctcgagtagctgggattacaagtgtgcgccaccacacctagttaatttttgtgtttttagtagagacggggtttcactctgttggccaggcaggtctcaaactcccgacctcaagtgacccgcccaccttggcctcccaaagtgctgggattacaggcatgagccaccacgttcgctgtcgatcacccaaatcaccagatcttatactgcactcagcacaatttttttttttttttttactgtttagtgcccagtctcccttgccagttcttccaagtgaactggaaaaaccttttgtcaggttgttctccagaaatcttgtatacactcactcacataaggcaaataagccttagaggtttgttgaggcctttgggttcaaggattatgtagatctcctggcccatggaatatttgaatccttctgcaccagccttactgagtcatgattctgatttagcttccacacttcaagtgatctaaaaaaataatctatttgcaagcagagaaggaagccttttaaaaaaaaggtattgggggaaaatcttgctaaaatagttatgaaatttacttggaataataagtgagaacaggcaaggaaacactgaaaaataaaaacaacaagggagttgtttgcagtaacacacataaaacatactataaagctataacaatgtggaagtgtggtcctgactcaggaatttacagacgaatcaatgaaatggagtgaaaaacccagaaacagaataaagtacacattaaaatttagtgtatgatagatgacatttctttaaatctctggggaaagatagattatagtattggagcacttggccaaacatttgcagaaaataaagttagatttgtgccctatatcaatacattaaaataaatttcagatagattaaatatttaaatatataaacataaaaatacatcataaaatatatcttcttttagcacagaaaatatcttgctcaggatacatgtaaaatagagttcataaaggcaaagattttgctacttgaactttttaaaacctttatgtcaaaaggaaaaaaaaacctttatgtcaaaaagcacaatgtacaaattaaagggcaaacacttttctctgattattttttttgcagtgtaggatagagattaatttccttaatatacggtgtttataaatctataaacaaagtgagcatcctaataagaatgggcaaagaagaaatacaaacagtaaacattagaagaatgttaaccatcttactatcagaaatgcaaaatacaaaatgagttgtcttttctatctcaaattggaggagatactgtttgtgaagagggtaaggggaaataggcacttcatgcactattggtacttttctggcaaaatatatcaaaatctatttaagtcatgtgtactctttgacttgtccctttccttcctgggaatttatcctaacacagtaattaggaatgcatacatcttagtgtcatttgttaaagggaaaagaaatggaaattatctgaatgcctgacaaagggggattggttaattaaatcacagtacgtctactcaagggaatattgtgtggccattaatctatgacttagaacagggattgtagataagcttaatcggccacacccagcctgtgattgattcatagtctcttcttggaacactgtgttgagaaggattctgaggccagccatcttggctcagcagggaagagtgctgtggtgagtgagggattttgccatggagaaggagaaggacccatagcagtttgtcaggtattggcttctcctattgtagtagaataatgataaggggaattatttagcctatattaacaacaacagcaaaatgaatatagaactatatactatataggcttactttttggggggaaagtctgtgagttgagaagaatgacttaaacatacaggcaaacatacatggtattgaagcggttggtcaaacattcacagaaaataaagttagatctttgccttatatcatacactgaaacagaatttaagagtctgtgagttgagaaaaaggcttaaacataaagagtattatcaatggttatttttggttagtaggcttatggataatttgtttacatttttgagggcttgcttttctttctccggttttctacaaaaagtatactgtaattgggaaaaaatatataagcatatacttaaaaatattaatggagaaaaacagtaatagaaattgtctaaaatatgggcatgttttaaagaattctaagtctctagattttgttgcttaccgactccagatttttggagaagctgtatctacccagccccacagcatctggaagttgatgagtcctgtgtgacttcaagagtccctgcttgtgttccttttctttgtgccctcaatttaattcagtaggcatctgtggatataagagacaaagatacatttcctgtctttaagaagtttactttctagaagagaagacagacatattacagtaatagtagcagcaatagtaatgagaacaaatacttacatagtgctttttatatggtagacattgttctcagtgctttatatgtccttactcatttactctttacagtggccctgtgagacagataaccttattgtccctatttacagaagaaactgaggcatagagaggctaagtaggtggctaagccaggttcaaacccaggtagtctg

SEQ ID NO: 953 - DNA, 6000 bp, Homo sapiens
aatgacttaaacatacaggcaaacatacatggtattgaagcggttggtcaaacattcacagaaaataaagttagatctttgccttatatcatacactgaaacagaatttaagagtctgtgagttgagaaaaaggcttaaacataaagagtattatcaatggttatttttggttagtaggcttatggataatttgtttacatttttgagggcttgcttttctttctccggttttctacaaaaagtatactgtaattgggaaaaaatatataagcatatacttaaaaatattaatggagaaaaacagtaatagaaattgtctaaaatatgggcatgttttaaagaattctaagtctctagattttgttgcttaccgactccagatttttggagaagctgtatctacccagccccacagcatctggaagttgatgagtcctgtgtgacttcaagagtccctgcttgtgttccttttctttgtgccctcaatttaattcagtaggcatctgtggatataagagacaaagatacatttcctgtctttaagaagtttactttctagaagagaagacagacatattacagtaatagtagcagcaatagtaatgagaacaaatacttacatagtgctttttatatggtagacattgttctcagtgctttatatgtccttactcatttactctttacagtggccctgtgagacagataaccttattgtccctatttacagaagaaactgaggcatagagaggctaagtaggtggctaagccaggttcaaacccaggtagtctgactccagagtcagtttaaccactgcttcctctcagtcactctcagtcaggtattgttcagttgccttacaccagattagctcatttccatctcagaacaaaccttcctgtcttgttcatccaaggcttaatcggcatttcttgtatgtcaaacaccgggggagggcatgcagcgtgaatgcaaagtagttctgttcttagtgcctgggcataggtttgttgaaaggttcaggtatagaaatgtgagtaaagtatcatgctgtgtaaagttggtggtgattgtaggatgccagagactaggtctgcttttctttggtatctgcctctgaatcagctccaaagaggaggaagagggagggcatttttggatacagaaaatcttatcttctttggtaaggggaataactggcccttgatctgaagtgggaagtaagagaaaccctttttggatgggtagtaggataactatgttcagggcaacagagtgaattgccacaccaaggggtaatggtggctaatctataggactggtggaaagatcgtttagtgctacaaaatgcttcgggagcctctgaaaggcagcttgtgactgcaagagtaagggaaccctgtaatgagatctgaatccaagattgatttttgtaatgaggaaatcgatttcccaaggaaattgtgtgacagtatgatgtttggatgagtgtacttcttggttggtctgttgtagacactttgacagattgccttgttgtctagattgttgctgtttgctcctcattgctgatagtgcccctttccttctaatgatgtcttgttttccctcctaggttcatggaatccgagctggacctaaatgacatcattcaggagatgcacgtggtggccaccatgccagacctgtaccaccttctggtggagctgaatgctgtacagtcgcttctcggcttgctcggacacgataatacagatatcctttcagatctgacctcagtaggagagctgacatggtggggaagtgctgttactctttctcctgtctctctttgtagatgtgtgctataaaatctgatgttctgtttccattctaattatcttctgtcttgaaacacacaatgctttttactcatttgaaaacctggtttttctctattaacaaatcttgcaaatcttgggcaatccttaaaattgtcctatttgctcttattagtactagaattcatcgtgatatatctgttcatacattaacagctttacttttcaggatctggattggaaggccccttatgggggcaaagccagacagatttgaatgtgtaaatctaggcatctttctgctgactgatggtccagtggagttgagactagagatagtgaaccatggtaaaaagcacatttggatgtccaggaggacagggaagctgttctgttttgttcattcctagttcctaaaaacaaggctgagtgtggtggcttgtgcctgtaatcccaagactttgggaggccaaggtggttggattacttaaggtcagcagtttgagaccaccctggccaacatagcgaaaccctatctctaaaaatataaaaattaactggacgtggtggtgcacgcctgtagttccagctactcgggaggctgaggcaggaaaagctcttgaacctgggaggcagaggttgcagtgagccgagatcatgccactgtatgctactctgggcaacagagtgagtgggactccatctcaaaaaaaaaaaaaaaaaaaaaaaaaagactgagtacacagtaaatagcatttaatatttgttgagtgcatgttggacctaaacagacaatctaggtttgactctcaaccgcatttttgtgtgaaagacggtgcccttccacaacttgtattcttttttgcacagatagagttaataacttttgtctttcagtgttatttttatttttatttgtttttagagacagggtcttgctttgtcaccctgactgaagtgcagtggcataatcatagctcactacagcctcaaactcctaggcctaagtgatcctactccttagcctcctgaggagggactacaggtgcataccaccatgcctagctaattttttttttatttaattttttggagatggatcttgcaatgttgcccaggctggactcaatctcctggcctcaagtgattttgcctcagcctctggagtagctttccatgttactgagaggatcaaaggagtgtataagtgctgagcacagttcttgatacatagtaggtacttggtaaatgttacttgtcactgaatctgattcgtgacttccaaaaccattttatactttatcttggctatcaggtgtgcagtagctttattgcaaaggcttttgatgtgcctgtggacagggttatgttcattaaaccaaattctcttctagtagttgttctgtttgaatccagatttccaaaggtaagagacaaatgtagttagtctgcttgagtgatattcacagggaatctgctgttgcttcatgttattttcatctttctggtaatctctctcctgagagcgtgtctgactaagttcttgcctggctgataattctcatagaaataaatcagtgagtaattttaatgcaggcttcttgaagggcagtcttaagacatttctgatgcttcatgtaatgttagatagcatcaagaattgatctgttagctcccagatttatgactttgttcaccagggtttgctgtggggttctgggttgtataagaaccctagttagcttgctgctgagtgagctcagtgtatggtctcatgaaattcattcagtagagctgctgtgagtgctcatgatgtaccaggcactgtgctaggcccttaggaaccataagctgtgctggttgctcaagcagcatcagtcagtaagtatatattgggtattgtcttggtctatttgggctgctataacaaaataccgtaaactgggtggcttataaacaacaaaaatttatttctcacagttctggagactgggaagttcaagaccaaggcaccagcagttttggtgtctggtgagggtctgcttccaggtttgtagatagctgttttctcactgcgtcctcacatggtggaaggagtgagggagctcgctgtgtctctttttaggacactaatcccaagggccccacctccaagtaccatcacattggggataggcttcaacatatgaatctgtggggggatataaacattccatctttggcaggtaactgccatatgcctagctctattctgggcactaatggtgttcacagactcagtgactacgagttctggttgttacttcacatttcagttcacctacagaagggtagatttcagaatctgatcagaccttagagaggacttagctcagtaccttgtttgtttctacttagtgacaagtgtgaagtccagatgttggacagctaacttgaagttaagacaggcactccaggtctgtgattttcagtccggtgttcctccagtgcacctcaggtcttcctgtgggatttacgacattgctgacagagtcgcatggtcacctgttaccctgtatattattagtacagaaatgacttattttctttctggaaacaccactctcattcttttttctattcctgctaactcaaaataatagtagctgcttttggaagatactgacattttgctgattcaccagcctggctcctgccggggagaagactgacacaaaaaacgctgctcgacatcggcatatttgggaaaggcaagggcacagatgttccaagttgttaagttctggtctttaaaaagggaaaaaacacatccccctataataactttgacagattgccatttccctcctgttttctgagagctaaactgttttttttttcctcttgtatgccaacctgcacccaactgccctaatgatattttttaaaatctgatgtttaattatgtcttacatcaaatttaaagtgcatttgaaattttttaaattaccttaattttaattagaggcagcaaataggggtaaatgtcatcctcctcaaagtacgatttttcttgaaagtgatttcaggaaagggcaggtcctcttgacttgcatctaccatatcctctgttggtcgtaatgttgctctccctgcaacattgcactctgctgcttgtcttatctgtgatctataatagaaatttttcttcaggaaacggttgttaacaatttactgttgtacagctgtaactgcccaaaacaccttagcatgaataaacaatttcatggcagtcatgacttaaatttttaatcttttttaactcttcatttatcaaccaagaccatatatggctggttatgttcccagcaagcacaggtcatctttgcttcatcctcctctgtgaaaacataaactgtagggattttaattcaatcagagcctggtttgttgtaaccttaagaggcagaggatgtgagaaaacagcttgtgcctcatcctttcaaccgtgagaagcagcttcagagtttattctggcgctctgcatcactgctgctggtgagggcttgtcagcgcttctgtgcctcatctgcccccttgagaggctggagcccagctatcggttggctgcagaatggattctgatctgtgaagagcatatcttgggggtggggagcacacacctcacatggttttggagggttactctaaatgcagtcggaggcagcagaaggtggaatccagcagctgctgccttttcaaaataatgctttttaaacactttttcctttaaagtaattcattaaacgtgtttagagctcctttcttgtgaaccttttagagtgtttctatggaaaaataaaaccaaaggtacatttaaagatattttcttaaggtattgctaaaaaatccatttttgtggactgctttaagccagatttactcagttggcccaaaggaacaaggaggaataaaagggaaaaaaacaaaccacaacaacgatcacatggcaccaaattgataaatattctgtttttgtatgtcttttgccatgttcttaatttgagtggtcagttgagtcccttctaaagtttttttggtagatcactgttatttactgggttcttcctttgtatgctaagtgtgttggatgctaataaaaaataataactccagtttaaagcaaaaactctcaaatt

SEQ ID NO: 954 - DNA, 6000 bp, Homo sapiens
gaaagtgtacatttagatatgatcaaaagtgaaaaatcactaggcagctgtgagtttcagatattctcacaaagaccttcctatgagtagatacatacctttgactagtcccaaaaatcaaaggtacttggctgctcacaatttccagataattcagatttctgactatgctagacaatcataacaaacatgggaggttataaattaacatttttttaaaactctgagatctctgaaaattactaatgagcttaaagaaggaacttgccaaggaatatgtgtgtgtgtgtgtgtgtgtgtgtgtgtgtgtgtgtgtgtgtagtctacacaatggcttcctgaaactacaaagaacaacaaagaatagagagctgaggaaacggtgaaatatggaagtagtcacactggagacctctttgtagaaaaaaaaaggtttagactagctggataatatcaattattacaacaaaagacttaaatacacacacatacacacacacacacacacacacaaatgtgtaccttcctaaataaaacagattaaaattagaagacaaaaaataaaacaaaccaacaaaaaccctgaccacatcaagtgtatctaccaataaacactgatctcagaaggacaatcttatagtttatgaatatcaaggactataaactagagaaatggagaactgctccaagtcaaaactgccttaacttgatatcaacagaacaaaatgatcacagtgacctttgaaaatcaaaaggtcctaaaaattaaataccaatgacatcataaaaactcctaccttcaaaatgaaaagggatgaagtgaaactcctcttaaacttcagaactgaaacttctataaactcagaagtcagaacgaacatctcatatgccagggtttttttggtaaagtcctgaattgtaattgtataaacattggacaatacctcacttctcaagtataatcaaagttgtataaacagcttatacaaaggaagatcaagtatgtttctttgaagtgttgactctctgtggtttacaaaatgcaaaagtcactatttcaactacttcagggaccacagcataacaaaggaaattgccactgccttgagatagacagctgcaaacctctgataatactttgacaaactttttttttctttttttttaattattattatactttaagttttagggtacatgtgcacaatgtgcaggttagttacatatgtatacatgtgccatgctggtgtgctgcacccattaactcgtcatttagcatatgacggctcgaatacatctttgaaacaatctaagtgcttttttgtttgtttttgatccggggctattaaaaacaacttgaacttaaggcgctattacatctctggtgcctgataaccaagaggtggtcaaaatatatttgtgaaatggattcacaaatgtaatgatgggaatcacgaatttcatcagcaatctttgaattatcacaataaaacagaatttcacctaagaagtattactgaattatcaacatttctataaaaatattttgataagtgattcataataatattttataccatgactcttcacagaaaaaacactattaccaaaacagcctgactctgataatacagttctcttatctgggacttccccaggttccagacggtttcagcacttgctcataaatgaacaagcctgatcaacagagcatccatggaccaaatactggtggatgctcctctcctaagtcagatggccatgtggatggccagcatcccaggaatgcactctacgccttccactataacattaatctaatggcaactcattttttaaaattattaactcctatatgagacaccaatctgtcatcacttaatcacacacacacacaaatgtcaaactcacgaacacaaagggcatttcctgcactggggttattggaaacacatgccatctgaatttctgaaaagacacctgtatctttccaaacacaagtaatggtgtctatgaagtagtcacttacaggtctggctaattctcaaagctttctcccatttcagaactcccataaagttcattttatgtgtaactatttctttttccacacagaatttgatatggattacaacaactatacatgataaatggacaaaatcttacataataaaactgtgtccccagcttaccccaattcatatgctgaagtcctaatacccaccacctaagaatgtgactgtatttggagacaaggcctttaaagaggtaattaagataaaatgaggtcatatgggcatgccctaatccagtatgactggtgtccttataagaggagattaggacactgacaggtacagaaggaagaacatggagacacagggagatggccatctacgagtcaagcaaaggcgtcaaaagaaacaactctgacaatgccttgatttcagatctctagccttcagaacagtgagagaataaatttacgttgcttaaaccacccactccatgacactttgtcttgtcctgataaactgatacacgtgataataaaattgatctgcttcaaattaggcaatctactagttacaatgagctgggaatcaccagccacttcagaacccagtcctgcaatgctcttctcttgtgcttttaatacattttttaaaatccaaaaggtacaggaatgagcatgccaagaaactttagtcctttgctcaagattatgtaagacaaggcaaagggggaaacaaaactcagattcctaatcctcttttcaattaaaccaaggcctcggagaaagaaaccaagaagaacgaacgaacatagttcagaaagaaacataactagtgtgcattcataattggatcactatggtactatagtaaatatctgctaacatacacagagacctgtgaaacaggggtacttttagagaggcatcagagtgaggcagttaagagcatggccgggcccggtggctcacgcctgtaatcccaccactttgagaagccaaggtgggcggatcacgaggtcaggagatagagaccatcctggctaacacggtgaaaccccgtctctactaaaactacaaaaaattagccaggcgtggtggcacgcacctgtggtcccagttacacaggaggctgaggcaggagaatcgcttgaacccagaaggcggaagtagcagtgagccgagattgcgccactgcacttcagactgggcgacagagtgagactccgtctcaaaaaaaaaaaaagaacatggactttggaccagaccccatagacattaaaatcctagctctgtctcttacttgctatgacttctcccagcaaatcactaccctctgtatctcagttttatcatctgtaaaacagacatatagggatatctaccacacaggattgttgtgaggttcaaatgagttcaaatgaggtttttatggttcaaaaatggtcaaatatcagcaatttcatatgcttcagcaggacacatggaaagcacttagaacagtgcctggcacccggtaagtgcaatatgagtgtaataatcattactattacagtctcagcacactacgctagggtgaatccaaagcccatcccaaccacctatttgccttctgcaatgtttgtgcacctcaaacatccccaagctcaaacaacccctaagagtgctgcccaggcagtcaatcccttctcttcacctcttggttgccctgcacttccacaccctgaacacttccttctttagagctcattctgctgcaggaagtcagacgtctctgtgaaatagaagtaaccacactgaacctcagagaagcatgactccttcggtctctagtccctacttttctccagatgtggtagagtggcaaaagacccgggatgtccacaagggaaatccaggagttgagattttctaggatcagccaccatcctgatcttgaactaaagcaattccaggtaccactaggatttggtgctgatattcacaaaacaactgaggcctgaaaagggcacagactggcagggttcagtgacccggagtaaagaaggaaacacttcccaactactctggacctcagtctccccatctcgaaaatatcctcttatttccttacctacctcccaatgtcaggttctgaagagctgaggaggatgtgaagaccattaggaagacactgaacatcagtaataaaagatgccatcctacagtggggacaccaccaacagcatcctctgaaatgctaccctccaccatcccctcccttgctagaccctcaacctttcctcgcatgctttcagccttaggcgcaaagcttttcccctccacagatccccccaccgcacccctcaagtgggacttcagacccttagaaagtccacccggccttcctcttggccagttctcgatccacccccttaaagagatccctcacagattctcaccctgcttcagcattcgcccccacctccgtgagtccctgcttggatagcgttcccccgagtggcccggcctcagcaggtactctccctaacttgtccccacgttcctcagcacagtctcaccacagcgagtgctccctctaaccggtcccaagtctaacctccttagcagatgctcccctcagccggaccctcacccaccagacgtcccccccctcactcagcaggtgccccatcggctgggtcgcttagctccggggactcccacacaggtgtatcccctcaaccagttcccgccttttcttcccctgaccccatgcccgtcctcttagccagtggcccctcaccggcgcggcgggttcctcagctgtaccgtctccatggcgctgccagcagccgcccagacccgctcactgctccatcctcccgcggacctcctgagcccgccccgcagaccctcccacacttccgctttccgcccctaccggaagcggcgcgcggcgcgggagcggggcggagccacggccctgatcacgtggttcgggcgtgagtcttgtggcgcggtggggcgcggacccggaaccgccaagtggtgaaggcgcctccaggcggtgcccgctggtctctagagtgtcagtggcgctgtcttcctgcgttaccggagcgcacaaaatactcggtccccaggccgagaacgcacctctacctgggtcctgggtcccatttcacagactgagatgcgtgaagcgcctcctttagaagagctgacaattcttagcaaaccaagttttgcgtgattttggggaggcggcgctgccccaggaacgcctggaggtatttgtggttttctgccgcttacctggttgaactctggtcccaacgggccccctgcacattttctcctacaatgcatcaacgcgcaaattgccccactgtctttcttaaaggcctcccctttaagtcagtttgcagacataaaaataagcaacattaattaagcatttgccgtgtacttgtcttcatatattatctcatttaatcccctgtgtcaagccgataaggtcatccccgtttttatttatttaatgatttaacacagtccctaaacgttttcagtgctttacctcatttaatactcctaacaacctagacggtattattattattcctacttcataaggccagagaggtgaagtatctagcccaaggtcacatagcttagagtataggtttggggatttaaatccagtttggtctgatttcagggcctgcaccaccaaactggacagccatgggtgtgtaacctctttttgggcctgagaaacagacctttctctccactcagagctccggcttcagctattgtgcttccgaatgccactaccatcagtaagtattaggaaaatggcagattctacccaattgacccatggggaaagttataggagaaaacttaaccagagcaacctctcactgtttttaattgccttgcttttcccaaggatatgccatctacagaacttaacacctgagcacccacccttcagg

SEQ ID NO: 955 - DNA, 6000 bp, Homo sapiens
aaatactttttctcctgcctaatcctgaattaacttataacattccattcaaacatcatcttctctgaaagcctttcctgcttccagccccctccccaccccccactatgctccctttgctccctattggtctctagctttatccctaactttgcattagtcaccctttgattgccagtttgtagttttccttaaacactgcgaggtctttaatggcaggaagtgggtcctttttatctttgtttatccaagaccctaatagggtctggcatccaataaaagtcattgattgataaagatctagtctctaccttcaggaattcagttataatgatctgcatacacttaactccaccagactataagctttctgagggctggatggctgttccatctgaaatgcttccccttgccctctgccccgaccaaggatgaacactgactgtggtgggaaaaccagatgaggcccatgctgctggctggctactcagtgacttccatctttgcttccaggagcctgaattttgcctgagactctcccagcctggggaagtgaatcaggattgctctaagccaattagaaaaatgtcattttctcttgccagtgattcatcaagggatgcacatgtgatgctgatctgggcaatgagataaaagggagtctgaggctggtcgcagtggctcacatctgtagtcctagcactttgggaggccgaggcgggtggatcacaaggcaggaaatcgagaccatcctggctaacacagtgaaaccccatctctactaataatacaaaaaattagctggggtggtggcacgcacctgtagtcccagctactcaggaggctgaggcaggagaatagcttgaacccgggaggtggaggttgcagtgagctgagattgcactgctgcactccagcctgggcgacagagcaacactccgtctcaaaaaaaaaaaaaaaaaaaaaaaagagtctgctgagtgtttatgggaaaggtttccctccccataacagagaggtactgggtcaagtagccattcttgctctttttctgctttgggtagtgctgggttaaggatatgatacctggaggtgtggcagtcattttgcaaccatgaggcaataaacacaagtatgaaaagccaacatgctgagtaggatgggaggggaaaaaatgaaatagatattgctgagtcattgaatcaactgctgacttattagcttattaataaacaataaaggcaaggtgtggtggctcacagctgtaatcccagctctttgggaggccgaggtggacggatcacttgaagtcaggagtttgagaccaacctggccaacatggtgaaaccccatctctactaaaaatacaaacagtagctgggcgtggtggcatgcgcctgtaatcccagctactcaggaggctgaggcaggagaattgcttgaatccagtgagcccagatcactgggctgctgtggtccatcctgggcaatacggcgagactctgtctcaaaacaaacagtaaatgccatggtgctttaagccaacatttagatgttttcacttgcttgcagctgaatatttcctgagtggtttatcggataagtgtagctgtggcaaattttattttccaaaaatggccccaataatatttctggttccccaagctcttccagacccttgccactgccctatgaggaggtggagtctgcatcccttctccttgaaactgggtgggcctttgtggcccccctccacagtggtaatgacattaagtatcttccactaaaaggcactgcagcatcccacttggctctccctcgggaacatgctttagaacccaggctttattttgtgaggaagctcaagaaaaatggagacgcccctagccttcagacccaagtgagcttccagccaacagctagcaccaacctgtcagctgtgtgaaatgccttttggacagggctgattgatcctgattgacaccataaacagagatgagccttcctgctgagccatgctcaaattgtagatttctgagaagaaaaaaagactgttgttctatgcctataaactttggggtggtttcttacacagcagtcaatacctggaaatcccttcctgcagtgcttcctataaatgccaggactgataaaaacagtactgaaataatttgaaggagggacagatgagagggtcaggggagggacaagggaacagagaagtcttctgggaagaggtgtctttttttgtaaaatagctttattgagatataactcacatattgaaagtgtacaattcaatgccttttagtatattcagagttgtataaccattactacaaccaattttagaacattttcatcaccccaaaatgaaatctcacaccttttaatcatcccctccaattcacctatgctcccttccaccagggccttagacaaccacaaatccaccacaggatttgcctattctgaacatctccaaacctgccaaagctatgccattaaaaggcactacagcaaagagcatcatgcaacttgcatcacactgggggcctggcacagaagtggcggtggtggcaccaggcagggcctgatccacggggtccagggtgaccatgtgggtcatgcaaatggcattacacaaatatgccatgcttggctaagttttttgtagaaaaggggtttcaccatattgcccaggctggtctcgaactcctgttctgccttggcctccaaaagtgctgggattacaggtgcaagccatcatacccagtcccttgaatactgttatgcaattgttccccattttctgccaggtgttggtttgaggatctattaggatactaaaatgtgagtatactcatgtactatagttgaccctgcagaacctatggaaacgaaaagtcagcccaccctatacacaggtttcacatcccatactgtattttccaaccatgtttcattgtggatgtggaaccctctgatagagagggctgactgtatttattgaaaacaaaacaaaacaaaacaagggttgtattggtggacccatgcagctcaaacccttgttgttcccaggtcaactgtatatccagagcttataggaaaatacctctcccagtaaccctgctcaccatttctctcttaagctattattatgattagccacggtttgctatttaaatttaaatttaaataaaaatgtggcctttcagttatgctagccacatttaaagtgctcaatagccatatgtggctaatggttactatttcggacagcacatatttagaacattcccatcatttcagaaattttcattgggaacactctgcggaaaaagggggccatcataatgtgagtccatcttctggaaaaatcctgggaaggggacaaaggaggtctgtttggcattgtgtaatggtaatttggtatttaattttcaaaaatgtttacccaattcctattcatcagccaggtgtggtggctcttgcctgtaatcccagcactctgggaggccgaggtgggaggactgctgcagcccaggagtttgagaccagcctgggtaataatagggagatcctgtttctacaaaacaccaaaaacaaaacaacaactttgatgttgtggagtcaggacagtcctgggttaaaacctttgctctccttagctgtgtaaaccgtgggtctcagctttcttatctgttaacggtaggtacttcttcctagggctgttttgaggattaagtgaaagtccaagattgtgtctggcacacagtagcttctcagcaaatgttttcctcctatgtcagggaatggctcctttatcccgttttgggcccatgggtggccctgaagggtgggtgctcaggtgttaagttctgtagatggcatatccttgggaaaagcaaggcaattaaaaacagtgagaggttgctctggttaagttttctcctataactttccccatgggtcaattgggtagaatctgccattttcctaatacttactgatggtagtggcattcggaagcacaatagctgaagccggagctctgagtggagagaaaggtctgtttctcaggcccaaaaagaggttacacacccatggctgtccagtttggtggtgcaggccctgaaatcagaccaaactggatttaaatccccaaacctatactctaagctatgtgaccttgggctagatacttcacctctctggccttatgaagtaggaataataataataccgtctaggttgttaggagtattaaatgaggtaaagcactgaaaacgtttagggactgtgttaaatcattaaataaataaaaacggggatgaccttatcggcttgacacaggggattaaatgagataatatatgaagacaagtacacggcaaatgcttaattaatgttgcttatttttatgtctgcaaactgacttaaaggggaggcctttaagaaagacagtggggcaatttgcgcgttgatgcattgtaggagaaaatgtgcagggggcccgttgggaccagagttcaaccaggtaagcggcagaaaaccacaaatacctccaggcgttcctggggcagcgccgcctccccaaaatcacgcaaaacttggtttgctaagaattgtcagctcttctaaaggaggcgcttcacgcatctcagtctgtgaaatgggacccaggacccaggtagaggtgcgttctcggcctggggaccgagtattttgtgcgctccggtaacgcaggaagacagcgccactgacactctagagaccagcgggcaccgcctggaggcgccttcaccacttggcggttccgggtccgcgccccaccgcgccacaagactcacgcccgaaccacgtgatcagggccgtggctccgccccgctcccgcgccgcgcgccgcttccggtaggggcggaaagcggaagtgtgggagggtctgcggggcgggctcaggaggtccgcgggaggatggagcagtgagcgggtctgggcggctgctggcagcgccatggagacggtacagctgaggaacccgccgcgccggtgaggggccactggctaagaggacgggcatggggtcaggggaagaaaaggcgggaactggttgaggggatacacctgtgtgggagtccccggagctaagcgacccagccgatggggcacctgctgagtgaggggggggacgtctggtgggtgagggtccggctgaggggagcatctgctaaggaggttagacttgggaccggttagagggagcactcgctgtggtgagactgtgctgaggaacgtggggacaagttagggagagtacctgctgaggccgggccactcgggggaacgctatccaagcagggactcacggaggtgggggcgaatgctgaagcagggtgagaatctgtgagggatctctttaagggggtggatcgagaactggccaagaggaaggccgggtggactttctaagggtctgaagtcccacttgaggggtgcggtggggggatctgtggaggggaaaagctttgcgcctaaggctgaaagcatgcgaggaaaggttgagggtctagcaagggaggggatggtggagggtagcatttcagaggatgctgttggtggtgtccccactgtaggatggcatcttttattactgatgttcagtgtcttcctaatggtcttcacatcctcctcagctcttcagaacctgacattgggaggtaggtaaggaaataagaggatattttcgagatggggagactgaggtccagagtagttgggaagtgtttccttctttactccgggtcactgaaccctgccagtctgtgcccttttcaggcctcagttgttttgtgaatatcagcaccaaatcctagtggtacctggaattgctttagttcaagatcaggatggtggctgatcctagaaaatctcaactcctggatttcccttgtggacatcccgggtcttttgccactctaccacatctggagaaaagta

SEQ ID NO: 956 - DNA, 6000 bp, Homo sapiens
gttacatagccagtacagatttaggacctgtgatcccaaagattacattcttaactaccagttacattcagtagtaggcttggggaattctctctttgcagaaggaattgaaaatgccaaagactaggcaagcattgctattaggggtgtccttgggccaagaacaccaacctctaaggtagtataaaaccacaggctggaaagatgcattttttttttcagcccgactttccagcatttacccacactctcaagtcttccattctcacattacaaagaacctttcgtcttgaactattagggttttctcacttctcagacaccctccctgaagcaggccaaggaaaattcctgtggtgacaggccatttctagggaggccactgtagcacttcacacttgctctcaccccacccactcaaggaagggtagacagacagagggccctttacccagctcctatactactttcctgtggagacctcaggaaagggccgaggatcatgattttctaaatgtgggcacaacagacctcttgtaagactttgagttcttgaaacactgtacctattaaactggttgtgagcacacagaataaagtatcaccacccactgtggataatgtcagcattcattcccacccctgacagccaatattggccaggcttggaatcactgaacacacatggcagcagagtcccttgccccatagctgcagacacaggttgaacactggtgtatccctgggcttttatgaagagagaggcttataacacccattgccatctttacacacacagtgcagcaggtactgtgctgagaactttacagccgtgatcttatttaattcttacaatacatgtgatgagacactgctgtctgacttctgtagatggggaaggcctggagagattggtaacttgacagagtctcatggcatctgcaacaggcagaaccacattttaaacaaaggttgagttacttctaaaacctgtgctttgctagtcttctgttctgcaacactggttaagagcatagactctagagccatgctgcctgggtttgagtcttgattctgccacttactagttgggagacattgggcaggttacttagctaccctcctccttgggctgttcatctgtaacatagggataataatgtccttgtagcatgggttgctctgaggattaaaggaatccatatatgtaaagcactcagtgtctggtgcatagaaaacactaaatgccagccattattattaatttatatatcaactcattgtttttctttggatgatagaaacttaatctcagaagtttgaggtttttctaactacccacccttaccccaacccctgccaagggttgcgtctgtattcccaaggggcttagactgttacctggtatatagtagcctcaagtaaatgctggtgatgataatagggcagtgccaagacattgggggtgtgggaaggcagggttaggggatggcatctgcgcctcatcagcatcgatcctccatggtgtcgtatcctgaaagtgggaaaggcgctgtccagatagacgcttatctcgtagacagaacaagaacggggaggcaaccattatttcacatacagcaagttactgttattttaatgccctaacaatgaatctatatttaattaacttaaaagataggggaggtgagagtattattcactaagttcttggtcaaggcacattaaatcaaagcggttagcacttagatctcttccagggataaattatctcagacaagcttcaaggtatgccatgctttggaatgaattgtcactttccaaccaccaccactcaacctgtgatctgaccacagtgtcttcctcctgtctcccttccctctgggtgcctgggaaggctgggcttctgcactgttctgccactgacttaagctttgtcgtgactataccttccacttctcttctagcttaagagttggacagtggaggaccttcagaagaggctcttggccctggaccccatgatggagcaggagattgaagagatccggcagaagtaccagtccaagcggcagcccatcctggatgccatagaggctaagaagagacggcaacaaaacttctgagcaaggccaggctgtgagggccccagctccacccaggctttgggtgaattctggatggcttgcctcatgtttgttagccagcacttctgctctgtcgtctctccacagcacctttgtgaactcaggaatgtgcgccagtgggaagggctctcttgacagtcagcgtgccatcttgatgtgtgtatgtacattggtcaggtatattatctcaaaggatttatattggcgcttttaactcagagttttaaaccccaggaacagagactcctagttgagtgatagctgggaaagttttacattgtctgtttttcttctcccaatagctttcaattgttctttctggaagacttttaaaaaaatataaatatgcatatatatatataaattataaatagattccccacgcagtgtggtggcatctctgtacaggtacagttttaaacggtttgcctcttttctgtaagattatggtactgtggaacatgagggcagaggacaccgggaggctgttagggggtcactgaatcccaggagccaacctccccctttgcagggctgcatttaaaaattaggtttgggacagttcttgtaccgtggtttcagccttgtgtggtcatcactggcttctggagctattggtgatgtccaagggaaagctttgagagtttatgtttactctttgagtcccaggagaagcctggcaccctctttgcaaattggcctttgctctttcaatgcctttcatccatctccactctctcaactgcctaaagtcacagcacagatactgcccagtgccttaagaggagacatgatctctaccagggactctcagcaaacacgggactgtgttcagtccacaaaggaaaagcgtttttgaagctctcattgttcatgtaaaaatcatacacgtggcatgttgctccacattccttacacacaggggtagaggggattgcttttgtgacccacgttcaaatatgtgactgttttcttttctcttttactgctaagcagcctggaaaggataaatgaatattagactaagatttgttttccaggaggctcaatctgaacacacagaatgtcagagctggaagggactatagagatcatctgatctgatcctcttgtacggatgatcgcaaaactgaggtgtagagaggggaatggccaaaatcacaaagcaagttagcgttaagagctgagactagaattcagggtcctcactcccaggccaccgaaccatgcagccccttctttgggggaagagacctgtgtcagtcttggttaattgttccagggaaccttgctaacagaaacttgctcttgccttggctcttcagtagatgacctggctgtaaagagattccctggacgagccagatcattcagtttcagcgagtccttgagctccacaacatctaccagatatagcagacaagcacccatggaggcaggtttcgggcctgaagcagatcagagggctttgcaaaagacagcatagagccatcttcctgcaactttacctctttccctcagatggggagccatgactgggttgcacctcaggatactgtaatttgactccataattgcttttgctcctgaaacctgggaatcaatggaaaggcagggaatgtgcctcttctgtggccagattctgttatttgcaattaaagcaagtttttaaaaaatgcaagaggcagttgttagtcttcagggcttggcaactgaaatagctatgtggcggatacggaaaacagaggacaatttgaggatcttgctggaataataaatgacagctaccatttgttgagcacctattatatatcaggcactgagctgggtaggctctaaacttcacaataaccctgtgacttaactactttatctccattttgtagttgaagaaataagttcagagagaaagattccttcccaaggtcatgcagctagtaaatgatagaatcaggattcatagcatcactatagggggtcaatatttacacaaaaaaggaaagtcacaagcctgtttaaaatgaagtgaccaccttttcttgcatagactaaataactcgaactggcatttttaggttggaaagacagctgaattagtagttaagtctgatagccaagtaagttttaaaaaccaaagcatccaggatgcacacccctgcaccatttgctgtgcgaattaatagttctgtctctctctctctttcttttttctttttattctttgagatggattttcgctcttgtcgcccaggctggagtacaatggcacgatcttggctcactgcaacctccgcctcccgggttcaagcgattcttctgctgggattacagcatatgccaccatgcccagattatttttttgtatttgtagtagagacggggtttcaccatgtcagtcaggctggtcttgaactcctgacctcaggtgatccacccgcctcagcctcccacactgctgggattacaggcatgagccaccgctcctggcctctctttcttttttaaacaaagaactttgcacttggccagagaggaggagaaagcccattttctcccttcctaagctagatccaaataaaagaaagttcagttttcccccataactattcttgggtcatgaactttgatctggagtttgttttgtttcaggaatgtgtgcacccagcttgctgatccaacaaagtctattgcttaccagtctagcttgatgaagccttttggccagaagtcaatttgttttggatcagagaaatttcctgacaaggtatatttgttttctagtgacagaaaggcaaaggaacaagtcctagttgttgttgttgttgttgaatactaaatttaagatatgtcagcttgctttcaatgagccttgggcttctgttattgcttgagcatttggaactcgagcttccagagaaatttgaggtcctcgcttgttctctgccttcaagaaacaatgacctgattctgtctttaaaaaaaaaaatctcagaattctttttttgtttgtgtttttttttttttttgagacagagtctcactctgttgcccaggctggagtgcagtggcgccatctcggctcactgcaacctccgcctcccaggttcaagcaattctcctgcctcagcctcccaggtagctgccactacaggtgctgcaccaccacgcccggctaatttttgtatttttagtagagacagggtttcaccatattagccaggtgggtcttgaactcctgaccttgtgatccacccgcctcggcctcccaaagtgctgggattacaggcgtgagccaccttgcctggccaaaaatctcagaattctttaagactgttttaattgctccatcagtaattttgaagcactttcctttttttttttttttcccctttttgtccctttccccaagccaccaattggatggatgaatgtttgacggggaagaggaagggtaggaggatgcatggatgagtggatgagtggatcgatggatgtattgataaatagatagaaccagtcatctgaagcaacttaagaattgtagccttgactccttgagactgtagatttcgatccaggaaacatttatttagcacctgccagatgccagaaatttataccatttaaaactcagtaagtcttttaaatatcaggaaggagagaagcgacatcatgatacatcctatgggtattaaaaagccaatagaatattatgaataattttatgctaataaatttaacaacttcaacatcataaacaaattccttgaaaaataaaaagtaccaaaattcattcaagaagaaatagataccagcctgagcaacatggcaaaatcccatctctacaaaacat

SEQ ID NO: 957 - DNA, 6000 bp, Homo sapiens
ggtcctctgtaccctgtattttagggagccagatagtttccctccaggtttactaaaggaggcagaactcgctttacacccacagcccaaaattccaatttcctcttccttgcccatacagcaatcttggggaggaaggaggtccttggttttactgagtagtcaggtgttcataggagaaggccatttcctccctccccgttaagggtggggtagtggaaattcaaaggaagtccctcatggagactgagaggtgactgcaagcatggggtgctgggatgctgttccctgatgggtggtggactgtgggcagtggactgtgcctatctgagcagggtagaggagaggtgagaagaggggcattgtggtgtagctgactggatgcgtgagcttctctaggtcaagtggacgttgcagtaatcagcctggctggagcacttttctggtggcctactcaagcaggttgactgctgggcaagagggtcaggacactggtaggccctaggtggtggggtggggtaggcgaggtcaagcctgggctggatgaccctgtgagagaattgtgcagtggagaagccgctaaggaacttactcatttgcccatgagaaaccatatatggacacggggttggggtgggggtggtagggtatgtctcccaatcagaccatccgccccacctccaccaagtccttttcctcctagcaggcagggtcctggctcaagttaactcttgaatgagtaagagagaagataaaatgagatttaaattgagtttgagaataaaggtctaaaggatggaggtttaacaacagaaagtgatccaaaagtaatgcaatctgcccaaaatgtcattaagggatggaaaagggagattcaacacagcatggctgaaggcagagattaggggagaaaatcttcatcattataccccacagagttgaatcgcctcaatacactggctccacaagtaaacagaaaaattgaaatacagtgtggtcgggctagagtcttgcttgggtaaagctgccccaggttctgagagagcacagggggataggttggttgttagagagagatttccagaggagggttgcctgagatggaccttgaagggtgagaaagagttggccaggtgaaaggagagtggcagtgggaagggagctctccaggcagaggtgacagcacgggacatctggggagtggggctggagcatgaaggggaaggcaggaaggatgcttagagatgtacaccaggaggcccatggccttgcagctctgcaagcttaaggggtgagggccctggagagccactttaaaccttggagcaacacaattggatttgcatattagacagaacactctggatgccagattctggcagcgctgtggacactggacctctaggcatgctcctcacccattcacctggcactgtgaacccacctccctacaaaggccatttcatctctgagtttccaaaatcctggctccctactcttttgaatgtcctttgccccattcctattgcagaacccttcattgttccctttttgattggcctccgaatattgccactttcccttaaatcatcttctcgctttcctcctccagcacactcttctcagctcaacaagattctaggccttctctgggcctgtgcccaccagcacatgcctcctcaggatatgtatatactaaaatatcttccctttatcttatctggtcttcgccccatggggcaacccgaaggctaacatttattccttcacacattaatttaagctgctttaattgctgctatgatatgttttatataatataattaatgttttaattctgtgtacttgcttccccaggcagttttgtgaaaggcccaattttggaatcaagcaaataaagaataagtaatggctgaaatcattatagtaacacccctctctcaaaggatttaaaaccgtgcttgtttttttcaaagtatgttaaaaagggaaaagatattttaatcttctctccatcctgggcatgtttgggtggctttaatgaagttccctggaccctgatttcaagagtttctggccttttggtatctgaccaccattctcaagaggccactgcagcttgaggtctgtgttgagattaccagcttcgcaccccctgccaccaactctttgtcatgattggaggctgtacttaggatgagaagttgctgaacccactcattcatttattcattcattcagcacccatatattggtgtcctattatgtacctaggactgggatagatccagtcctgccctcagggagctcacagtcaaatgggaccaggcagaaggagttatgagctggcatgctaaatgctgtggcaacacaggggaggaggcagggtgggatagagtacctacctctgcctcagggagttggggaaggtgtaagaggaggcaacatttaaactgtttaagaaaggagaaggaaaggaaggaaacatcaagagcaatgagataaaccgtaaggaaaaaagattgtgtgcctgggaagtggggagaggctgaagccagtgtgcatgggaggacgtggcaggaagtaagcatagaaagagaggttggggctgagtgaggaagggtgtgctttgccaggataagaaatttggatcatcctgagggtgcagggaaacccaaagaggcttttatgcaggaaagtgtcccagtcgatcagatctggagtttatcaagagaatcgcagcagtgtaaagagttgcctggcacatagtaggtgctcaataaatcctgtggaatgagagaggctgttgggacagtccagatgaaagatggcaccctctgaattagggcagtggcagaggtgacagaaaataagggatggatcctagaggcagaatccacaagacttgcaaatgtgcccttaacagcagaagccatgagaatggggttagaagtgtcctcctcttccatcctccctgatctgtgaggtctggcctcttgtcctcttccagaaattgagagcttggagggtcatcacctcaaccgttgtctagttcaagctcctaagttttccttggagaaaaatttaggcctaagggaacacagtccttcagaggcagaggctgcaccagaacccaggtgttccatgctgcaaagcagagtgttaacactggttcaagaacatcttgagggccaggtgcggtggctcatgcctgtaatctcagcactttgggaggccaaggcaggcggatcacctgaggtcaggagtttgagaccagcctggccaacgtggagaaaccccgtctctactaaaaatacaaaaattagctgggcgtggtggcgccagcctgtaatcccagctactcgggaggctgaggcaggagaattgcttgaacccaggaggcagaggttgcagtgagccgagatcatgccactgcactccagcctgggcaacagaatgagactctgtcaaaaaaaacccaaaaaccaaaaaccaaacaaacacccaaaaaacaaaacgaaacaaaaaacaaaaaaacaaaagcacgtcttcagagttcatgaacccaggaaatgtaggcacaagtgtgtgtgtttctgcaaaatgagagggtcccgagtttcctaacatacttaaagtgttttatgatgccacaaaaggctggcccactctttttttttttttgagatggagttttgcactgtcgcccaggctgaagtgcagtgatgtaatcattgcaatcatggctcactgcaaccttgacttcttgagctcaagcgatcctcctgcctcagcctcctgagtagctgggactacaggtgtttgccaccatgcctggctaacttaaaaatttctttattttgtagagatgggggtcttgccatgttgccaggctggtcttgaactcctggcctcaagcaatctccctttttggccttccaaagtgttagattacaggcgtaagccaccgcgcctggcccccacctttatttttatttttatttattatttattttttttttttttgagactgagtcttgctctgccttcgaggctggagtgcagtggcacgatctcggctcattgcaatctctgcctctgcggttcaagcgattctcctgcctcagcctcccgagtagctgggattacaggcgaacgccactacatccggttaatttttgtatttttagtagagacggagtttcactatgttggccaggttggtctcgaactcctgacctcaagtgatctgcccgcctcggcctcctaaagtgctggattacaggcgtgagccaccgcgcccggccccactcttaataaatgcctgtctccaggtgctgggtgggaggtgggatggaatggaatgaggtgaggacgcatggatgcatggatgaatggatgggaagttgagacgacgcgcccacacgagggaatttcctttgaaagagagcgaaattctgagttgggaaactcttccttgaaacgcctccccataccccagctgtggccttcccgttttctgcgtggtggtgtggggggaacttcctcaggcctctccgcagtggagcctctttcggttctgccaggatacctagaggcagcggagagcggggcagggaggggaaaaccgtgagggtccctgtggcaggccccagcacccatgggatctctctccggtcgcaggaagcaggctagctcctagcccgcctcggcttggcctttgtgggacctgggggcaaagaagaagagctgtctctgggaccatgcctcctcccgtacacagcaagatgcgtccctaaactcccgggggaattagacttgtgggaatgttctggggaaactcctgcgcggtgaattgctgggggctccgcccccccgataggtggaccgcgattggtctttgaagaccccgcccctttcctgggcggggccaaggctggggcaggggagtcagcagaggcctcgctcgggcgcccagtggtcctgccgcctggtctcacctcgctatggttcgtctgcctctgcagtgcgtcctctggggctgcttgctgaccgctgtgagttgtttttgccccgaccagacgggagttgggagtggggaatgagaaggaaagggaaggaagacttcggggaagaggccttcctggctgatttttgtgggggcaggagggtgggtgggagctgggcaaggtgcccccgctcctggctgaatggggtgggctgcctctctcttctcccgggctggggtcccgggagcggcctacaggggccgctcagggaaggcactggctgcccaagcgtgcctagacggcctggacgggtttagggagcctcagaggctggccacacagagactggtagggggttcagagggcgggaagtgaggcggaccaagggaaggggcgggtctggcccgtttcctgtccccttcttattgtggacagatgccagcctctgtaagtagttatcatctccttgccagctggggctgccttcttccagggcatcttgtgggaacaagagatgggtgcagaggcccaggtacttttgtgagaaggcaaggagcttttaacatcgccttccaccccgaaccgtatcttgggtgttccaacctaggaggaatccccagggctttgcctttttctcctgaatttaagatgacataggagacccctggggagatgaacagtttatgggacacaataaagggttaggagaccagagttctggttggctctgacagggctggtgatcagagggctggagaaaccaggggtttctccaggcaccagaggggctcagagccaaccaagcatatctccgggattttcagaagcctacacttgactcactttttgtttaaatgtatttttgtagttcctcattctggaggctgggaatcccccaagtacctggctccttcatcccagcccctctggcctccccctactttagagggctgtagattcctgcctgaagcctgggcaggaatgacccatg

SEQ ID NO: 958 - DNA, 6000 bp, Homo sapiens
cgtctgctgtagggtgggagggggttgctggaccaaagcccttccttgtttggagtcagtgcttcactagagttccttctagccttagcagtggggtctacctggcacgatgcatgtggcttagaaaccatcacactgctctgtgtccatgtgcaatgtccttgtgacacaagcgtctcatcttcaagcagtcctcatctctctttgaagacagtggagttgattgtgccattaggaaaggaaatcctatttgaattaatttgcactcacaaaaatagggaatgttgcagagtgtaaaatacatctgatggtcagtggattttcgttcattcacccacttttcatttgggaggaaaaaaatttaagaaagcaaaaaaggcccagaattttgacatcaccttcctctcgatagtagtcacaggtgtgtgcctgccaccctgccttatatttgcttattttcctccacaggatatggcaaatgcatttgcacagaagcatctccggtctataatcctgaatgtgagttcctggaacatgctgtattttattactattaacaacaattattactgttattgttaatatattattattgaaattattaatgagtgaggaggacacacagaggaaccttatcaataggtaaatacctcttgaactgaatagctttttcccgcgatcctctgtgagcagagttgcctctaggcagccatctcaccagcaattgcagtgcgtccagggagggaccaaggccagctctactgtttgttgccctgcaactccagaatttttatccagagggaatatgttaaaataggcacaaagggggaaaataactcatccaactgacactgattaaaaatctgaattgtgtagggcactgacagaactaagtaagcaagtgtatttgctctcaaagaccttctggcctggtaggaaagactagtgatcatagtggggtgtgatctgggtttgtggtctaggaaaggatggaggaggaacagtgatttctgccttgaagaagagtgtttccggaaacttttagaggaatgtcttcaggtgacccttagaggatgagtaggcagaccgggaataacaggaatttcagtcagagggcagccagaacccagaaggagtgtgtgattaggcacagagcaaggagcaagtagatgaggaggctagagaggtagcgaggaccagatcaggaaaggttagtctcattcctaaggacagctgagggcatttaattgagcttgtgaagtaaccagatttgcattttagaaagagcacatgaaagacatgtgtttgctaaggggtacctgagggaggagagcagagcaggagctggcagggggatctggaaagaggtataaatccctgttaccacctgtggggtggagtagggctgatgttgggaggtggggccggtgggagtggaggaggagagccaaggatctgaattaaaaggaggcaactttggccggacgtggtggctcacacctgtaatcccagcattttgggaggctgaggcgggtggattgcctgaggtcaggagttcgagaccagcctgaccgacatggtgaaaccttgtctttactaaaaatacaaaaattagccgggcgtggtgataggcgcctgtaatcccagctactcaggaggctgaggcaggagaattgcttgaaacccgggaggtggaggttgcagtgagccgagaccaggccattgcgctctagcctggacaacaagagcgaaactctgtctcaaaaaaaaaggaggcaactttatcaactgtcagaaacaagggaaacctgggagaccacagtgaagggaataaaatgaaaaattagaagtcaagtttaagacttaagctaaacatggactttggagtctgccattttccaatctttgatcttgagcatttcacataacttctctggacttcagtttgctcatctggatatgaggactaagtgagctaatataatactgtgcttagcagggtgtctggcactcagtaagcactttgctcgtattggcagaacaggatgcagaggtgataggattgaagaagtaagctctgagcacttgtgaagctgagcagtcagctgctctaaaatgcagagtctgccagacttcaccttgcagaaccagcttctccctgctggctgcttccctggtcacacccagctaccagcctggcaggaggggccccaagcccacaagtgacaggagtacacaggttcccacacattcctgcctacactcctgagcagctgtcctggtcaccctcttctgcatgtgtggggatgagtgcgcccttctgaaggaaatttaattatgtttgagacttactatttaatcgggttagaagttcaactcatttctggacaaaccttgtgaacaagtaaagatttcactatagaaggcagttcagcatcaggactcaggacttaagtggcctggcaggaaatggctaatgcatggtcactgaagtccagggatttcactgagtcaagccagagaactaagaccctgagatacttgacagtcaagtgagacttcaggtaaaacctcaaactgtcactcatcagactggagctgtacttctttaagccattgatgctaggataattaattaccttcctgccctgatgtttcttaagttggagaaagagaattaaagagaatgaaaatcagaatcacattaacttccacctctattcaaagctgttttataaattagggagaagagtgaggagagaggaataggatagacgaaggtagagagagggagcagtggagaagaaaacctcagagtgaggcaaaggaagaggtgtgaaggggaaaagaagtggcgatggcagggaagagcccctggccatgagagagactggggggagtgggaaggaagggaagttatggggcagggggcacagagcagagaacaagagagtaaggctagagagatgaaagaaacagtgagactgagctaagaagagcgatctcacgcttaagagacagagggcgtgcctgtgacagggcgggagctacaggactggacatgatcaccgattcagggggagggagggatgcaggcagaggcctaactccagcatgttagcatgtgctatggaagtgctgtccacaatggtggccaccagtcatgtgtagtactttaaataagtctgttgtggctgaggacctaatttgtaattttaatttcattttaaatttaaatatccgtatgtggctcatggctgctgtattaggaagtgtagatctagagaaacagctagaaaaaggagagagcactggagtcacagtaggggaagaggtctagagcaggaccgtccagtggacatagaacccaaaccatgcacatgattttaaacattttagtagcagcatgaaaaaggaatagggacattaagttcaataatatattttattcagcccatgatatcgaaaacgttaccatttcaacaagtaataaatatgaaatattattaataagacattttacattttcttttttcctactaaggcttcaagatccggtatgcatttacactcacagcacctctcagtttggcctaacatttcatgggcctgggggctaccaaactggacctcacaggtctaaagagattgatctagagtcagagcaaactctagggagagctgatccaaagttagaaggagctttaaaaagatactgagtcagatacctctctaaagtcagagcgctctagagcattgctattcagtagaactctgttaatggaagtgttccgtatctgcattgctgtagccgctagccacggtgactactaagcacttaaaatgtggctggtgcaactaaggaaccaaattttcaacttaaatttgttttaactgatttaaatgcaaatagctgcatatggctagtggctgctatactggacagcacagccctagagacagagctactgagtagggaaattgaaggacatagtggtggtacatgtggaaaatggaggagagcctcatttgggcaagaaagaaccaagagggacaggattcataatggtgggtgagacagagggagtgacaaatacaagggagcaagaagggaagcaggatattgtgggagtgaggacaggatggtgagagacaggaatgtaatcaagggttgatcagctaggacagaccgagggagacatagcatgcaagagaaagacagagacagaacatgagacaggaccaggggacctaaagtggggtgtgggcatcagagggacaaaggaggaggtgatgaaccgacaggggaatgtgggggcacagagacagtggggagggagagtcaggagggagagggacatggtgtgggcggcacagggagcagggacagagtgataggagagaggagaggacaagtgagaggaaggaaggaaggagagggccgtgggagggagctggtaggagagtgaactgttcctcctttgtgttgctatctcagtatcattgaaagaaaatggcctttcccaaagcctctctgctgggtgaagccatccaaaacattttatttttctaagggaaaaacaactctgcctccatgcacaccatctattgttttgcatttagtaggcctgtgaaatgcctgattggaggaaggtccagcccccaatgttctgtatcatagccttgatggagtagcctcccccatttctggtgtggttgggtatagcccctgccttcactctgcttcccctgcccaggggaatgcagaggaagggatggcgcctttcaggcctgcagtgagtcatctctgcctgaaccaagcccattcatgctccatcgccttctagaatatgaagtcctcgtgtgtgggaggaaagctctgttcccttcccaacatacattccttttccttagcatggatgtggcccttcattaaaagagatcagttcagtcccctgctccctgcctgtgctttttctagcatgtgatccgagggaaccgccccatcaaaactgagatggcccatcagctatatgtccttcaagtcctaacctttaaccttctggaagaaaggatgatgaccaagatggaccccaatgaccaggtaggtgctaagtggggcagctgttttctcatggctgtggtgcagtccagccttagtctatgtgccaggcactgtgcttggtctttgtctgcagaagtagtttgcatctgccctagaaaatctagcatgatctgcaccatgagccaagcccatttctgtcctgctgtggtagaggtgatgcctcctaagggattgattggggccaaagtttggcccagaaaagcctgacccactgtttcttttccttgctcccttggttagccgattcacctgctgactgtctgtttcacctcgcaggctcaaagggacatcatatttgaactgaggaggattgcatttgacgcagagtctgatcctagcaatgcccctgggagtgggaccgaaaaacgcaaagccatgtacacaaaggactacaaaatgctgggatttaccgtaagtacctcagagcatagacggtggtaggccctctcccctgatgggaagtcaatggtcccacccagacagagctctgacaaccaaccccatggtggccctggaatagatgacagttaggaagctggtggagctttaatgcttgctttgctttgttgatggtgagtctgtgagtttatgtgcaaagtttggccctgtgaaacgaatccatctgtaggggggttgcggtcagctagagtgggtagagaggggacctgtcctcttacccaaactgctaggttctttgcaaagctagtgtgaatattttgtgatagagtagggcttgaggatggggttaactggaagaagtatttcttgcgtacctactcagtgtgcagcagcatgtgaagtaggttctgggatgcatggtgaggcagccaccgtccagcactcaagagctcacagttcagtggtggtgatgggtg

SEQ ID NO: 959 - DNA, 6000 bp, Homo sapiens
tgtgtttcccgatctgaatctttgtctattttgtgtgtgtgttgcacgtgtctcagctacagtgagatgctggcattcaccctgactgccttcctagagctcatggaccatggcattgtctcctgggacatggtttcaatcacctttattaagcaggtgaggcctccaacattctgtctttctctcctccctcagctgccagttcacaaggcttaaggggagatacaggcaatatcgccattctggtgagatcagctttatattccctggggccagatttttcatcctcaagctctagtcttctgtggcttctgaaagatttgcattttgttatattctcagggcctgcactgagatggaactggaccgtcagaactaaatatgatcaaagtagaattagattgtcagtgagactggggataaagccagccagtcaaccagtactagccctgagtcttttgaccgacttcctgagctctctcttctttttgtatatatataaaaaaaatttgcatttcatttgtaaatttgccttctatttacaaatctgcaaggtagcctgtttggattgtcagactaagttcagtgggtaggagagggtacttctggttttaccctcctttcttttacacaaaggagcagtgtcaattcagaatactgaactaaaaccaatgaataatattgtatctgctgccctagaacttcagctatcattggcttaggacattgggactccccgacactggacacaagtgaaatgaccatgtgtcaaggatattataatggggactgagaagaaggattagagtaaaaggcttcaaggtcctttctacctctcaaagtctaagtgtgtttagggggagtgtgtgtcaggggaggtacatggagataaaatgagatcccagtatcagtaaaatcctctgcttttttataccccactttctcaaactggaacccttattttgataaaaagaattaagcttttagattttgaggaaacacaattaagtggatactataatctgagattaaggtatccatgccaagggaatccctggcacattggccagggtagccgtaaaccagataccactatccacctagcaacagctgcccaaatgtgaagcagagagagcttcaagggctagcatcagatgctaagcttctatctttcttgggccctgagcttctcaattgatgtgccatctctgggtctagattgcagggtatgtgagccagcccatggtggacgtgtcaatccttcagaggtccctggccatcctggagagcatggtcttgaacagccagagtctgtaccagaagatagccgaggaaatcaccgtgggacagctcatctcacacctccaggtgtgagtaaaaaaccctacacctccctcccttcacttgtctgtcctcttttctcctcttattttaagtcttccaatcctactctcctttgcttatattccaagctgttggttggcttcttcattcatcacctcttccacactcctgccagaatttctcccatcattcagacttgatcatgtcatgctcctgcccaaaatcctctgtaactctctctgccccttaggttaaaatgaagattttcccagtcttcccataccagggtggtaccaggcaaaattagatgctttctcacatgggcccagtagtctctgtacctatgataattatataaaatactggatttttattatctgttgcccattttgaacatagagcccccttgaaacagagaccaatcattgttgtatcccctgttttgatttaagtagaggctcaattagtgcttgttgaatgaatgctcactgaaccgacgatgcactgtgggtgatttgtaagaaatatcacacaggtgtgagtttggaatatcagttcaaatccaggctcttctgcatactaggtctctgccatcagcaagtaacctagtctcttctggcctcagtttcttcatctctagaataggttaatcaccttcacctctcacactgtgaggatcaaaggagattttaaaaaggtccagcatagaggccaacctgggttaggtattcagtaaattcaggggcttttttcctttgtttgtttgttaagactcttatcacatcctaaaacattttaccagatactgagaccatatgacaaatgaacccattggagcaatgtttctcccgtctccgctgtttttacctcacttccaaccaacctacaccatgtaaggaagctggactttgcaaaacagtggtggcactcctgttgattctcttctgactgttgttcacttctgttttttagacattgtcagaatgttgccagaatcccccaccagttcgaggggaagtcatagctcccagatttgggagtttatagtggccctgtcttcactcagctatgctcccaacttgtttttccccactaatccaagtaaaaagaaagcacaattatttctttgcaactctgatttctccttgtcacttttaaggaattttcagcctcagctttctttgcttttcttttttgagacagggtctcactctgccgtccaagctggagcgcagtggcatgatcataactcactgcaggctcaagcgatcctccccatctcagcctcccgagtagctggaatcacaggcacactccacaacacctggctagttttttttttttttttatttttgtagagacagggtctcgctgtgttgtccaggctggtctcaaactgttgggctcaagcagtcctcccaccccagcctcctgagtagctgggactacaggtgtgagtcaccatgcctggtctagcctcagctttcatacccagcgagccaccaaggttgattaaggtgagagggacattataaactccagatagagaattctgattttcctgtaacctcacatctacttctctggtttttttttttgtctctgaattcagagtggccccagttgcctccctagggatgataggggaacatggcatttcataggagccaatactttcagcccacagctgtcaccagaacttatatgctttcctttttgggctgagggatacttagtgccctctgttagactccctgggtaccatgtgactaaccaggaagcccatcagaccctctggaaagacagccacagaatgcacccaagacatggcaggtggagatgtcaagtaccaggattgtaagattccagagaatgattgtagttattttgtttgttcataataaaataagtttatagtcaaagactttaaaaatacagaaaaacgcaaaattatttgcccattatctcacctccagacatacccactgttaaacattaaattgaatgtcccttcagtatttttatgcatatttttaacaaaatcgggatctcattatatatactatgtgtaccttgattttttttaactgaataatacaccttgaacatttctccatgtcaaagatttttctaaaagggtagttctaagtcttttttgcaacctagacacctttgaaaatctggtaacaagtatatactctcaccagtttggaaaaaataccacttagttggcaaactacatagaataatttctgtatcattcctggggttcacaaatactctaagctcatccctgaatcccaggttaagaatctttaccctaaaacatgacttttaataactacttaagattctcatatgtataaatgttggctaatgtgaccatttggattactttccattcttttttaagtagtactttaatgaaacgccttgtcagtaaatcttgcatagctctctgattactgtcttaggataaattcctattagtgaaattgctgggtcaagagcatgcccactttgaatgcttttgagactgagctccagatcattatttgcttataatctgtgagtgattgttttaaaccatttctaagcatcatcttgctgttcagtcttctaatctccctctctcttctttctccattgacacagctccaaccaggagattcagacctacgccattgcactgattaatgcactttttctgaaggctcctgaggacaaacgacaggtctgtggctgccttttcacatttttcatctgggctcttctgagataattctcaccccatgcactctttgctatgcagagagcacaaatccagcaattttcccaagagttcttcctcttagctgtctggtctggagcccaggagggtggctttgctaaggaagacccagggaagacctatgaggggaaaccagctgggtcttagatgagagcagggcccttcaaactttttcctctaaagggccagagaataaatatgtttgactttatgggccatatggtctatgtgatagctactcaaccttgccattgtagccaaaagcagcctcggccagtaggtaaatgaatgggtatggctgtcttccaataaaatcttatttacaaaaacaggcaacaggcctaatatggccatagtttgccaactcctgggttacagaatcaagaataaggaagaggagaccctgtggctaccctgagtccaaggagtccaatatgaatgggatttcacactaaatcttaggtttaaaggttctctgatggagattctaaacatcttccttcccctgttcattaactgtgacattatgcagatagctctgcctctgtgaaccttagtttcctcacctgtcacatgggagcaacaacatctgccttgtttacctcacaaggatgtctgaggaaaaacaagatccctgtttcacaaataaggaaactaagaatcagctgggtggtggaacaaacactgacctaagagccgaggggcctgggactaagtattctccctgctgctggctggacaagtgtttgtaacctctttttgggtctcagtttctctttctgtaaaatgaaagggccagtttaaatgatctctgacagcccttccaatactaacattctagatttctctgagaaaagcccaagtggtgttaaaagtaagacattttagttctctgacaatctcatgggctcagtaagatgaaattcaagtgggatcatgtatgtacccagctcttggtagattctagagggaagaccagaagcatctgtggttctgtctgtccttgtctttcttggatggcttggctctgttaatctgccttcccggtccttgtttgaatgtaagctgaaagctcattccgtctgcttctctctgtgcttttgctttctgccggcaggacaagcaccttaatcctctagacctgcctgtcactgtaagtagcactgccatgtggaaagggccccagctcttgcaggtggggaagtcaaagctaggcaagaatctcatggtctgatctagatgttcagggcatgccaagacccagggaaaggttgtgtgctgtgaatctcctttgtcaggacacttagggaagtactgcagattagagtcacagaaaggattaagggggtacctgccccagggagtgtggccccagccttcctttataacttgcctttgcatgggtctgtagttcaactagggcagaccagactcagaaacagctcgtaactttgatctagacaataccatggatgcgtcaccttcttacttgctttagtggaagagaaaaggtatccgtgccctttttggactcttactagaccgtgggaatccgaaaaggtttagacaatcgacaaaagggaatttggatgctcatttcttcattatagggagctttagagaggtcagctttgcgaggagatgaaaggggataagtgcctccccctgacaccacagagaagcttttggtctaagacctttatattctagctgcagaccactgtcaattacccaccttatgagttgtccacagcaagatttaatctcagtcgacctcctatagttaccagagaagtttctaggccactgtcctcctctgctagccagtatgtattcagagaatgcaaagtaaaatttaatgttcc

SEQ ID NO: 960 - DNA, 6000 bp, Homo sapiens
aaaactttgggaggctaaggcaggaggatcacttgagcccaggagttcgagaccagcctgggcaacatagtgaggcccccatctctacaaaaaactttaaaattaccggggcatggtggcgcgcacctgtagtcacagctactcgggaggctgaggcaggaggatcgcttgagcccaggaggttgaggctacagtgagccatgactgcgccgctgcactccagcctgggcgacagagtgagacgctgtctcaaaaaaaaagaaatgaaaattttcaaatctcattgtttccccaatgcccccccccacacacacacacacaaattttcaaatctcattgcttccccaattacacacacacacacacacacacacacacacacacacacacacacgcccccccccccccccggcttgcttgatgttggaaggtggcttccgatgccagcagagggcgctggtctcccgcaggcggcttgagcacgccttccaggggctgacagccactgctcaccaagagtccggccccttcctgggctccactcacacaaatacatcataaccacgtccctcaccccccagttcctggaagaacgatcttcgaaaattaagttattgtgagttatgtgaacccctagcctgcaagcgctggtgctagactggctgtctgcctcctgcccttttgcttcccgtttcaagaaccaagtcaccatgaattttcttaatgatactttattcgcctgttttagccatttttcttctctttctatctgaggcagagagtggtcttaatggagacagcgcgctattgcagaaaagacagaggccttgaaattaaatagagccgggtttaaatactggcttcaccactcaaccaggtaaccgtgggcaaatgtctaaagtctctgtgcctcagtttcctcgtttgtaaaataaaggtgatagcagtatgtgcttcgtagaaacatgaggatcaaatgagataaatcatgtaaagaccttaatacatagtctcatctatatccaggattaataagtgtgaaaaaaatgaagaattaaatacgcagtggaatgctgtttccactgagtggtgtaaacagaaagtcggactgactgagtaccagccaggctgaggtgccttagcaagcttttcacatctctaatcttcaatctttctcatctgcaaaatgggcacactaatctgccatagaaagttgacagttttaagtgtggtaatgtgtataacagcctccggtataactcttggcacatagtaaacccatgataaatgctagttctatttcctttagcagataaatgaaggttttgacatttatgagctaccatgtaaaaatccttttgggacgggcacagtggcttacgcctgtaatcccagcactttgggaggccaaggtgggcagatcac[450 bp omitted]taatagatatgttctaggtagcagagatacagctatgatcaagacagtcaagatctctgccatcatggagcttacaactaatggggaagtcagaaaacaaaacaaagtaatatgacatgcagtgctagggagaagactagagcaagttaagggaagagaagggtggagcggctggatgataggagacagtgctgtcagggaagacttggaagaggagataacagagcatggcctgaataaagtgaagatggaagccatgtgatgagctgggggaagagcattccaggagagggaacagcaagtgcaaaggcacagagatgagaagaaactgtgtgttcacagaatgggaaattagtatgtaagactcaaacagtaagttagggcgagagtaggaatagattaagtctgagaagtaaagtgccagatcatctagggtcttgtagaccgtggtaaagattttgtctctaagcttcccaccactctaaagatgggccatatttgcccagtgtggtggctgatacctgtgatcccagcactttgggaggctgaggcaggcagatcacttgaagtcaggagttcaagaccagcctggccaacatggtgaaaccccgt[132 bp omitted]gtgctccagcccgagtgacagagggagactctgtctcaaaaacaaaaaacaaaagtcaaatggattagagaactgagaggggtagataattcactcacacaataagtacttatggaaggcctactataattttaaaattttataatttacaatttattgagcacttaaatgcagacattttgctaactgttgtatatttacagtgatctcatttctcacaacaatccattaaggctggtactgttattctccccattgtacacatgaggagacaggctcagagagatctagtaacttacccagggacaaacagctggtaaatagcacaaaggtctgcaaggttacaaagctcagaatctctactatcctctcccacgtgccagacacaattgcatttgtgtaatcatgacattcagctgcaggtactcctcctatttgattccagcctgaaaacacggcacctgaacctagttgcccactgggagcagctgaggtggaggaagagggatctggaactctgcacttctgtgcagtcttggtggagctgtccatcaagttgcccgccctccttagctaaagtgtggacatgttacctgagctccgccaatcgaacccttgctccagggactttgactcatcaaagaaaactctggtcaagaaagggaagaaaaacatggaattgattcacttgcctgcctaaactctcaaagcatctccactttctgtccttttctaagcctgattctccagcttcctgttacctctgtgagttaaacactagcctgccaataaaatcttttttgggtaaagttagccagaattgattcctaagactggcaatcaaagaacctgcactggcaatatcaggaaaaaaaaatgacacagtcttgtaaagctctcaagtgagtgattcattccttggataaatgtgttattaagcagagccaggactaggatgaagcaaactgaggcacccagggtacaaaatttaagcctttcttcctcagtgttgtgtgagtgcagggttggctcaaacagccctccctgctatcaaagttaataataaaaggaacggagaagatcatttcgctttcacataagagtatgaagtgagtgtcccaagtaggcaggtagcatttggcacctcctgtgctgtagctctgttccctagcacgtcgtcatcatcatcacaaggtcaaggctgggtccagccagtgagaaggagaaagagtaactcctgccagagttttagcaatgttagctatggctaagcctcaacctccccaagcctcactttattcacctgtaaaataggactaacaaaaatcatctttaattccaagatgtttcgaggatcaaatgaaacaacgtatgtaaaactgctttgcagactgcgcagtggcctacaagtggtagtcactacatcgtctctttgctgagtatcagtttctttatctgcaaagggacagctgaatacacacctcccaggattgttgtaagaatctgctagacaaacgattaaagtataaactttggaatccaacaggcataggttggcatcttgctctgcccctcaccagctgtaagatctcggaccctctctgagcctcagtttcctcatctgcagcgaagggatcacggtgctccctccatcacacggctgctgtgagcatgaagagagacagcaggagtgagtccttggcgcggtgcccggccttgttccgatccgcaggtgcagtgacgaatgccacctcccacggatcccttccaacagcacagctgagttgtacccttctgcctctgctcagcgcccacggtcagccctgggtgccggtataattagctccaactcggtggtgagcagcgcggctgctcacagcctctgacacgactgtcacctcccactcagttccccaaaccacagctatccccactgttgagtgtgcggtaagtgcccgctgggcacagggcggagtgccaccagaggcccgcttagagctcacaacctatgatttgacacagcgagcaaaagccttttccttcactctaggactgcataccaaaaagaaaaaaaagtttgggggaaaaagaaagctgcctcttgggttagctgggaaattaccttccttcagaccctgtagcccgcaggggaatggcgtcctgtttctttaagaggcctccactaggggggcggggacggccggcgtttttcccctctaccggcagctgtgcccgccccttcttgagtgacagacaagcaacctaattgaagaaagagacttcagcgtgacggcgagtcggagcaatagaagccgggcccggcctgtgcggggcggggtcccaagaaggcggggcgggcggaggctggaggagccgccgagcggagacccgggagcaggagctgggcctaggtctgcgccctggtgagtgaggggcgccctgggggtcggggcgcggcaggcggtggagaggggcccggcccgaaagacgcagggaagagaggccgggccgagcgttgcggctagcgtctgctccggaggctgaggggctgagagggcgggcctgggctggaccgcgccggctcgtcaggcccccgaggggtggcggccctgccggggccttaggaagggaggagagaccgggtcctggacccagaaggggcgtcgcgtggcggaagagggcgggccaggcagtcaggcacgggggctgggctgggcagcggtcggagggagaaggagggaggcgttgggtgggaagatcggggaggggcggcaaggagagggctgggaagaagccggagagcgctcggggcgggcccgcacgagttgaaagcccggggtcatgctcaacctggacccggctgcccgcgtccaccagtccgccccgtggatcctgctggctcagtagcaccccggtgcatgtactttccacctcctgcgctcacccttgagttcaggcccctctcgcttcctgcctgggcagttgcagtgtgttaactggtctgccctgcgcaggcacaggggcccttctcctgtcggccttgcaccgtgcccagagaaacctttcctttttttttgaaacctttccgagacggagtctcgctctgccgcccaggctggagtg[137 bp omitted]ggtttcaccgtgttaggctggtctcgaactcctgacctcaagtgatccgcccgtctcggcctcccagagtgctgggattacaggcgtgagccaccgcgcccagccgagaaatgcagagcag

SEQ ID NO: 961 - DNA, 6000 bp, Homo sapiens
ccctccaggagaccacagtacgtaaacagacacacagtatatctgcagtattttatatatatatatatattttttttttttttttttttttttgagacagagtctcgctctgtcacccaggctggagtgcagcagcgccatcttagctcactgcaagctccgcctcccaggttcatgccattctcctgcctcagcctcccaagtagctgcaactacaggcacccgccaccacgcccagctaattttttgtatttttagtagagacagggtttcaccgtgttagccaggatggtctcgatctcctgacctcatgatccacccacctcggcctcccaaagtgctgggattacaggcgtgagccaccacacctggccagtattatattttcatggggaggtggacaattaaaaaaaaatgtaaaatggttccttggaggagctataagtttaaaaataagcgttgagcaacactgaaatgagggaagatgaatcaagagaagataccatcattgtcacacacttggagttagggacacataagtctttcctggaacgtggggtacgcatgacactgtccaacctcagcagttctaactgcaggtcctgtcattgtttaaaacatcccacgcacctcacccccaccccagggagaacttaagttccagtgctctgctctcatcaaccccagagtttcctcttgctccttcatactccctccctcccatcccccaatccccaaggaaccactgatctgttttgtgtcactctagattagtgagcattttctagagggtgttatataagtggaatcatagcccaatttattctttcattcacttggtggatatttgggttgtgtccagcttggggctgtcgtgaataaagctgctatgactatgaatgtataagtttttgtatggacatatgtgctcacttctctttttttattattggttttttagagacaggatctcactctgttgcccaggcaggaacgcagtgatggggtcacagctcactgcagcctcaacctccagggctcaaatgatcctcctacctcagcctcccaagtagctggaactacgggtgtagatcaccacatctgattaattttttaaaattatttctcttgagtgagtacctaggagtagaatcactgggttttatggcaagcgtttgtttgactttttaacaaaggggctgattaaagtctctttccccaggcagtggggcctctctgggggagggagccactttctgtaattcaaaaggattctttcctaggaagacttcttaagagatgtcaaatattcatatccatccttcagagagcagggagttgacaaccacatccagttaggccaagacaattttctggaacatctctccagaggatggaaaacacatattacatatgtaatctctggcatgacagaatatatttgctataatataaaaatgtgaaaaatacattaaagtattgtaggagaggaaaaattttaccttacccttttagagttcttttctaactgggcctgaaaatgaaattgacatgagacagatcaacaggagaaaagcacacacagttatttaatgcaagttttacctgcacaggagccttcataaggaaacaaaggcccaaagacgctgttagagatgaatgcttataaactgaaatggacaaagtatcataagtcatgaaagtgggacgaggcaaaggtactggggctagggtcattgatcaggtggagaagtgactaggaagataggaattagttgaaccgggtctgtgtgtaaaggtttcccacgacctcaccttcctgtccttgataagaatgttactttctttctgttaaagggagggcatctttcacatgggaattttatgtcctgcttttaagtaacagaaggaagatcaaggcaatcttcttgtacctgctgtttttcaagtgcctttaactcaaaatagtcactatgccagagtggcatatttttaactccttcagtataaagaataaagttaggcagggcgtggtggctcatgtctgtaatcccagcactttgggaggccgaggcaggtagataccctgaggtcaggagtttgagaccagcctgggcaacatggtgaaatcccgcctctactaaaaatacaaaaattagccaagcatggtggtgtgcatctgtagtcccagctacttgggaggctgaggcaggagaatcacttgaaccaaggaggcagaggttgcagtgagttgagatcgtgccactgcactccagcctgggcaacagagtgaaactctgtcttaaaaaacaaacaaacaaaaaaggataaagttaaatggcccataatattgccacagagaggtaggtatggctgacagtctgctgtatgcctagagagtctttttcttgtgcatattatacatagaaatgtctgaccactaagatacacattttctacaatttaacattcctggtcaggtagttgagggtgatcactcctcaaaaaaaagtcacactccttcacttagtttccagaccagaaccagttttagtgtttaaagcacatgaattgaaggagaggctggcttcctaggaggaccctgtgatgccatgacagatggccacacgctggagaaagaggaacactcaaacatcgagaactattggcacagggtccagattgacatttacccaggaacccaaagcatcatcgtagcctccctattaaatcgagggcatatgaagggcaggaaataaatgggatcctggccgaagtctgggttacagcgggttcactagacccatgggccaaccccatggccatctccccagtccccaattggaatagacatgttggcaattggcacagctcccatgctggtcccttggcccatggggtaggagctatcagagtaaagaagaccagtggaagcctctgaaatagcccccaacaccccaacccaaccaaatgagtacactttttaaaatgtcacatccatccaaagaggaatattagagaccagagccatccttaaaaacctaaatgatgctgaggtggcagtccactcatagcttgtgtaattcaccagtcttgcccctgcaaaacccagacatattctggaggataacagtggactactgcaaactctgccaaacagtggcctcaatgcagcttctgtgccatgtgtggtacctctgctagagcagatgagcacagccttgggcacctggcatgcagccatcaatgcagctaatgtgttcttttccatccctatcaaaaaaacagtatcagaagcagttcacatttggtggagtggacaacagtacacatacacagtctttcccaggggttatctcaactgtttggtgctgtcatgacataatatgaagaggcctgaactggctggacatccacagaatatcacactggtcccctctattgatgacatatgctaattggaccgggtgaagtggctagaacatgtaggacttggtaagacacaagcacttcagagggtacaagactaaactcttcaaaagtgcaaggacttccaaataggttaaaaaattgagttccatgttctgaagcatgctagaacgttccctcaaaagtaagggcaaaacttttctatctttcatctcccatcaccaccaagaagaaagtgccatgcctatagacttctttgggttctagaggcagcacattccaaacatgagaatactgctctgatccaaatatctggtaaaaggaaaagctgctgcctttgagaggcaccaagagtagaaaagagctctgcagcaggtccagcctgcaaagcaggtatccttgaagctttggccacatgacctagcaggccctatggtattagagatattggtggtcagaaaagacattgaataaagtatatggcaagtctcactgggaaaatcacaactcagatccccagggttctggagcaagtcatgtcatctgcatcagagaattacacactctttgatatatagctctgtattagagttatccagagagacagaatcaataggatcaatctttctagatcaataaatcaatttagaaagagatagatgtattaagggaattggctcacatgctcatggaggctgagaagtcccacaacaggccttctgctggaactgctgggttgctagtagcatggctgcccaaaagcctcagaaccaggaagttgctgatataattattagtctgaggccaaaggcttgaggatccagggggctgctgttgtaagtccagagactgctgttaagtccagagtctggaaagcctggagagcctggagttccgatgtccaaaggcaggagaaaaaagtgtgttccagctccaggagagagaagaagagagggagggagagagagagagagagagaaaattgttttgttttgttttgtttctgccttttttgttctatgcgggtgccagctgattggatggtgcctgcccataatgagggcagatctcctcctctcagtccacaaagtcccaggccactgtcctctggaaacaccctcacggacacacccagaagtgatgctttacaagttctctagctattccttaacccagtccggttgacacctaaaattaaccatcacaagctcctgagggctacttggccccggagggagggaacacccgatcacgggaaagcaaacgattgtgcagccaaaactatccacaatgagtcagatatttgtcagatcaaccaagtcataagatcaggtgggcccagcagcatgccagaatagaagtgggacatggaggattgagcagaaggaggaccagatggcataagcgagctgcgtgagcaggtaaccagacccccatctcatccacctgttgtcttgctctcagctcatactgatggctgcatggggtggagagaagggtcctttatgaccagccaacagaggaggaaggagcctgagcttggtatatggatcaggtgcccagttttgatggtaaatggacacgtacatccatcatggcctcatacatgagaggcatggtgaccaagaagggctcagatcgcttaggaatgaaggttggggtcacaccatcaggtaagctaccaagcccagcagaggtgctgagggtgagggaagctggaaaagggtagaggttttctgagcagctgcctatatcggcagctctctgctgcaaggaaaattaaatttcttacatatttaaaccactgtaagttgggtttctgttacaccaattctgactgatatagtatttctaacaacagcatatggctggtttttgttcttcaatcctatttaatgaactttgagttttaatgggagaattcggctcatttgaggtttgtgtaaacctggatataatttatttcatttcttccattttaactcaggttcactatttattttactttgtcctttctctctttttcttgtttttgatggcttggtaacatggccatttattagattttttttttcttgtagatttttttcttttagattttcttatagattcttataggtttcttagagaagcgctatacttttccatgccatgagtggttatctgtatttttttcacattcagaataaaatacacaattgcaattatataatcctccattatgtgagaaaagcatctatttccccacattaaagagacctatttgtagtatttttctatatcctcagcccgcaaagatattgaaacacttttaccttccatcttcttccaccccttccctaaatactaggctgagatccttcaggacttacagtctgacattactattagtctttcttttaggattcctcttctctcagaaatctgtagatatacttacagcatagtttgcttccacggatgcagatgagaagtcaaatgacatctcattgtttctttgtaagttacttattttccctctctagaaatgagtaagcttttatattaacacttgagatttcagtcattgtt

SEQ ID NO: 962 - DNA, 6000 bp, Homo sapiens
aaacttcttgaaggaaattaaaagtgctaattcagaacacatgaatgataagaaaacaaaagagccttattgctgatacagagaaagtttgagtggtctggatagaagatcaaaccagctgcaacattcccataaaccgaaaccgaatccagagcaagcccctaactctcttcaattctatgaagacagagaggtgaagaagctgcagaagaaaagtttgaagttatcagaggttggtttatgagggttaaggaaagaagccatctctatagcataaaaatgcaaagtgaagcagcaagtgctgatggagaagctgcagcaagttctccagaagatctagctaagatcactgatgaaggtggctacactaaaaaacagatcttcaatgtagacaaaacagccttctattgggagatgatgccattaaggactttcgcagatagagagaagtcaatgcttggcttcaaagcttcaaatgataggctgactctcttgttagtagctaaggtagttggtgactttaagttgaagccaatgcatatttcccatttctcaagtcttagagccctttagaattatgttacatctctttggcctgtgctccataaatgtaacaacaaagcctggatgacagcacatctgcttatagcaaggtttactgattattttaagcccactgttgagaactgtgctcagaataaaaaagattcctttcaaaatattactgctcatcgacaaaacaccaggtcactcagaaactctgatgaagatgtacaaggagacaaatgttgttcctatccctgctaacacagtatccattctgtagcccatggatcaaagagtaactttgactttcaagtcttattatttaagaaatacattttgtaaggctatagctgccataaatagtaattcctctgataggtctgggaaaaatacattgaaaacctcctagaaagaacttactattctagattacatcaagaatgcttgtgattcaggagaagaggtcaaaatatcaacattaataataatttagaagaagttgattccaacttttatggataactttgagagactcaaggcttcggtggaggaagtaactgcagatgtgatagaaatagcaagacaactagaattagaagtggagcctgaaggtgtgcctgaactgctgcaatctcatgagaagactttaatgagtgtggagttactttttatgaatgctcaaagagagcaatttattgagatggcaactacttctggggaagagtctatcaacatcgttaaaatgacgacaaaggatttagaatattacataaatttagttgataaagcaactgcagggtttgagaggattgactccaattttgaacgttctactgtgggataaatgctatcaaacagcatcacatgctacaaagaaagctttcatgaaaggaagagttgattgatgcagccaacttcattgttgttttattttaagaaattgccacagtcaccccgaacttcagcaaactaccactcacatcagtcagtagccatcaacactgaggtaagaccctcccaccagcaaaaagattacgactcactgaaagctcagatgatcatcaatattttttagcaataaagtattttaaaattaaggtatgtacatttatagacataatgctattgcccacttaattgatgacagtatagaggaaacataacttttatatgcactgggaaaccaaaaaattcatatgactcacttaattgcaatattagctttattgtagtggtctgatactgaagttgcattatctctgagatatgcctgtatatcttcctttgaatgcttcttcggtcatagttcacagattttttattttttgtgccctcattgttattcattagaaataatttataatttctactttaatttttcttttgaacccaatagatagttaaaagagtaggttttgaatattcatgtctataggggttttgttggtaatgaggtttttgtttgtttggctattctttggcgatttctagttttattgcattgtggtctgtgaacacatttctgccatttagaatatagtggaatttcctctgagaattctgcggggatggttgttgaatacatctgtgctgccttcatccttcaatttaaaaccagctactgaaccttttgtgagccaagcagcttctggggtttagagatctagtgcatctctggggtccagaagaagggagttggcagagcaagtttctgcttctgagccccacgacagcccggggactggaggtgcagagcccaggagtaatggtcagaagaaaagtgaaatcgggaacacttgacctacggaaatccaaggacctcccaagggagaggctgcagctgcccccgtgagcactctatggtctcattgttccagctcatacaaagctgtgggggagaacaaaagtgctaaatcctctcctcaactgggaaaatgccagtctttgcagctgaagagactagcgggcagagggagaccttttgggaccaaccacttgccagcggacccagcaagtcaaagactgttgcaacatccattactcgagagactggccttgctctagatccccagcagctgaacatgggccccagtgggtcagcaaaggaaaataccaacccatcctgggggacccagaagtgagaaagtgaaagaaccagcatattgcagagaacaacagctacaaaccttctgggggagagagaggacagcctgaaccaaaaacaatgataacaacaacacgtaaggaaccacaaatacagtgtgcataaacgcacgcatacacacacgcatgcacacacgcgcacacacatgcatgcacacatacacacatgcatgcacacgcacacacgcatgcacacacacacatgcacacacacacacatgcacacacacacatgttctggatctaaagaatctcattttcagactaaaaatttcaagagatgaatcaaaggattgcagagtcactgttgaaacctgacctagaatgccaaatggagtaatgaaacaaaacacaaatcaaaaatgcaaagagaggaaaattatgaggtgaaataaacagtttgaggaaatgatgcaggcaatcaaatacttgcatatttggattattctatgttggaattattattattaggataatagaaatttgtaaaataaagcagatggaagacaggcaataattaaacaaataatagaggaaattgtccttgaaaattttccaataaagacttgatctgagatttgaaggacccactgaattccaaacagaacttacacaaaataatactcatctttagccatgtcctgaaaacaatgactgaaatctcaagtgttaatataaaagcttactcatttctagagagggaaaataagtaacttacaaagaaacaatgagatgtcatttgacttctcatctgcatccgtggaagcaaactatgctgtaagtatatctacagatttctgagagaagaggaatcctaaaagaaagactaatagtaatgtcagactgtaagtcctgaaggatctcagcctagtatttagggaaggggtggaagaagatggaaggtaaaagtgtttcaatatctttgcgggctgaggatatagaaaaatactacaaataggtctctttaatgtggggaaatagatgcttttctcacataatggaggattatataattgcaattgtgtattttattctgaatgtgaaaaaaatacagataaccactcatggcatggaaaagtatagcgcttctctaagaaacctataagaatctataagaaaatctaaaagaaaaaaatctacaagaaaaaaaaaatctaataaatggccatgttaccaagccatcaaaaacaagaaaaagagagaaaggacaaagtaaaataaatagtgaacctgagttaaaatggaagaaatgaaataaattatatccaggtttacacaaacctcaaatgagccgaattctcccattaaaactcaaagttcattaaataggattgaagaacaaaaaccagccatatgctgttgttagaaatactatatcagtcagaattggtgtaacagaaacccaacttacagtggtttaaatatgtaagaaatttaattttccttgcagcagagagctgccgatataggcagctgctcagaaaacctctacccttttccagcttccctcaccctcagcacctctgctgggcttggtagcttacctgatggtgtgaccccaaccttcattcctaagcgatctgagcccttcttggtcaccatgcctctcatgtatgaggccatgatggatgtacgtgtccatttaccatcaaaactgggcacctgatccatataccaagctcaggctccttcctcctctgttggctggtcataaaggacccttctctccaccccatgcagccatcagtatgagctgagagcaagacaacaggtggatgagatgggggtctggttacctgctcacgcagctcgcttatgccatctggtcctccttctgctcaatcctccatgtcccacttctattctggcatgctgctgggcccacctgatcttatgacttggttgatctgacaaatatctgactcattgtggatagttttggctgcacaatcgtttgctttcccgtgatcgggtgttccctccctccggggccaagtagccctcaggagcttgtgatggttaattttaggtgtcaaccggactgggttaaggaatagctagagaacttgtaaagcatcacttctgggtgtgtccgtgagggtgtttccagaggacagtggcctgggactttgtggactgagaggaggagatctgccctcattatgggcaggcaccatccaatcagctggcacccgcatagaacaaaaaaggcagaaacaaaacaaaacaaaacaattttctctctctctctctctctccctccctctcttcttctctctcctggagctggaacacacttttttctcctgcctttggacatcggaactccaggctctccaggctttccagactctggacttaacagcagtctctggacttacaacagcagccccctggatcctcaagcctttggcctcagactaataattatatcagcaacttcctggttctgaggcttttgggcagccatgctactagcaacccagcagttccagcagaaggcctgttgtgggacttctcagcctccatgagcatgtgagccaattcccttaatacatctatctctttctaaattgatttattgatctagaaagattgatcctattgattctgtctctctggataactctaatacagagctatatatcaaagagtgtgtaattctctgatgcagatgacatgacttgctccagaaccctggggatctgagttgtgattttcccagtgagacttgccatatactttattcaatgtcttttctgaccaccaatatctctaataccatagggcctgctaggtcatgtggccaaagcttcaaggatacctgctttgcaggctggacctgctgcagagctcttttctactcttggtgcctctcaaaggcagcagcttttccttttaccagatatttggatcagagcagtattctcatgtttggaatgtgctgcctctagaacccaaagaagtctataggcatggcactttcttcttggtggtgatgggagatgaaagatagaaaagttttgcccttacttttgagggaacgttctagcatgcttcagaacatggaactcaattttttaacctatttggaagtccttgcacttttgaagagtttagtcttgtaccctctgaagtgcttgtgtcttaccaagtcctacatgttctagccacttcacccggtccaattagcatatgtcatcaatagaggggaccagtgtgatattctgtggatgtccagccagttcaggcctcttcatattatgtcatgacagcaccaaacagttgaga

SEQ ID NO: 963 - DNA, 6000 bp, Homo sapiens
tcaggcgtggtgcctcacacctgtaattccagcactttgggaggcggaggcaggtggatcacctgagctcaggagttcaagaccagcctgaccaacatggtgaaaccccatctctactaaaagtacaaaagttagctgggtgtggtggcacatgcctgtaatcccagctatttgggaggctgaggcaggagaatcgcttgaacctgggaggcggagattgcagtgagccactgtaatcccagcactttgggaggccaaggtgggtggaacacttgagcccagaggtttgagaccaacctgggcaacacagagagacccaatccctacaaaaaaaaatttaaatatatacatttaaaaatttttaattaaaaaaatataaaataaggaaatagaggacataatatattacctacaacttatatcctaattaataaaggagatttcccattttgtatgagtagatttgtttttttgagatggagtctcgctctgttgcccagctggagtgcaatggtgcaatctcagctcactgcaacctctgcctcctgggttcaagcaattctcctgcctcagcctcccaaatagctgggattataggcacacagtaccacgcccggctaattttcatatttttagtagagatggggtttcaccatgttgatcaggctagtctcaaacgtgtagatttttataacatataaacatatatttaaacagaaataagccaggtgcagtggctcacgcctgtaatcccagcattttgggaggccaaggtgggcagatcacctgaggtcaggtcaagaccagcctggccaacatggtgaaaccatctctactaaaaatacaaaaattagctgagtgtggtagtgggcgcctgtagtcccagctacttgggaggctgaggcaggagaattgcttgaacctgggaggcggaggttgtagtaagccaaaatcgcgccactgtactgtacagcctgggcaacagagtgagattccatctcaaaaaaaaaaaaaaaaattaaagtgcctccattttaaaaaagataagaaacaacaatcagatacttctcaatgtttagctgttaacactcttctgcatctcagttgggctttaaaagcgagattgagacataagacttgttctttcccagcataaccagatgtgtccacgcccttctggatccaaataaaatgtaaagttatcttcctcaaggagcacaccatagacaatgtgtcttttcagaatgtctttccttacattagacagattggggttttttttgtttttgcgcggggggacagaatcttgctttgtcgcccaggctggagtgcagtggtgcgacctcagctcactgcaacctctacctcccaggttcaagtgattctcctgcctcagcctcccaagtagctgggattacaggcacccaccaccacacccggctaatttttgtatttttagtagagatggggtttcacaatgttggccagactggtctcgaactcctgacctcgggtgacccatcctgtcctcccaaagtgttgggattacaggcgtgagccaccatgcccaacctagacagattgttttataagggtttagaaagaaaggaaactacatgaatgagtacttagtctcctgctccttgaagtggatgaattgttttctttggtttccaacacagtctgttaagagttgtagcacgccccaagagtatgtgcatgtagtggagctgggatggggaggattcccaagggaatctttagctgtcacccatgaaccatgcagagtggagaaggacactcagcctttctgtggctctcacctgcatgattattctggtggctgcaaagggcgataggcagtaggaggagacaccccgtgacaccaagagctgtgtccagacatgatcgtcttggcacagcttgagggttttctacagaaactggtagagatgctagacagacacaagatgccagccagcctcctttgcgattggctcttagaggtggaaaatggtaaagtcatcaggctcattctccctaggactagaggaacatgttaattatattaaagtagattagtgggccgggtgtggtggctcacgcttgtaatcccagcactttgggaggccgaggcgggcggatcatgaggtcaggagatcaagaccatcctggctaacacggtgaaaccctgtctctactaagaatacaaaaaattagctgggcatggtggcgggcgcctgtagtcccagctgctcgggaggctgaggcaggaaaatggcgtgaacccaggaggtggagtttgcagtgagccgagatcgcaccactgcactccagcttgggcaacagtgtgagactccgtctcaaaaaaaaaaaaaaatgcagattagaacgattaaaatgattactggtgattactggtactattgctgcaatagtaaaaatacatctttttcaccaatgtctttgtttttttttaaaatgttccaccgtcttctgaccatcatggtttatttttatttttattttatttatttatttatttttttaagacacagtctcgctgtcacccaggctggagtgcagtggctcgatctcggctcactgcagcctctgcctcccaggttcaagcgattctcctgcctcagcctcctgagtagctgggactacaggcgcatgccaccacatctggctaatttttgtatttttgtagagacagggttttaccatgttggccaggatggtctcgatctcctgacctcatgatccgcctgcctcagccttccaaagtgctgggattacaggcatgagccaccgtgcccggcctcaccaatgtctttcactcatgtatctttctccatggacttcacttatttatatatggcatttcattcaacatgcaacaaacatttattaagcagctactgtgtgcctagtgctgggggtacagctgtgaataccatcaatatggggctagatgtggtggctcacacctgtaatcccggggctttttttttttttgagatggagtttcgctcttgttgcccaggctggagtgcaatggcaagatctcagctcaccgcaacctctgcctcccgggttcaaacgactctcctgcctcagcctcccaagtagctgggattgcagacgtgcgccaccacacccggctaattttgtatttttagtagagacggggtttctccatgttggtcaggtctcaaactcccaatctcaggtgatctgcctgcctcggtctcccaaatcactgggattaccggcgtgagccaccatgcccagccctatcccagtgctttaggaggcggaggtgggaggatcacttgaggccaggagtttgcctgggcaacatagtgagagctcatctctacaaaaaaattcaaaattagccaggtgtggtggcaggtgcctgtagtcctagctactcaggaggctgaggtgggaggattgctttagcctaggaggtcgaggttgcaatgagctatgattgtgccattgcactgcagcctgggtgacagagcaagaccctgcctcttaaaagaaaaaaaaaaaaaaaaaaaaagccctggccaggcgtggtggctcatgcctgtaatcccagcactttgggaggccaaggctggcggatcacaaggtcaggagttcaagatcagcctggccaatatggtgaaaccccgtgtctactaaaaatacaaaaatcagcggggcatggtggcgggcacctgtagtcccagtaacttggggggctgagtcaggaaaattgcttgaacctgggaggcagaggttgcagtgagctgtgacagcaccactgcactccagccctccagcctgggcgacagagcaagactctgtctttaaaaaaaaaaaaaaaaaagaaaagcccttgctgtatagaatcccttaggttatggatggggaggagggcaggggtttaggaggggagaagcggaaggaggaacaaaataaagaagagacaattagttggagagtgataaataccataatgatatcatggaactaggcttaccagatcaaacactgggcacccagttcaatgtgaatttcagataagcaatgcatgatttttaagtataaatatgtcctacacagtatttatactagaaaattataaatttttttctaaaatttacattgacctgggcagcctgcattttatttgctaaacctggcaaccctaatttgtgtgctgggtggtggtgagtgggcaatttcagataggcctcttttgtggaggtgacatttgagctggaacctaaatgtaaagaaggagccaatcattcaggaatctagaacatcccagcacagggaacagcaagtataaatgctctaaagtggaaataagcttggagcttagaggaacaggaagaaggtggggtggcggagctgagtgagggtgaggagaggagggaagcggaaggtgatgagggcaggcaggctggcaggggccagatcccatatggtttgtgggctgtaataagagtaccaaaacttacataccaggccaggcgcggtggctcacgcctggaatcccagcattttgggaggccaaggtgtgcggatcacttgaggccaggagttcgagacctgtctggccgtgtctccctctaaaatagaagctccaagaggggcaggaagttctcttccgtcttagaccctatgtgcacgaccttggatcgatcaacattgaacacctcctacgtgccaagccctgacatcaaaatgggtcagaagccagcagccgctcgctgaatctgtgttcctctttggaaaacgagaaccgtgaagcctgctggcatggtcagagccaaagagcattgtcacttgtgagatcagcgcagaaacagagcggggccccgattggcccttcgaacttgggtggggccagagcattcctggccccgccccctgcagcgggccgctcgctcatgcgctctggcctcaggctcgctgtcgcgccattttgccggggtttgaatgtgaggcggagcggcggcaggagcgggtagtgccagctacggtccgcggctggggttccctcctccgtttctgtatccccacgaggtgaggcgcggggcgtgcacggcctaccagagtggctcttggggcccagctgaggaagggatgaggcgctcccggtactaacgagcgctagggagtgagaaccgcgcctctgggcgagagcggaatgtgggcccggggttcgggtggtgcgctcaggcaaggtcttcggcttccctagggagcgcttgccgcgcctcgcggcatcctaggtctctggcccaggtgcggcgaccccagggcctgtgagggctgagggcaactgaggcgcggcctaacgcgagcctgcggattgcccgccctttcctctccatcacggcgctgattggctgcgccgccgcctctccgctcgggaaggccgctccttattggtcgcgctcgcatgtccattctctgcgacggtggctgctagccgcgcgagctgagtgtgcggcggcgaggcctgcccgggcggggactgcgggcgcgtggagctgcggctgcctcgcgtcgtcccttgccctaactctagtgaagcccccgaactcacccttctctaacctctgtacttgtatccctgactgtaaaacgggcatcgtgatctcactttgctgaattgtttgtgagaattctagtcggtacacccgggacatagaaatcccctgtaacgcgggttgggggagggttccctcgttttgggagaaacgctgtgctgtggtggttcggagcatagactttggaattagatcgcctgggttcattccagacgtagcctctcgttaggggtgtaacttgaggctggtcacctcatctcactgagcctccatttccttagctgcaaaatggggttaataacagaatctacctcggaaagtggctttgaggatgcgctgagttatttaccgtggtttacaaaggttccctggg

SEQ ID NO: 964 - DNA, 6000 bp, Homo sapiens
gtggaaaaattattattattatttatttatttatttatttatttatttatttttgagacagagtctcactcttgcccaggctggagtgcagtggcgccatcttggctcactgcaagctccacctcccgggttcaccccattgttgtgcctcagcctcccgagtagctgggactacaggcgcccgccaccacacccggctaattttttgtatttttagtagagacgggtgtttcaccaggttagtcaggatggtctcgatttcctgaccttgtgatccactcgtctcggcctcccatagtgctgggattacaggtgtgagccaccgcacccggcaattattttttttttaataatgtgtgaggcaagagttctgttgctttatgtattcaggacagagtataaaaataatctggtatttctgggaagttaggaacatagcatttctcagggatcgagactgactgactagactgactcaactagaccttttgagactccttgagtgcgcagaaacatatgcatgtgaatattgtgataagttgaaagaaatgaacacagaaaggaacagactcaaactcacttcctggatattgattacaatttaggaaagagacttggcaatttatatgggcttttcctcaaatcatggatgtagtgtgttgccctgtacaaaatgctggctactaagtggaggaaacaaattgttctgtactcatataaaaccatagtatgtcccctcctgaaaaacatttttcagtttaacaatcttcatccttcaagaaagacatgataagcacaaagcaaggagagtttgaaaatatcagtgaaactcttgggactcagtcagaaagagggaaggtgttaaatgatacatgaaattaatttttcaaaaaatattggaatattgggtgttgccctatgaagccaaaggtagaaaaaaattaagagaaatactgtactgccatcacatgtgatcattaacctaggaaatttatcccagaatgtaatctgggttgaaaatctattggtaaattttttggataaattcattgctggtattaagaagtttttaggtttttttttagttcgacaagaaagcttagggctggtaaggtaaaataaggactgcactaaaactttcagtagtgaagcctagctgtgtgatcttgaacaagttacttaaccttagtgccttggttttttaaatgctatctacttttctgggtaatagtgacaactaaatgaaattttataattttacatatataatatatatgtaaatcgttggacccatttggctaataataatatattaggatgaattgactcatttgctcttcatcactagcctataaaagaaatattactactaatagtactaataatactcctttctgaaataagacctgggtatatgaagtcttgaagccacttaatctgcctgggaagcagcttctcttgcagatgagatgatcatccaattaggccactgtataggtttgtgagaatcatgtgagttaattgatggtaaagttatttgaaaactgaagcattatataagtttaatgtaacatatataatccacttaatagataagaaaagtgaggccctgtagacccacaaataacctaatcttttctctttttttgatttttttttatatatatatatttgatatatataaggtggaaagatttttatcttagtcttttaacatgaaaattcttttacagctgagaaatttcttgaatctgttgaaggaaatcagaattatccactgttgcttttgacattactggagaagtcccaggataatgttatcaaagtatgtgcttcagtaacattcaaaaactatattaaaaggaactggagaattgtaagtattttgtgaatacataatttaataccctgtatgtttataaggtttatataagcagtgttcttcaaagataaggcacgtgcttgtagtcccaactactctggaggctgaggcggaaggatcacttgagtccaggagttcaaggctgcagtgagctatgattgcaccactgtactctagccttttagtgacagaatgagaccttgtctcaaaaaaaaggattcagatatggatcaaagataaaattaaacaggacccttttccaaagcttctgttatttcatttgaatttatataaatttgtccagcttcatacctcgggttgctagggagtgagacttggtcttaatctccattatgtttggaatttatgctttactcaccgcctactgaagagacattgtgggaagacagtctgaataaatgaagtgatttctgatgttggaaaaataaagctgagaagaaatcagatacataaaacatttgcagaatgcaaaataatttagatttcaactttttgataaggtattttgccctatgtcttgtgggatatgtatatatatactaattttgagattaaacctattttataacaggtttaatgattagtaaattataaattaagaaacaggcattttttttccttagcttaggacagtgattctcaactgggggcagtttggctcaccaggggacatttggcagtatatttggagacatcatagctggaggattgctactggaatctagtgggtagaggccagagatgctgctaagcatcctacaatgcacaagatagctttccacaacaaagaattatctgagccaaaatgtcagattgagaaagcctggctcatgatagagaaaaagatgaggcttttctatagtgatagcagttatgatgttacaaagtattagcagttgacaaaaatcatcagtttatctaaaaagtcaactttaaactgctcaaaaacatcttagagtcttactttttttctcattccataaaagagagagtaaatattgttttaagcctgtatgatttctcaagtatcaccatgagtggtaaagaaatcttagaggccgggcttggtggcccatgcctgtaatttcagcactttgggaggctgaggtgggtggattgcttgagctcagcaattcaagaccagcttgggcaataaagtgagatcccatctttccaaaaaatacaaaaattagcgaggcatatggtggtgcacggcctgtagtcccagccattagggaggctgagatgaggggatcacttgtgcctgggaggcagaggttgcaatgaactgagatggtgccactgcacttcagcttgggcaacagtgccagacactgtcttttaaatctcagaatgtttaaaagtccatctctactggtagacatgccagccctctccctctattttgatttgtaaaactagtgagacttaacagaatctctttgggtgatataatctaggatgcattctaactagtaatggtcaagaaattttcacagagggctgggtatggtggctcacacctgtaatcccagcactttaggaggctcagatgggaggattgcttgaggccaggagttggagaccagcctggacaacaaagtgagacccctcttctctacaaaaaaatttaaaattagccaggtgtggtcgtgtgtggtgtgcatctgtggtccttgggaggctgcagtgggagggattgtcttgagtctgggaggtgaaggctgcagtgagccaaggttttgtgctaccctccagcctgggtgacagatggaaacccagtctcaaaaaaaaaaaaagaataaaaaaaattggaaagatttttgttctaaagtgagagttaaattgaagcttttgaggatgtgtatggattaagtagcatatatctgtaaagattttaattatgtgtcctgattagtttacatatgaaatgaaaaaaaaatttttttttttttttttttttttttttgagagggagtcttgctctgttgcccaggctggaatgcaatggtgcgatcttggctcattgcagcctctgcctctcaggtccaaatgattgtcctgcctcagcctcctgagtagttagtgttacaggtgcccaccaccatgttcagctaattttgtatttttagtagaaatggtttcaccatgttggccaggctggtctcaaactcctgaccttgagtgagccatcgcacctggcctaaaatggaaattttttttttttttttttttttttttgagacagagtcactcttgttgcccaggctggagtgcagcggcaccatctcggctccctgcaacctccacctcctgggttcaagcaattctcctgcttcagcctcccgagtaactgggattataggtgcctgccaccatgtccggctaatttttgtatgtttagtagagacatggtttcaccatgttggccaggctggtctcaaactcctgacctcaggtgatccacctgccttggcctctcaaagtgctgggattataggcgtgagccactgcgcccagtctaaaatggaaattcttaattggcatcaaggagtaagggaagttcactaatttgtatgtaaaatatttgcatttgggaggcaatgtacgtttttctgggaaaaggattcacgctgtcatcagattattgaaggaatctgtgacccattcatgtagagggaaactgaagaaagaccaaaccttcctctatttgttttcttagaaaattagtaaataaaaaaacagttatgttttacctaaaatcatgtggacatgaatgtggattttgtgttacttcctcagttactgctttgcttttaggttgaagatgaaccaaacaaaatttgtgaagccgatcgagtggccattaaagccaacatagtgcacttgatgcttagcagcccagagcaaattcagaagcaggtaatgtcgctccactttttagatgggctcctctgtaaagctctgatctaattaatcttttcctctcctagttaagtgatgcaattagcattattggcagagaagattttccacagaaatggcctgacttgctgacagaaatggtgaatcgctttcagagtggagatttccatgttattaatggagtcctccgtacagcacattcattatttaaaaggtattgatgcatagattcatgtttttaaaatactttctaaagttttatttgcttgtgtaaacagttgtgtttttgtgactgttgtcattcctttgaatctgatcatcttggaatgagagcagaagtttctgtattgcgtttgtttcttctcaactaggatgtttatttcatattgctctattacctgtgaaatacttagtcttgataaactgcttgatccctttaaaaagaaaactggctgggcatgatggctcacacctataatcctagcactttaggagggcaaagtgggcggatcacctgaggtcaggagtttgagaccagcctggccaacatggtaaaaccccgtctctactaaaaatacaaaaaaaactagccaggcatggtggtatgtgcctgtcatcccagctactcaggaggctgagacaggagaatcacttgagcctgggaggtggaggctgcagtgagccgagatcaaaccactgcactccagcctgggcgacagagcgagactccgtctcaaaaaaaaaaaaaaaaaaaaaaaaagaattccctttgaatttcggaatttcggaaacccatctattcatagatgtccaatcagcatctctccttgaagacctaaagtgagtaaataaaaaaaacttgtaaatttatctgttttaccttaattttctagataccgtcatgaatttaagtcaaacgagttatggactgaaattaagcttgttctggatgcctttgctttgcctttgactaatctttttaaggtatggaatgcatcttggtgatatttttaaattaatattttaaattgcttgaatgtttgtatacatgttaagagaatgctttgaaagcttatttgatagataatgtttagagcatttcttttgaaaaatttcaaacctacacagaaatagagatgctatagtgaactcccatctattattacacaaat

SEQ ID NO: 965 - DNA, 6000 bp, Homo sapiens
aaagattttaattatgtgtcctgattagtttacatatgaaatgaaaaaaaaatttttttttttttttttttttttttttgagagggagtcttgctctgttgcccaggctggaatgcaatggtgcgatcttggctcattgcagcctctgcctctcaggtccaaatgattgtcctgcctcagcctcctgagtagttagtgttacaggtgcccaccaccatgttcagctaattttgtatttttagtagaaatggtttcaccatgttggccaggctggtctcaaactcctgaccttgagtgagccatcgcacctggcctaaaatggaaattttttttttttttttttttttttttgagacagagtcactcttgttgcccaggctggagtgcagcggcaccatctcggctccctgcaacctccacctcctgggttcaagcaattctcctgcttcagcctcccgagtaactgggattataggtgcctgccaccatgtccggctaatttttgtatgtttagtagagacatggtttcaccatgttggccaggctggtctcaaactcctgacctcaggtgatccacctgccttggcctctcaaagtgctgggattataggcgtgagccactgcgcccagtctaaaatggaaattcttaattggcatcaaggagtaagggaagttcactaatttgtatgtaaaatatttgcatttgggaggcaatgtacgtttttctgggaaaaggattcacgctgtcatcagattattgaaggaatctgtgacccattcatgtagagggaaactgaagaaagaccaaaccttcctctatttgttttcttagaaaattagtaaataaaaaaacagttatgttttacctaaaatcatgtggacatgaatgtggattttgtgttacttcctcagttactgctttgcttttaggttgaagatgaaccaaacaaaatttgtgaagccgatcgagtggccattaaagccaacatagtgcacttgatgcttagcagcccagagcaaattcagaagcaggtaatgtcgctccactttttagatgggctcctctgtaaagctctgatctaattaatcttttcctctcctagttaagtgatgcaattagcattattggcagagaagattttccacagaaatggcctgacttgctgacagaaatggtgaatcgctttcagagtggagatttccatgttattaatggagtcctccgtacagcacattcattatttaaaaggtattgatgcatagattcatgtttttaaaatactttctaaagttttatttgcttgtgtaaacagttgtgtttttgtgactgttgtcattcctttgaatctgatcatcttggaatgagagcagaagtttctgtattgcgtttgtttcttctcaactaggatgtttatttcatattgctctattacctgtgaaatacttagtcttgataaactgcttgatccctttaaaaagaaaactggctgggcatgatggctcacacctataatcctagcactttaggagggcaaagtgggcggatcacctgaggtcaggagtttgagaccagcctggccaacatggtaaaaccccgtctctactaaaaatacaaaaaaaactagccaggcatggtggtatgtgcctgtcatcccagctactcaggaggctgagacaggagaatcacttgagcctgggaggtggaggctgcagtgagccgagatcaaaccactgcactccagcctgggcgacagagcgagactccgtctcaaaaaaaaaaaaaaaaaaaaaaaaagaattccctttgaatttcggaatttcggaaacccatctattcatagatgtccaatcagcatctctccttgaagacctaaagtgagtaaataaaaaaaacttgtaaatttatctgttttaccttaattttctagataccgtcatgaatttaagtcaaacgagttatggactgaaattaagcttgttctggatgcctttgctttgcctttgactaatctttttaaggtatggaatgcatcttggtgatatttttaaattaatattttaaattgcttgaatgtttgtatacatgttaagagaatgctttgaaagcttatttgatagataatgtttagagcatttcttttgaaaaatttcaaacctacacagaaatagagatgctatagtgaactcccatctattattacacaaatttaatggttagcaacgttttattttctctgttccctttcttaggaatgttataaaagcaaatcccaagcatcatatcatttcacccaagtattttaaagtatgtgtctctaaaggaagaaatacatatttttatttgactatgtttggagtttaattaattatatatttatacattattttacagtttacaggatactttcctgaatgtgttcttggtgtttgtgaaaatcctataagatttaaagaaatatatatatactttttttcttttttcttttttaaagacagggtctcactctcattgcccaggctggagtgcagtggggcatgattatagctcactgcagcctcaactacccaagctcaggtgattctcccacctcagcattccaagtagctgggactacaggtgcacactaccatgcctggctgctttttctctttttttttccctctctctttttttttttttttttttttttttgagatggagtttcgctcttgctcactgcaacctccgcctcccgggttcaagcaattctccgagtacactgggattacagcctgtgccactgggcctggccagtaaaacctgttaatcgcatttagaataataaagaattggaaacaacctaaataccaagtggcagatgaattgtttaataagagcatataaagatagttttgtgtaatatatttttatatatgcacagattgggaagacgtagttcagaatattaacactggactttttagtgccattatgaacagttcaaaaatacatactttaacctattttccacaatctcttaagtgactgtattatttaaaagccaaggctgggcatggtggctcacgcctgtaatcccagcactttgagaggccgaggcgggcggatcacgaggtcaggagatcgagaccaccatggctaacgtggtgaaaccccgtctctactaaaaatacaaaaaacaaaaacaaaattagccgggcgtggtggcaggcacctatagtcccagctacttgggaggctgaggcaggagaatggtgtgaacccaggaggtggagcttgcagcgagccgagattgtgccactgcgctccagcctggacgacagagcaagactccgtctcaaaaaaataaataagtaaaatatgaatagtctcagcttagtgcaaggctgtttcactaagatcagcatgctgggtttatgatgcactaaaaccatgttgctaaattcctttccaaggccactattgaactctgcagtacccatgcaaatgatgcctctgccctgaggattctgttttcttccctgatcctgatctcaaaattgttctatagtttaaactttcaggtaagttcatttgatttcttgcttttggttcttactctttgattttaaatagagttttctttctgtttgataaagacttctttgccagcattgatttttctgaaagaaaaggttttttctgactctatttatctatagtgttctgttctacagtagttctttcagatgctaatgagatgtttcatggaaaaaagcagtattctcttatatctagtaggttagcaaaaccccacatcctaactcactcttggagagtcaccctgtacactgttttactggtggcattaagaagctagatttctgaggccttcctctttcgttcatttatatgggtattaacatttggggaatcatgttttggttaggggttgctgtccagcttatacaaaatgacttttattggaagccatatgagggagacaaaagacttgaagtaccagactttgaaaggggtaggaactagtagtatttcagaggaaacatagccacagggctatagcagggaatgcctagttaccctgttgctactgagatagtggcctccaatcattctttctgttcttaatcattaattcaagattcaggaccaagaaaggggtgttaattggtacaaactgttgctatactgcgatgcaaggagggcctagcccattcattgtttgtagccagtacctggacttaccttcacaacatgaataaactcatagtggtagggaaagcattccccaaaaggaaattgggttgttttagctagaataggagatgaacagcccaaaaggacatgtcccacatcagtgttcagctggatagcagtttgagaagttcttacttaaatgagtactactatttttgcttacaccttttgaattctgagaagtcaggtttaatgaagctcttgagaacttgtctggcagggagaccaaggaaagaggcataatctaccctcaggggacttgtaccctcattaagaaggcagtactatgccacaagaaatcagtaactaaaagacaattagtttatctgccttggtggtcatcttacaataaacgtagttcagaaaagaaaggggatgtattagtatgcactgagcttgagctttgtaaggaaagtcttcatatagtcttagctgaaccttgaaggaagatttagattaggatgagaactagaggtggcatcatttatagcatacaaacagaggcagaagtcagaatgctttatgcagctgccagatgtagctggagcagagaattcttgtcagaataggtaatgctcaggctgtgaagcctgtgtataaaatgttttgtccacgtggtaagggaacttataaaagtggtgttcttaatattttaatcaaaagtttcaagtcagtgtttattctgtaggatctccctgaattttttgaagataatatggaaacttggatgaataattttcatactctcttaacattggataataagcttttacaaactgatgtaagtatttaaaatgttgcctgagtggtctttttctttcattaagagttatttggctacagtctggaaacctatttactcttgcattgttaaaagataaaatttcaatactgtaataatatttgattctatttgatgttacatgtttggtgtgtgtagtatacagaattactcttatcatgggcttggcttaagccatagtgtacatataaggctgtttcattacattattgaaagtaggtctttaaagtagtgacattatggatatttcatgaaataaaattatttttcattgaagatactaagaaaacttaaaactctataatggtagcccctttttaaaaatcatctggctaggcatggtggttcacacctgtaatcccagcactttgggcggccaaggtggggaggatcccttgagcccaggagttcaagaccagccttggcaatgtaaggagacccccatcactacaaaaaataaaaataaaattagccagatgtgttggctcatgctaatggtcacagctactcagaaggcttagttgtgaggatcccttgaccttgagcccaggagggcaaggctgcaatgagctgtgaccatgccactgcactccagcctgggagacagagggagacctcgtctcagaaaaagaaaaaattatccacagctcgagaaagagagaaaatggtaaaagattgtaatttgtaaatatttctgatatgggttttatattgtgtacttttaaacatataacacttattctgtgctactcatttgttaatatatttatgaccttctttccgaagagacaaaagacaaaatattaaaaatatttcaataccaaataaactaaaaattagaattggtgattcaaatcaggttttaagagtggggtacagaaagaaattgttactatcgttgtacaacagattttgtctcagagtttgactatattaataggaa

SEQ ID NO: 966 - DNA, 6000 bp, Homo sapiens
gaagaaatacatatttttatttgactatgtttggagtttaattaattatatatttatacattattttacagtttacaggatactttcctgaatgtgttcttggtgtttgtgaaaatcctataagatttaaagaaatatatatatactttttttcttttttcttttttaaagacagggtctcactctcattgcccaggctggagtgcagtggggcatgattatagctcactgcagcctcaactacccaagctcaggtgattctcccacctcagcattccaagtagctgggactacaggtgcacactaccatgcctggctgctttttctctttttttttccctctctctttttttttttttttttttttttttgagatggagtttcgctcttgctcactgcaacctccgcctcccgggttcaagcaattctccgagtacactgggattacagcctgtgccactgggcctggccagtaaaacctgttaatcgcatttagaataataaagaattggaaacaacctaaataccaagtggcagatgaattgtttaataagagcatataaagatagttttgtgtaatatatttttatatatgcacagattgggaagacgtagttcagaatattaacactggactttttagtgccattatgaacagttcaaaaatacatactttaacctattttccacaatctcttaagtgactgtattatttaaaagccaaggctgggcatggtggctcacgcctgtaatcccagcactttgagaggccgaggcgggcggatcacgaggtcaggagatcgagaccaccatggctaacgtggtgaaaccccgtctctactaaaaatacaaaaaacaaaaacaaaattagccgggcgtggtggcaggcacctatagtcccagctacttgggaggctgaggcaggagaatggtgtgaacccaggaggtggagcttgcagcgagccgagattgtgccactgcgctccagcctggacgacagagcaagactccgtctcaaaaaaataaataagtaaaatatgaatagtctcagcttagtgcaaggctgtttcactaagatcagcatgctgggtttatgatgcactaaaaccatgttgctaaattcctttccaaggccactattgaactctgcagtacccatgcaaatgatgcctctgccctgaggattctgttttcttccctgatcctgatctcaaaattgttctatagtttaaactttcaggtaagttcatttgatttcttgcttttggttcttactctttgattttaaatagagttttctttctgtttgataaagacttctttgccagcattgatttttctgaaagaaaaggttttttctgactctatttatctatagtgttctgttctacagtagttctttcagatgctaatgagatgtttcatggaaaaaagcagtattctcttatatctagtaggttagcaaaaccccacatcctaactcactcttggagagtcaccctgtacactgttttactggtggcattaagaagctagatttctgaggccttcctctttcgttcatttatatgggtattaacatttggggaatcatgttttggttaggggttgctgtccagcttatacaaaatgacttttattggaagccatatgagggagacaaaagacttgaagtaccagactttgaaaggggtaggaactagtagtatttcagaggaaacatagccacagggctatagcagggaatgcctagttaccctgttgctactgagatagtggcctccaatcattctttctgttcttaatcattaattcaagattcaggaccaagaaaggggtgttaattggtacaaactgttgctatactgcgatgcaaggagggcctagcccattcattgtttgtagccagtacctggacttaccttcacaacatgaataaactcatagtggtagggaaagcattccccaaaaggaaattgggttgttttagctagaataggagatgaacagcccaaaaggacatgtcccacatcagtgttcagctggatagcagtttgagaagttcttacttaaatgagtactactatttttgcttacaccttttgaattctgagaagtcaggtttaatgaagctcttgagaacttgtctggcagggagaccaaggaaagaggcataatctaccctcaggggacttgtaccctcattaagaaggcagtactatgccacaagaaatcagtaactaaaagacaattagtttatctgccttggtggtcatcttacaataaacgtagttcagaaaagaaaggggatgtattagtatgcactgagcttgagctttgtaaggaaagtcttcatatagtcttagctgaaccttgaaggaagatttagattaggatgagaactagaggtggcatcatttatagcatacaaacagaggcagaagtcagaatgctttatgcagctgccagatgtagctggagcagagaattcttgtcagaataggtaatgctcaggctgtgaagcctgtgtataaaatgttttgtccacgtggtaagggaacttataaaagtggtgttcttaatattttaatcaaaagtttcaagtcagtgtttattctgtaggatctccctgaattttttgaagataatatggaaacttggatgaataattttcatactctcttaacattggataataagcttttacaaactgatgtaagtatttaaaatgttgcctgagtggtctttttctttcattaagagttatttggctacagtctggaaacctatttactcttgcattgttaaaagataaaatttcaatactgtaataatatttgattctatttgatgttacatgtttggtgtgtgtagtatacagaattactcttatcatgggcttggcttaagccatagtgtacatataaggctgtttcattacattattgaaagtaggtctttaaagtagtgacattatggatatttcatgaaataaaattatttttcattgaagatactaagaaaacttaaaactctataatggtagcccctttttaaaaatcatctggctaggcatggtggttcacacctgtaatcccagcactttgggcggccaaggtggggaggatcccttgagcccaggagttcaagaccagccttggcaatgtaaggagacccccatcactacaaaaaataaaaataaaattagccagatgtgttggctcatgctaatggtcacagctactcagaaggcttagttgtgaggatcccttgaccttgagcccaggagggcaaggctgcaatgagctgtgaccatgccactgcactccagcctgggagacagagggagacctcgtctcagaaaaagaaaaaattatccacagctcgagaaagagagaaaatggtaaaagattgtaatttgtaaatatttctgatatgggttttatattgtgtacttttaaacatataacacttattctgtgctactcatttgttaatatatttatgaccttctttccgaagagacaaaagacaaaatattaaaaatatttcaataccaaataaactaaaaattagaattggtgattcaaatcaggttttaagagtggggtacagaaagaaattgttactatcgttgtacaacagattttgtctcagagtttgactatattaataggaactttaaaagatgtagctctcataaaataattatttcagtccaatgggagggaaaaacactccttcagaaaacaaaacttttcttcacacaaaagtcacaaggaaattttttggatagaattcttacaaggacctttttgcccagttaaccatgtgctaccttgtgctactatttatgccttaagtaatcagtgtgagggagttttggttttggctttggtttttgttcttactctgatgtcttcccttgtctcactctgtcaccaaggctggagtgcagtggcatgatcatgacttactgcagcttcgacctccctgggctcaagtgatcctcccacctcagcctcccaagtagcagggactatgggtatgcaccaccatgcccagctgattttttttattttgggggcttgctgtgttgcccaggctagactcaaaactcctgggcttggcccgtcgcagtggcccacgcctataatcccagcactttgggaggccgaggccatcctggctaacacggtgaaaccccgtctctactaaaaaaaaaaaatacaaaaattagccgggcgtgatggcgggtgcctgtagtcccagctacttgggaggctgaggcaggagaatgacgtgaacccaggaggcggagcttgcagtgagctgagatcgcgccactgcactccagcctgggcaacagagggagactgcgtctcaaaaaaaaaaaaaaaaaaccactcctggcctcaggccatcctccagcctcagcctcccagagggttgggattaccggcgtgagccactacactcagccagaatatactgtttgaatctaatacggaaatattttgtaattcagcaacttatttgaaagacttggtgaaaagattggtggtggcatagctgtagtttacaataactgatttgatttggatttaattgataaagagtctagttcaggaatttcagttactcctcttacttatgttagcattagagttgtatgttggagtttttgttttcttttatgtgaggatgaagaggaagccggcttattggagctcttaaaatcccagatttgtgataatgccgcactctatgcacaaaagtacgatgaagaattccagcgatacctgcctcgttttgttacagccatctggaatttactagttacaacgggtcaagaggttaaatatgatttggtaagatgatggtggagacaaataattaaaagacattctctccctatctcctccaagaaataagctgttgagttttgcttttaaaaatattcttgtttttgtgttttgttccagttggtaagtaatgcaattcaatttctggcttcagtttgtgagagacctcattataagaatctatttgaggaccagaacacgctgacaagtatctgtgaaaaggttattgtgcctaacatggaatttagaggtaattatggcaaaagtatattagtataaatctactaagtctgtgtttgttttttgtaacatattcagtctaattcatttattactggataaaacttgtatgtcatttatttcttattttctaaaccaagacagaaaatgtagtatctgtaatgagttttgttgtgccctgtgagggttttctcatggaaatattaaataagacttcaaaaattcctttacactaagaagataaactatctggaatttctatttagagaaagaatttgattttgtttcatttattatttcaatgaatttttagctggctttatttatttatatatttatttgagacaggggtctcgctctgtcacccaggctggagtgcagtgatgcaatcttggctcactgcaaccttagcctcccaggctcaagtgatcctcctacctcagtcttctgagtagctgggaccacaggcacacatcaccatgcctggctaatttcttgtatttttggtagagacagggtttcaccatgttgttcagggtagtctcaaactcttgagctcaagcagtccacccgctttagcctcccaaagtgctgggattgcatttctgagccacctcgcccagaaatagctgtttttaaacaatcgacttgagaatagaaatgataactttataaatacaaggttgaagcccacttagtttgtgcttaaggttaaactatagtgctaagagcctatatttataaaatgtatgtccttgttctaacagttgtgaagaacaagtaatgaaggtgggagggattgtgttttttgttttggggacagggtctcactgtgtcacccaggctggagtgcagtagcacagttatggcttactgcaacctcaacttcccaggc

SEQ ID NO: 967 - DNA, 6000 bp, Homo sapiens
tgacctcaggtgatctgttcacctcggcctcccaaagtgctgggactacaggtgtgagccactgcacccaactgccttcctttccttttatttatttatttaaaaaaaatttttttttatttttttgagacggatctcactctgtcacccaggctggaatgcagtggcctgatctcagatcactgtaacctctgccttccgggttcaagtgattctcctgcctcggcctccctagtagctgggattacaggcatctgccaccacgcctggctgattttttgtatttttagtagtgatggggtttccccatgttggccaagctggtctcaaactcctgacctcaggtgatccaccagccttggcctcccaaagtgctgggattacagctgtgagccactgcacctggcctctaccctttcttatgcttgttgttggagaaaacactcatttatcttagagactttctcacattttacttttggctgattgcaccttgaatctctcagtattcaaggggtattggttccaggacgcctgaatatcccaaaattgatgaatacttaggtcccacatttgggcctgcggaatcctcatatatgaaaagccagccttccacatacagattttacatcccaggaatactgtgttttctatttgcatttggtctaaaacaaatccagccaggcatggtggcttgtgcctgtaatcccaacactttgagaggctgaggcaggcagatcatttgaggtcaggagttcaagaccaccttggccaacatgacgaaaccccatctctactaaaaatactagctgggtgtggtggcacatgcctataatcccatctactcgggaggctgagacatgagaatcacttgaacccaggaggcgaaggttgcagtgagccaagatcatgccattgcactccagcctggacaacagagcaagactcaaacccgtgttgttcaagggtctcctgaagtttatgttgtccctctagtccccatatttctatattggtaaatctgggggcttgattagacttagattccttggtcgggggtgacacaagaaagcatcataggtatactttctgtttcattttatcaggatatacacaatatctggttgttttgtttttttttattttttttgtttttttttttttgctcactgcaagctcagcctcctgggttcacgccattctcctgcctcagcgtcccaagtagctgggactacaggcgtcaggcaccatgcctggccctggttatcaatttttaatgatgttaagacagatcagtggattcagatgaaggagaacgttacattgtcaacattttttaaatagcattttaaaaattgagatatactttattcttttttttggagacggagtttcgctctcgttgcccaggcaatggaacgatctcggctcaccgcaacatgcgtctcccgagttcaagcgattttcttgcctcagcctcctgagtagctgggattacaagcatccaccaccacgcctggctaattttgtatttttagtagagacggggtttctccatgttggtcaggctggtctcgaaccccctacctcaggcgatccgcctgcctcggcctcccaaaatgctaggattacaggcatgagccaccgcgcccggccttattcatttatttttgagacaaagtcttacagtctgttggccagtctagagtgaactactacaatcatagctcaatgcagccttaaacttgtaggctcaagtgacccttttgcctaagcctccctgagtagccaagactataggtgtgtgccacaccacctggctaattttttatactttttacttagtttattgtttctttctttctccttcttttttttttttgagaggtagttttgctctgttgcccaggctggagtacagtggtgtgatctcggctcactgcagcctccacctcccaggttcaagtgattctcttgcctcagcctcctgagtagctgggattacacgtgcctgccaccatacccagctaatttttgtcttgttagaagagacagggtttcaccatgttggccagactggtctcaaactcctgacctcaggtgatccacccctgcctcggtctccgaaagtgctgggattataggcgtgagctaccacgcccggcccatttctttattttttgaaacagggtctcgttctgtcgcccaggctggagtgcagtgacatgaccacagctcactgcagccttgaactcctgggctcaagcagtcctcccactttcagcctcccgagtagctggaacccaggcacgtgccaccacacccagccatattgcattacttttaaaaaatcaattgagaaaaattatagagaatacctgcttccccagttagagtatgttggaattttgccaatcttaaatggtatctcattgcagttttaatttacgtttgttttattttgagttcagttaagcatctttccacttgaagggtccattttcatttcttttcggtgaactgtgaattcatcttcttttgcccatttttctatctgattattggtcttaatttttagagaacgtgtagtttttcttctgattctgaatgcctaggtcactttaattgtactgagaaaaaaatcaaaacttgcactcatcttatttctttgatgtctttgcccagtaacaatggtgccatcttgcaaaatattttaaacacacaagcaggaataaaacaatatgatgattactgaaataatcctcacaaatcttaaaactccaggccatatttatgtatacatacatatacaatggaggtattccaggtgctccctgcccagtcagtccctttctctctataggtaattactgtagtgaattcggtgtatttgacacccatggaagtgcttttcttacgctttcactacgcatttatgtttctgcaaaaattatttagtattatgtaggttttaattttttttttttagatggagtcttgctctgttgcccaggttcaagccatgctttttttatactttcactatgtgtttatgtttctgcagaaattatttagtatgctgtaggttttaatttttttttagatggagtcttgctctgttacccaggttcaagccattctcctgcctcagcctcccaagtagctgggactgcaggtgcccaccaccacgcccagcaattttttggtagagacagggttttgccatcttggccaggctggtcttgaactcctgacctcaggtgatccacccgccttggcctcccaaagtgctgggattacagtcgtgattcaccacgcctggcctaggttttaaatttttgtttgtataaatgacatcatactatgggtttcatttttctgttttttgttacttgtttgttttgagacggagtcttcgctctgtcgctcagtgcagtaacacaatcaagtcatgcagtggcacgatcttggctcactgcaagcttcacctcctgggttcatgccattctcctgcctcagcctcgcgatagctgggactacaggctaccgccaccatgcccggctaattttttttgtattttttagtagagacggggtttcactgtgttagccaggatggtctcgatctcctgacgttgtgatccgcccgccttggcctcccaaagtgctgggattacaggcatgagccaccgtgcctggccttttctgttttattttgagaatgaggtcttgctctgttgcccaggctggagtgcagtggtgcgatcatagcttacttcagccaggaaattctggactcaagcgatcctcctgccttagcctccctagttgatgggattacgggcatgctccaccgtacccacctacatcatgactgtttgtccttaacatctttttttttttcttttttcttttttttttctgagatggagtcttgctctgttgcccacgctggagtgcagtggtgcagtctcagctcactgcaacctccgcctcctgggttgaagccattcttctgcctcagcctcccgagtagctgggactacaggcgcatgccaccacgtctggctaattttttgtatttttagtagaggtttcaccatgttagccaggatggtcttgatctcatgacctcgtgatctacccacctcggcctcccaaagtgctgggattacaggcgtgagccgccactgcgcccggcctaacatcatttttgagttattcatttagtgcctaaagcgatccagctacctcagcctctcaagttgctgggactacaggaattcactaccatgcccagctaattttttatttaattttttcttaatagagatgaggtctcactatgttgcccaggctggtcttgagctcctgggcttaagcaattgttctaccttggcttcctgaagtattgggattatagacaggaatgaaccaccacacccaggaggcttttctagtttagactaatgaatgtttcaaatttagaggtttttaatgaagattgttctcgtatttgttgctttttgggggtgggaagagaacaaaaaatgagacacaaaaaggttaaataactttttcaagaaatatctgctagtgatgattcttaagtttggtgaaatcttagtctccttctctgtgatattattattttatggtatgttgatttatctgcaagatgttatcctcatagttttgtgctctgaaaaggagaatttagaaagtggaaattgaaccattatgtgcaagtgaaagttttggtttctgggcagcagcatctcctattataacagagcttaaaaatagcaaattgttctttaaatcaacaggtccttctcttccaattgtcttttactcaaatatggaatcattgcatttagagcatgtatattattgtgttttttaggtgccaaaagaacatcttttagtctcgattcctctcttgattaatcatcttcaagctgaaagtattgttgttcatacttacgcagctcatgctcttgaacggctctttactatgcgagggcctaacaatgccactctgtgagtattttattctaaagttttttagcctggggtaggggctgtactgtgctggtcaaagatatctgaatgttttcataatttcactagtgggaaaacaaatgtctgctttctattcctttatactctgtttcattctaaaagcatttgaggctgcttactaaaataggtgcattatgacaatacaatttaataaactggagccaaggaaagtaactgagataaagttaataaacagaaatgtgtgtcaaaggatcctatatagtagtccaagaaactccaaattttatttggagtctcttagcagccagggcaaagagggaaacttgggaagttaaaattttcacagggtctatgagataaaagttaaagcagagaatactgtacaatagtagtagtagtgttctcagcaacaatcatgtaacagttattttcatgtggctatttgcgtaaggtcacttatttctgagatatgacctaaccgaatgaaagtaattcactggggaccaagaaaataggtcttctggcctgaaccaggatgaaatgtagaggaatggatggtctgcatgtctttcaggccactattcaacagtattatttcttgaaatgagctttgggtaagagatggaaaacagttctaggttctttccttcatcaagaacttgaagtacagatactctcagtggccaattaagggtagaaaggacatcctttgaggtgagtcaagccagtacctatcttcaggcccagaatttatgcagaaaacagttctgaatcttggctccacctccaaaaacaaaataaatgacagagtcccctgagattctgagttctttctcagtggtaatagatataaaccagggacaactgtttcaacttcagatgttgttgggtttagctggctttttggttcagttgtgtttggttctcgatgtgccttcttaggagcctaacatg

SEQ ID NO: 968 - DNA, 6000 bp, Homo sapiens
ccctatacttaactaaaatattgatttattccaaagttgtttttatttacttttcactgacctcaaagagaaaacttagacaccttagagaaacatgaaacattctcagaggaaggagtgatgagcatggttctgtattaatgtgttcactccttagcagaagatatagaaatactgcagcttaggccaggcactgtggctcatgccttcggaatcccagcactttgggaggcagaggcgagtggatccctggagttcgagaccagcctgggcaacatagtgaaaccccatctctacaaaaaatacaaaaactagccagttgtggtggcatgcacctgtagtcccagctactcgggagggtgaggcaggagggttgcttgagcctgggaggcagaggttgcagacagccaagatcacactactgcactccagcctggcaacagggtgagaccttgtctcaaggaaaacaacaacacaaactgcagctcattctttctaaaggtatctggaaaatgacagaactgagaataacatccagattcagttccctgccatgagaagttccttttgccttgtttgtggatattgttgtcagttcattgcagctgtcttgagtaacttacagaggctaatgtgaccaaagaaagatccatcatcccttgttgtttttctagttaaaagtcatagcacaggtttctggtaacatacaaatgataagacactgtccataattctaattacaacaattcagtttgtatagtaatttggtacagcattaaagggggtgatgccctcctcccatctcatttccctccctttttcctatttcacatttattcttttgtctaaaagacagaaaattggtatgattctcatatgccgcatagaacgtgtagctccatcacatcccacagctttctagaggtctttggggttggaacacaaagtttaacttctgtttctgtttttccttgaattcttttgtttcctggcccttttccatcttgccggttccccttatgttacccactatcgtccatgctctccctctgtgttggttgtctcaaaacagcattcagcggaattcattgagtgggtgaattctgtgaagttgccttttctggcagtgctgttactcagtgatgcacaaacgtagcatttgccctttggtagacaaagatctgtgttttttttttttttgtttgtttgtttctttgagacggagtctcgctgtcacccaggctggagtgcagcgggttcaagcgattctcctaccttagcctcccgagtagctgggattacaggcgcctgccaccacgcccggctaatttttgtatttttagtagagatggggtttcaccatgttggtcaggctggtcttgaactcctaacctcaggacctcaggcgatccacccacctcggcctacctaagtgctgggaacaggcttgaaccaccgcgcctggcagatctggttagtattcttcaaaggagccaaaggcagtgctttcgtgtttgctttgaggggaagtagtggacgatttgattgtgacaccttttagcattggtgagttgatttatctaaaattaactgttaaagttagctggccttatacaacgtaaaagtaaagaaaattcatcagtttctcaaaaaaaaaaaacaaaacagtggctgaagtttttgttagcaataagaaaacagtaggcatatatatatatatatacactttttcttttttctgggaatccacgttctcctcctgggtaaaggagagggttgtattttgtgattcctttttcctgccccaagtggctggcgatacagcccccggcgcgccgggcactgaggccctggagcacagcgtggggggcctggcacagacacgactcacgaccgggccgatctccggccagaaagaactatgttccggccgcccgggtcgcgggcccgcggtgcatccctgcaggcctccatcctgcctcggcagaggtctgcaagaatcctgtgggtgtcccccggagcgggcagaggaggagcccagcgccgaggcccaggcgcgccccgccctcgcccctccccgtgcccctcccccgctgctcccctcccaaaggccgagacctggacgctgcccggtggcctcggcgggggccctgtccttggccgctgcctctctgaatcccaggtgagaagaataaaacgtcctgacgctgtccggcttccggttcttggagaggacgggccgtctctgccgagagaactgtgcggaatcaggaagcgctggtgctccttcgctttcacgggactaagcgaaatccggctttaaacgaagtaaagccggctgcctcctggagtatttttgtcatagtatttttattttgggtcagggtattctgctgcggaccctgagtcttaggaaggaggcttataacagcggaaagccatttttttttaagaattgctgagttttccggattgtactttcaaagactttccctgaaactttgcgtggcatgggggttgcagaaactggtgtctacacattacaaaagtgtactgtttacacctatttgtgatgcacccatcgtgtttttctccatggaccacctattaagcttcctgctggagcgctcttggcccccttcctgctttctgggccacatcctgttgtaaatcggtgctacttgtggggttttgtttgtgaattggggatatttaaggaacaatttattgaaacaactgaagagtttgtttcctcctttgggttttacttttaaaataaattcggttaggaaaaagtattcttttgctagtggagttcaaattcaaatacccagactgtagattctccaaatgcctttctcaccagggagggcagctcccaggaatagtgacggcaggtaagctgggataaagctgacttcgtcaccttgtaggtggggaaggccagagtggatagtctggccaggcctccacagccgagccagcttctgctggggggcgggggagatgagaacgagaggcaggttccagtatcctctggacttgcaggaaggaaggcattctgcgtatcgctgagcactgcggtgagctgagtgagggttccctttcctcatgttttcctgcctttttcttcctcttggttctcttgtccctgagccgccttgtccactctttctattcccttagtgcctttccatctatctctcctgagtgcccagcgtgaaactgtacccaagagttaaaatctcttaaaaatctcaccgtcttgcagaaacaaattgtggctggtttaaagatcctcagctaaagagactgggctgaggttcccccataccagttggatttagagagagcctcttgtagggaggcctcatgtggtcttcacctgggcctcagcatgtgagccctcctttaacagagagcttgcccaagatctcactgcttgttaaaggtggtctcaaccccgtctgtcttctaagcttcccactaccccatgtctgagagcaaaaagccctctttgcaacctgagatcacactcaagatggaagactgtcaagcccatccctgccagattctattaatgtggtcctaatgggccacaccagcaaaaacaagctgcgttgtattcctttgaagaaaactaagtctgcctcagaaactagcagaccctgtaatcttcagcggtattattaaaaagcacacctgcctcaaagcccctggttcatccatggaagcatcgcagaagcctctgtattaggggcagctttacggcactctgggccccttttactcttggccagggccaacgccaaaggctagatggtccatgcttccaggtagcgtatcactgttcacagaagcagaaacaagtaatggggccacctccaccccccccaggtccctgccctcggagcaagtggccagtgcccatggtgcctcgaggcaacagctgcccctcctgccccctcccagtctctttcctgcagtatctggggacagacaggtgatagagtgtcactctagttactattgagcgaactgaagaaaatccacatggaaggttgacatctaccatacctcactttcccctctcttgatagtaagtgtctaatctttccctccaacccctgtgggcaaacatgtccatgcgttctttgagttctagctactggtcagtagttctgagtgtaggattgacatggtgggaggaggcagagctttgggaccacaccgccaaggtccctggggcctagaggtccagcgtgcccgcctcccttcctcgctgtgctcctttctctcccccccacccccacgctcctggtttctggagccgagcttggggtggggaggcagcaggtagggtcttcaagttggagagaaaccccgcccacacctggacctcgcccctcgctgccattcccagccgaggccgtcaggggcctgcgttttgagaaacacaatctggaagagaaaacctgggccttttcttcttttatcccctgtccccgcccccctacacctcttacaaatttagcccaggagctttctatccccaccgacttgaagggtttatcggtcttaagagcgaaatcctggcggagtgcagtccctcggggctagcatccacgttccgcctgcgccctgcccgggctgttccgagggatccccgcaagggcactgccccagctttcactcttggagtcggggaaataaggtgtccacaaaggatgcaagcaagtcattgtcagtgcagacccgaagggcgcgtccggagtgcaggtatgaaagacgggcgcatgcgcgcagtccggggccgggcttcgcagcccgggctccgctctagccccgcagcgtctcggtggccggtctcgtcctccgcccgccgcgcgggggcgccgctctagccccgcgccatctcggtggccgtccgcccactccgcggcgttcggggaaatggctgcgagaccctagaggcctgcggcctgcggtaagtggcgtcccgggcgccgggtagaagagccggccgccgcttgggccgccctcgggagcggggcggggccggcatcggagcccggctggcgagagccgcggatcccgcacaggccgctcccgccgagaagatggcggccgcggaagggaaggagcgggcgggcgggcgggcgagcgggcggggccggtcagagccgccgcggcctggggcgcgggcctcagacgccggccctggtgggctgcgtgaggtcgaggggactggcgagcactcggtggtcgcggctggaacggttccgagggtgggagtcggggcggccgctcgcggggaagagcgcagggctggcctgggcgagtgcggcccggggctcgggggctgcgtagctggcttgtaagcgcagctggtttccctaggcattctcggggacctcggcgcttcctcccgggccttgggtgcggtcggggtggccggcttagcttctggcgtgccttcgggggattccggcactgcaggggcggctggcgctgcaggaagcgcgaagagcccggattcgcttttctgaagagtgtgtccttacctccccgcgctggttttcagtttttttgtggaatagtttgttgcgttggtttgtactggccgtatttgtgacacattttgccttccagtgaccccggaagccgaaagggcccgctcttgcgctcggcgggaggggtgctcgtgctgcctccgctgcggcgtccggggctccttctcgcggttctgagacagtggaggtcaaggccggcttttctgctctaaataaaggactttaatatataagtttagagtttgggccacaggtagcagtagcttactgcgttaccagttattgaaaatactctttaacttgtgcctgggccttcgatatccgtgtcatctgtctgctgatggaatgagatttgagcctagtgtactcagggacttagaggagggaaaggcagatgggaacgtcttttcggtatattcacataact

SEQ ID NO: 969 - DNA, 6000 bp, Homo sapiens
gtctgcaatggcaggactgtatcaccttccctcctaccacatttgtttcaggtaacagtatgctagatacggtttgtctcaacctcagcaggagttaaaggttttaaaaaaataaaaataaaaatcaagaaaagattattcttgctctcacccaaacaaacttacaaaatattcagtgctttctgatttagtggtataatctagaaagggaaataaaatcaggcaaaaagagggagggggaaggtcacctatatcaaacaatcaccagtgaagattctttacagggtctgggttcaccagacacatggtgtcagaatatgtgcagcaggccaggcgccatggctcatgcctgtattcccagcattttgggaggcccaggcaggtggatcacctgaggtctggagttcgagaccagcctgaccaacatgaagaaaccccatctctactaacaatacaaaattagccgggcgtggtggcgcatgtctgtaatcccagttactcaggaggctgaggcaggagaatcgcttaaaccggtaggcggaggttgcagtgagccaagatcgtgccattgcactccagcctgggcaacaagagtgaaattctgtctcaaacaaaaaaacaacaacaaaagaatatgtgcagcagactaaatagtaaaattcttccttacctctttccaacatctctaattgtttaaaatactgtgaaaagtgaagttcatgaaaattgaggtctgagtgtttcctacctacttctgctaaccattctaagcatcaacaactgatgggtttatcaattatcctgaaaagtaaggtggtttgatttgcccaatctctttgaaagcctgaagtctccagtatgtaggggtttgattttatgcttttgggttttgagagtaaaacaaaacatccatgggaataatgtggttttgaaacatggctgatatcctggtttttaaacattctatgatttgagtaaaggaagcactctatgcagtggttcacacctgtaatcccagcactctgggaggctgaggcaggaagactgcttgcacgcagaagtttgagaacagcctgggcaacatagtgagacctctcctctacaaaaaataaacaaaattagctgggtgtggtggcttccgcctgtagtcccagctactcaagaggctaacatgggaggattagctgggaggtgtaggttgcagtgagccattatcacaccattgcactccagcctgggcaaactgctctcccctttttaaaaactcattaatgttcttttaagattaatatacctttagcactcctctttctgttcatctctttcaatatgaaacaactcaagttcaaagccaccacctcagcttgcaagacactggaagctctgaacacctggttgcccctcagctgactgtaagggccaagcctttggtttctctcatccacatgcccacctctgtcataggaaagctcaggcagttgatgaatccagcaggctgaagtccttgtcactgtcccagatgccaacccgtgtggccctgcaccctctcctgtcccgggacccacctacctctttcctgctctcctgcactcttggtgagcctccatgctggtggcttcagggctctggcccaggctctcctcctctccctccacccatcccttctccacagagacttcatgcacacctggctgtagttgcctttatctctgcctggatctgggcaccatcattcacctgctcccctggcatctccacgtgaatgcctcaaatgcacttcaaaacctacctaacacatgcaaaatgagcttaggacttctgacctccctactacatacttccaggctcttctctggcgttccctatccagaggatggtcccaccaccctataaattcataggccagaagctgagaaattatccttgacccccctccctgctcctcagtctcacctgctgctgcagcgttttgtggcatctagctcactgctcacttctcagtacataagtgcatggccctaatggcttctgaacaccttcaacatactacgctgtcttcacctcacccctgctcaccacactccaatgtttcccattcccatcacatctctcaacttcttgctctctcaccaaaaaccatcaaatggggagttttggcaccttcaccctggacttccctgccgcctggaaactgctaacatagcttctcgaaactggacaccctgtggcttcagggagcgcctttgaagcccctggttcttgtcagaccccccggccactttcttgctacccttcataggcagcttcttccttagtgaatacagcttgcagctctgcattctggacttgatccactccttgtctccatgggcttcctctgaatactgtacccatcaactctcaactctagccctgctcttccccttgagctttagatgtgtcccacaggcacctccaattgaatgaggcccacggtgaactcaccacctttccctcgttgttgcacctccttcttcttcatgatcattctcagttggtgccaccacctcatcagctgggctactcacccgcatcactctggtcttccttcttagctcccacaaattgtcagtcaccaaggactgctcatttccatcctgactgaaggtctctttccatttttgctagtattgcttccagttaagatcctcataatcattcactcatttattccttcgtcactcaacaaataaatatttatggagctcctattacgatttagccataatcaactcacatgaagcttaccattttatgctgaatcatgacatcccatcagacagcaaccacacggaccgtgtgctaagagctacgaagagctaagttaggattctgtgcaagcataaaggaaaggcactcaatccagctttgttagggaagacttccccgagaaagccacgtctctactgaggaggtgagcaggagttagcctagggaaggctgttagctagggcccagactgagagcacagcgataacaaagcttgttgacatgagaaaacctccaatcagctgggatggctggagcagagagtaagatcaggagtgcagacttatagctgcgctaactttacacaggcaactggggagtccccaagggatgttagaaggatagagtcaatgagtgatggcttttggagagatcaccctgtctgctatgtgagaggtagtgacaggacttctggagctcaacaggagttacggagacatcctggcaatccaaaaagcaaagatgatggcttccacgttatggtggaagaggctgggaaacaacacaaaggagccagtttctagagaggattaaggagggggctcgagcaggacttggtaaccggttggctgttgggaggaggagcattaacctgtgacccacaggcaggcactgagacagcctctttggactggaatgttaaggaatgtcgccttaaggcgctagcactcaagctttctgctcgtgcatccccttgcacactttctccttgacgttcaggctgggcatggtggctgacgcctgtaaacccagcactcccagaggccgaggcgggaggatggcttgagcccaggagatcgagaccagcctgggcaagaaggcaagaccccgtctctaaaaaactttaaaaaataaaaataggccggatgcggtggctcatgactgtaatccgagcaccttgggaggccgaggtgggtgatcatttgaggtcaggagttcgagaccagcctagccaacatggtgaaaccccacccgtactaaaaatacaaaataagtagccgggcgtggtggcgggtgcctgtagttccagctactcgggaggctgaggcaggagaatcacttgaacccaggaggcggaggttgcagtgagtcgagatcatgacagtgcactccagcctgggcaacaaagtgagactccttctcaaaaaatagaataaaataaaatcaaaataggccgggagcggtggctcacgcctgtaatcccagcactttgggagtccgaggcgggcggatcacgaggtcaagacactgagaccagcctgaccaacaaggggaaaccccgtctctactaaaaatacaaaaattagctgggcgtggtggtgcgcccctgtggtcccagctactcgggaggctgaggcaggagaatcgcttgaacccgggaggcggaggttgcagtgagccgagatggcgccactgcgctccagcctgggcgagagtgagacttcgtctcaaaataaataactaaataaagaccaataactgtttcccatagggttatgtagttgcaaatgaaaaaattactggcatgtactgcctctgcatatgaagcataattttgtcaagaccttatacctgcagatttagctctttcgattaacggaaaatgtccaaaatcagtctcctccaacctatttgccgaactggacttactgtcgctgagtagaccgaccgacatagcttacacgttgttcagctcgcttgtaagcaaacacacgaaaccacctcacccctgacttcagaaagaagccgtcccgtgaattcctcacagatgaaatcaggagctgcccctcaaggactctatttcttccttcggctctatcaaatattttaaggtacttcccagcaacggaaacatgggaccctgcaatgacagacttcgcattcctcctgagcggacaggcaataagcaagtaaacgcgcaaatacccaagtgcggcctcaacccgcgctcctgccgggagggtctccagtcaccgagtaaccccggccctgccccgcgccgccgccgggactccgccccgcaagcaagtggggtctcctttgtcccgcgcgccctggccgcgtcccgcccttcggcgtagcccatgggaggcgccctgagggcagggcccttctgattccccacctggcctcgagtgaggacgcgctcaacaacatctcgagtaaagcgggggaactcgcttcaacgcgcagacagcacagctctcgcccagcccggtctcgggtcagccgtctctccctggacctcagggacactagccctggaaggccgccggtcgggaggggactccctccccgtctgaggggcggccgcggacacccggcgcctttcccccgccccaccccgtgcggcctcacgcaaacgacaggaaaaaagctgggaccttcgcctccgactcagtgtagacgtcgccatcccggttccagatttccgcgctccaacgcctccgcagcagccatcttgccagagggccgacgccttttgactctggcgccaacccgtagtgcgtggtcgccgcgaggggagttctgcgcaagtacggaagctgaggttccgcgcttccgggaggccgtccgccccgccccctcgcgggggcgcttcattggtcatcggctcgcgctctcgcgctctcttgctgtcgcgagaggtgctgaggggcggcctccggtgcgcctgccctcccgctccccgcccccgcccccgcccccgcctccgccgcggcccccacctctgcctccttctactcgggcgccccggcggccgccacctctccccagcccaggagaggctgcggagccgcagccgcccagaccgcgcagcgcgggaggcaggttccgcacggtaagatggcggcggcgggcccgggcggccgggccgagcgtctcccggggccgggccgggcgggcaggcgggatgtggccggggtgcgcgccgcccccgctctgggggccttggaagcgccggcgctggcaggtgcggaattggggcgcgcagtgagtccaggcccggacggccgccccgcgccggtgcccagggggcagtcagggctcagcctccaggcgcgcggcctcaggcgctggtgttctggggcggtcccggccagcctgaggggcggcggtagctgtctctgtggaggagcgacgtccgtaacgaagtctttttaataaaatctgctgctttaaagcagaaac

SEQ ID NO: 970 - DNA, 6000 bp, Homo sapiens
ccacactttctcaggaactcggtattaatatctttataatttacaagttatgctctcaaaatacatatagaaaatgagaagagtatacttcattccttgttatcccatccaaaaactctaacccattagccaaagaggtcagaatggctgctggcccagtgtgttggtgtgggctcctttgagaggacagataataggtccagacgccagcagccgcagctctggtgccaggttaggcaagtcacactggctcagcctccacagcacaggggccctccatggtcagctatacctgcagtggcctgttgactcccacctcttaagagtgtctacaatttttcaaagccagcatgtgtgccccttcccctgcccctgacataattataggcctaaatttcctcttcaccttccaaaaatattttttttgagatggggtcccactcactctcccaggctggagtgcagtggcacaatcttggctcactgcaacctccgccttccgggcttaagtgatcctcccacctcagcctcccaagtagctgggactacaggcacaagccaccacatccagctaattaacattttttttttgtagagacaaggtctcactatgttgcccaggctggtctggaattcctaggcgcgaacaatcttcctctgtctctcaaagtgctgggactataagcatgagccaccatgcttggcccaaaaaagtttcacagagattaatttgggagaaggaactggggactaacaggagggagatttttcatgtcatgtcttttaaaaacatctattttcttgccatatacagcactgcccttcctccagttgacatcaagaacagcctgactgttatttccctctgcacgcttctgctcttccccattcccatcctctgagttgggcatactttccagaaacaggccagcatatttttgcagactggccagaagagatcaactatttaggctttcaatatacttacttcacaacagtctcaattattttgagtaactgtaaaactgtcaaaggctgaaaaatgggtttgtgttaggtctcagagacctggaaaaatctcatcttcagaaaaggctttcacatgataacttccaaacttaccaggttagcattgtgttttcataatgtctgaacacaaataactacgtcatcaaacctcagtgctacagcactccttatgtgttcaaaaagggagaatcacattcatgcaacagcatcctcactgtaagccattacctgtgaccaggtagttcatgatgaggcggttcatgtctgctctctggacatgcaagttattgagcttttccatccactcatctttcgtgatttcatcgggtttttctgcataactcattctgatttatttctacaggaaaaaaataacagctgagggaggggtttagatgctcctccaagggcagagggcagcgctggaagagctgtgagccggagaatcccacactgagcatgtacggaaagacaacgctgccgtgggacacccaccagactgagaatgccaatgcttagcaaagaataagttcacttcaactttttctactctggtatcaggagaacggactgtgctacaaaaacaatctggtactccttacaaagctgaacatgtgtgctcctcacaacccagcaattctacttttaatacatttatattctagaaaaactcaccaggatgcaccaaacacagacaacgctgttcacagaagcaccgttcaaagcggcaggaatgtggaagccacccacctgagcgttcattcaacagcagcgtggaccaagggactgtggcgcacagaactgcatgtttaaaacccttgggcagatgggttttggaattcagaattcttcaatgtacaacgattatttggcacaatttaccatgtaacagcctcactggggtttgggggcactccccatcatcagacgttatttcttcactgaaatgtgttaggtatctatactaagtggtagaggctattaaactttacctggtgaggttttggccaccaaataggttaaaaacaaaaccaaaaactgtggtttcagagatgtttagatttttagcattgctgagaagggactgtggtcatgtattcacacaagagaatttcataaagcagttaaaataaatgaacatgacacaaagtcacctggatgactctcataaaacaatgctgaatgaaaaaagagagttgcggccgggcgcggtggctcacgcctgtaatcccagcactttgggaggccgaggcgggcggatcacaaggtcaggagatccagaccatcctggctaacacggtgaaaccccgtctctactaaaaatacaaaaaattagccgtgctcggtggcgggcgcctgtagtcccagctactccagaggctgaggcaggagaatggcgtgaacccgggaggcggagattgcagtgagccgagatcatgccactgcactccagcctgggcgacagaacaagactccgtctcaaaaaaaaaaaaaaaatttgccgggcatggtggcagatgcctgtaatcccagctactcgggaggctgaggtaggagaatggcgtgaacccgggaggtggagcttctagtgagccgagatggtgccactgcactccagcctgggcgacagagcgagactccgtctcaaaaaaaaaaaaaaagaaaaaaaagaaaagaaaaagagagttgcaggagaggccaaatctgccgtgagttttatcaggaacaacaagacaaaatacatgacatgtgctttagcaacaaatatgtacgtggcaaacctattttgtttgtttttttttaaataagggcatgaaagctgacactcaggagggggttacctgtgggaggggcaaatggctgaagccccagaggcagctgttccggctttgggagaatgggtggatacctgagacaggcaggggcacgccaccgtccactctgtctttctcttttgccactgatacatacgttacacatactactttatacgaagtactgctaaagtgtttcaataaattaaaaaactttggtctcttggctgaaaatgggatgaatgcagggtggtgagatctgagcagccagtcccttagggagacacccaagcgagagagaacatcggcagaagagatggagagcaaggtgagatcaagatgctttggccagagtcaatggctgctgctagacagattaccggacaaaagagagggaagaatagaagatggtcacaggtttcaagcatgagaggccctgcaagatggggccacaaataaggaggaaggactggaagaagaacaggtttgagaagcagggcaagtttgacgtgactattagacatgcgtctggagaaatcaagcaggtgtctgaattacagatcctgagctcagagctgaaaacatgaattagtgaaataaggggcggggggggcggtgctggggcacagggatatttaaagccaagaattcagcaaagaccataggaagagcgtagatagggaatgagaatcgccattacttggaggatgccaaccttgaaggtaaagcagagaaagtggcaccagcagaagaaaacttgatgtggagcggcaggtaaagtggaggagaaaccaggagtcgctgtcacacacgaacacccatctttcgttgtcaactgcaaaactcactgagaccaactttttattcacgacaattaatggtaacttaaggactcattttctttttcttttttttttgagacagagcctcgctctgtcgcccaggctggagggcagtggcgcgatcatggctcaccgcagcctcgacctcctgggctcaagcgatcctcccacctcagcctccagagtaactgggacaacaggagcgcaccactctgcctggctaatttttttatttttagcagagaagggagtctcgctgttgccacggctggtctcgaactcgcgggctcaagtgatccgcccacttcgacctccgccaccgcgcccggccctaggaccaacgttaagagctccctaggaaaaggcaccttttctctcggcccattcggtgatcggcactcacagcgcttccactccgggcagttacgtgcgcccatgaaaagcaacaactttgtagaactggccagtcctgttagcaggaagaactcggtagtctcaaactccagcataaaaagattcagcagaagaaaacacccgtgtgctgaagactcctactttccatgccacactttacatcctcacccgctcggtttctgctttaaagcagcagattttattaaaaagacttcgttacggacgtcgctcctccacagagacagctaccgccgcccctcaggctggccgggaccgccccagaacaccagcgcctgaggccgcgcgcctggaggctgagccctgactgccccctgggcaccggcgcggggcggccgtccgggcctggactcactgcgcgccccaattccgcacctgccagcgccggcgcttccaaggcccccagagcgggggcggcgcgcaccccggccacatcccgcctgcccgcccggcccggccccgggagacgctcggcccggccgcccgggcccgccgccgccatcttaccgtgcggaacctgcctcccgcgctgcgcggtctgggcggctgcggctccgcagcctctcctgggctggggagaggtggcggccgccggggcgcccgagtagaaggaggcagaggtgggggccgcggcggaggcgggggcgggggcgggggcggggagcgggagggcaggcgcaccggaggccgcccctcagcacctctcgcgacagcaagagagcgcgagagcgcgagccgatgaccaatgaagcgcccccgcgagggggcggggcggacggcctcccggaagcgcggaacctcagcttccgtacttgcgcagaactcccctcgcggcgaccacgcactacgggttggcgccagagtcaaaaggcgtcggccctctggcaagatggctgctgcggaggcgttggagcgcggaaatctggaaccgggatggcgacgtctacactgagtcggaggcgaaggtcccagcttttttcctgtcgtttgcgtgaggccgcacggggtggggcgggggaaaggcgccgggtgtccgcggccgcccctcagacggggagggagtcccctcccgaccggcggccttccagggctagtgtccctgaggtccagggagagacggctgacccgagaccgggctgggcgagagctgtgctgtctgcgcgttgaagcgagttcccccgctttactcgagatgttgttgagcgcgtcctcactcgaggccaggtggggaatcagaagggccctgccctcagggcgcctcccatgggctacgccgaagggcgggacgcggccagggcgcgcgggacaaaggagaccccacttgcttgcggggcggagtcccggcggcggcgcggggcagggccggggttactcggtgactggagaccctcccggcaggagcgcgggttgaggccgcacttgggtatttgcgcgtttacttgcttattgcctgtccgctcaggaggaatgcgaagtctgtcattgcagggtcccatgtttccgttgctgggaagtaccttaaaatatttgatagagccgaaggaagaaatagagtccttgaggggcagctcctgatttcatctgtgaggaattcacgggacggcttctttctgaagtcaggggtgaggtggtttcgtgtgtttgcttacaagcgagctgaacaacgtgtaagctatgtcggtcggtctactcagcgacagtaagtccagttcggcaaataggttggaggagactgattttggacattttccgttaatcgaaagagctaaatctgcaggtataaggtcttgacaaaattatgcttcatatgcagaggcagtacatgccagtaattttttcatttgcaactacataaccctatgggaaacagttattggtcttta

SEQ ID NO: 971 - DNA, 6000 bp, Homo sapiens
aagaatatgtgcagcagactaaatagtaaaattcttccttacctctttccaacatctctaattgtttaaaatactgtgaaaagtgaagttcatgaaaattgaggtctgagtgtttcctacctacttctgctaaccattctaagcatcaacaactgatgggtttatcaattatcctgaaaagtaaggtggtttgatttgcccaatctctttgaaagcctgaagtctccagtatgtaggggtttgattttatgcttttgggttttgagagtaaaacaaaacatccatgggaataatgtggttttgaaacatggctgatatcctggtttttaaacattctatgatttgagtaaaggaagcactctatgcagtggttcacacctgtaatcccagcactctgggaggctgaggcaggaagactgcttgcacgcagaagtttgagaacagcctgggcaacatagtgagacctctcctctacaaaaaataaacaaaattagctgggtgtggtggcttccgcctgtagtcccagctactcaagaggctaacatgggaggattagctgggaggtgtaggttgcagtgagccattatcacaccattgcactccagcctgggcaaactgctctcccctttttaaaaactcattaatgttcttttaagattaatatacctttagcactcctctttctgttcatctctttcaatatgaaacaactcaagttcaaagccaccacctcagcttgcaagacactggaagctctgaacacctggttgcccctcagctgactgtaagggccaagcctttggtttctctcatccacatgcccacctctgtcataggaaagctcaggcagttgatgaatccagcaggctgaagtccttgtcactgtcccagatgccaacccgtgtggccctgcaccctctcctgtcccgggacccacctacctctttcctgctctcctgcactcttggtgagcctccatgctggtggcttcagggctctggcccaggctctcctcctctccctccacccatcccttctccacagagacttcatgcacacctggctgtagttgcctttatctctgcctggatctgggcaccatcattcacctgctcccctggcatctccacgtgaatgcctcaaatgcacttcaaaacctacctaacacatgcaaaatgagcttaggacttctgacctccctactacatacttccaggctcttctctggcgttccctatccagaggatggtcccaccaccctataaattcataggccagaagctgagaaattatccttgacccccctccctgctcctcagtctcacctgctgctgcagcgttttgtggcatctagctcactgctcacttctcagtacataagtgcatggccctaatggcttctgaacaccttcaacatactacgctgtcttcacctcacccctgctcaccacactccaatgtttcccattcccatcacatctctcaacttcttgctctctcaccaaaaaccatcaaatggggagttttggcaccttcaccctggacttccctgccgcctggaaactgctaacatagcttctcgaaactggacaccctgtggcttcagggagcgcctttgaagcccctggttcttgtcagaccccccggccactttcttgctacccttcataggcagcttcttccttagtgaatacagcttgcagctctgcattctggacttgatccactccttgtctccatgggcttcctctgaatactgtacccatcaactctcaactctagccctgctcttccccttgagctttagatgtgtcccacaggcacctccaattgaatgaggcccacggtgaactcaccacctttccctcgttgttgcacctccttcttcttcatgatcattctcagttggtgccaccacctcatcagctgggctactcacccgcatcactctggtcttccttcttagctcccacaaattgtcagtcaccaaggactgctcatttccatcctgactgaaggtctctttccatttttgctagtattgcttccagttaagatcctcataatcattcactcatttattccttcgtcactcaacaaataaatatttatggagctcctattacgatttagccataatcaactcacatgaagcttaccattttatgctgaatcatgacatcccatcagacagcaaccacacggaccgtgtgctaagagctacgaagagctaagttaggattctgtgcaagcataaaggaaaggcactcaatccagctttgttagggaagacttccccgagaaagccacgtctctactgaggaggtgagcaggagttagcctagggaaggctgttagctagggcccagactgagagcacagcgataacaaagcttgttgacatgagaaaacctccaatcagctgggatggctggagcagagagtaagatcaggagtgcagacttatagctgcgctaactttacacaggcaactggggagtccccaagggatgttagaaggatagagtcaatgagtgatggcttttggagagatcaccctgtctgctatgtgagaggtagtgacaggacttctggagctcaacaggagttacggagacatcctggcaatccaaaaagcaaagatgatggcttccacgttatggtggaagaggctgggaaacaacacaaaggagccagtttctagagaggattaaggagggggctcgagcaggacttggtaaccggttggctgttgggaggaggagcattaacctgtgacccacaggcaggcactgagacagcctctttggactggaatgttaaggaatgtcgccttaaggcgctagcactcaagctttctgctcgtgcatccccttgcacactttctccttgacgttcaggctgggcatggtggctgacgcctgtaaacccagcactcccagaggccgaggcgggaggatggcttgagcccaggagatcgagaccagcctgggcaagaaggcaagaccccgtctctaaaaaactttaaaaaataaaaataggccggatgcggtggctcatgactgtaatccgagcaccttgggaggccgaggtgggtgatcatttgaggtcaggagttcgagaccagcctagccaacatggtgaaaccccacccgtactaaaaatacaaaataagtagccgggcgtggtggcgggtgcctgtagttccagctactcgggaggctgaggcaggagaatcacttgaacccaggaggcggaggttgcagtgagtcgagatcatgacagtgcactccagcctgggcaacaaagtgagactccttctcaaaaaatagaataaaataaaatcaaaataggccgggagcggtggctcacgcctgtaatcccagcactttgggagtccgaggcgggcggatcacgaggtcaagacactgagaccagcctgaccaacaaggggaaaccccgtctctactaaaaatacaaaaattagctgggcgtggtggtgcgcccctgtggtcccagctactcgggaggctgaggcaggagaatcgcttgaacccgggaggcggaggttgcagtgagccgagatggcgccactgcgctccagcctgggcgagagtgagacttcgtctcaaaataaataactaaataaagaccaataactgtttcccatagggttatgtagttgcaaatgaaaaaattactggcatgtactgcctctgcatatgaagcataattttgtcaagaccttatacctgcagatttagctctttcgattaacggaaaatgtccaaaatcagtctcctccaacctatttgccgaactggacttactgtcgctgagtagaccgaccgacatagcttacacgttgttcagctcgcttgtaagcaaacacacgaaaccacctcacccctgacttcagaaagaagccgtcccgtgaattcctcacagatgaaatcaggagctgcccctcaaggactctatttcttccttcggctctatcaaatattttaaggtacttcccagcaacggaaacatgggaccctgcaatgacagacttcgcattcctcctgagcggacaggcaataagcaagtaaacgcgcaaatacccaagtgcggcctcaacccgcgctcctgccgggagggtctccagtcaccgagtaaccccggccctgccccgcgccgccgccgggactccgccccgcaagcaagtggggtctcctttgtcccgcgcgccctggccgcgtcccgcccttcggcgtagcccatgggaggcgccctgagggcagggcccttctgattccccacctggcctcgagtgaggacgcgctcaacaacatctcgagtaaagcgggggaactcgcttcaacgcgcagacagcacagctctcgcccagcccggtctcgggtcagccgtctctccctggacctcagggacactagccctggaaggccgccggtcgggaggggactccctccccgtctgaggggcggccgcggacacccggcgcctttcccccgccccaccccgtgcggcctcacgcaaacgacaggaaaaaagctgggaccttcgcctccgactcagtgtagacgtcgccatcccggttccagatttccgcgctccaacgcctccgcagcagccatcttgccagagggccgacgccttttgactctggcgccaacccgtagtgcgtggtcgccgcgaggggagttctgcgcaagtacggaagctgaggttccgcgcttccgggaggccgtccgccccgccccctcgcgggggcgcttcattggtcatcggctcgcgctctcgcgctctcttgctgtcgcgagaggtgctgaggggcggcctccggtgcgcctgccctcccgctccccgcccccgcccccgcccccgcctccgccgcggcccccacctctgcctccttctactcgggcgccccggcggccgccacctctccccagcccaggagaggctgcggagccgcagccgcccagaccgcgcagcgcgggaggcaggttccgcacggtaagatggcggcggcgggcccgggcggccgggccgagcgtctcccggggccgggccgggcgggcaggcgggatgtggccggggtgcgcgccgcccccgctctgggggccttggaagcgccggcgctggcaggtgcggaattggggcgcgcagtgagtccaggcccggacggccgccccgcgccggtgcccagggggcagtcagggctcagcctccaggcgcgcggcctcaggcgctggtgttctggggcggtcccggccagcctgaggggcggcggtagctgtctctgtggaggagcgacgtccgtaacgaagtctttttaataaaatctgctgctttaaagcagaaaccgagcgggtgaggatgtaaagtgtggcatggaaagtaggagtcttcagcacacgggtgttttcttctgctgaatctttttatgctggagtttgagactaccgagttcttcctgctaacaggactggccagttctacaaagttgttgcttttcatgggcgcacgtaactgcccggagtggaagcgctgtgagtgccgatcaccgaatgggccgagagaaaaggtgccttttcctagggagctcttaacgttggtcctagggccgggcgcggtggcggaggtcgaagtgggcggatcacttgagcccgcgagttcgagaccagccgtggcaacagcgagactcccttctctgctaaaaataaaaaaattagccaggcagagtggtgcgctcctgttgtcccagttactctggaggctgaggtgggaggatcgcttgagcccaggaggtcgaggctgcggtgagccatgatcgcgccactgccctccagcctgggcgacagagcgaggctctgtctcaaaaaaaaaagaaaaagaaaatgagtccttaagttaccattaattgtcgtgaataaaaagttggtctcagtgagttttgcagttgacaacgaaagatgggtgttcgtgtgtgac

SEQ ID NO: 972 - DNA, 6000 bp, Homo sapiens
tccccctgatggcctctcgacgtccagccgcttgtgtgttctgccaatgggctcctctccgtgtccagggcttaggtgcctgcccgctaggtctcagggtttctataggcaccagatgggggcgtggcagggcagggtggtcttgggaaatgcaacatttggacatgaaggcagggtgtgtctatcctcacctaggtccgtgggcacaggcctgtgcgtggagccctagccagggaccatgccctcctctagccagcacttccctgcccaccactcctgcagccttcaactcctgggctcgcataatcctgctgcctcagcctcctgagtagctgggaccacagttgtgcaccaccatgcccagctatgtttttaaaatttttttgtggagatggagcctcgctatgttgtccaggctggtcttgcactcctgggttcaagcagtcctcctgccttgaggctggggttttccagagttttggagtgggccaaatgtgcagatggttgattagtagaaggttgcagggtgaagccacaggacagagtgaagaagctgttctcatgtggatcccatccctccatgagggtcttcaaactggttgctggaatttggggtctgaaaaacatcttaaggaatcaacaaaagcctcatgactgtaatatcagggatcgcatctgtgggaacacagtggtcacgaccgagggcaacgtggtgatgtttagcagcgagaaagcgggccaccgtgcagtctgattaatgcttaattataataatatttctgtccagaacccgacatgcaattcttgtcagccctgtggagacagttttgttacaggaaaggggtccggatccagaccccaagagagggttcttggatctcctgcaagaaagaattcagggtgagtctgtaaagtgaaagcaagtttcttaggaaagtaaaggaatcaagaatggctactccatagtcagagtagccctgagggctgctggttgcccacttttttggttatctcttgatgatacgctaaacaaggggtggattattcatgcctcccctttttagaccatctagggtaacttcctgatgttgctatggcatttgtaaactgtcctggcgctggtggagagtgaggacgtccagaggtcactctcgtgaccatcctggttttggtgggtttttgtcggcttctttgccacgacctgttttatcagcaaggtctttgtgacctgtattttgtgctgacctcctgtctcatcctgcgacttaaaatgccttcaccgtctgggaatgcagcccggtgggtctcagcctcattttaccattttacccagctcccgttcaacacggagctgctctggttcacatgcctctgacggtttcaccttctgctcagagcatttggacctccacaggctctgactcagccctcttatcccaggctgatcccatccccgtctaaaaatcccactaacttccttctgagaaagttgagagtcttgtttatactaaagtgttaatgactcacaaagcattcccagaggaaaagttaacaggaggagactgtgaggctctggcggtgaaaggtcaggcatgagccctgggggagatgttttcttctctggaggcccctcctgagaccccccatctctgcacaggaagacgaaccctgtgcccagcgggtccacctatctgcccacgtggccccaaccccaggcttcatggagtagagcagggctcattcgtgtggcacccacacgcagtttcagggcgtggactttcccggatggctgggtggctttgggggaggtgtgagctgttggtggagaatgctgagcccggccctgacgacggtcctcttttcctgccttaataggctagtccccatcactgtggggggcaatttggggatattctcctccaactcctgctggttctgaatcttgcagggagctgcaaatcccagtcactgtggggtcttggggcttctaggagtccctgctgggcccagggcttttttctcactgacctggaggcctctccccacggctccccatctgacatcttctcagctgggagacttaattgtaaagactcacagggatccagggggcatcacagggggccctcctaggtactgacagatgtttattcattttgaaaaatgggcaaatagcaaataaagatgtttagggtatgtttggaagaaaacagcaaaatagtaacagcagtgcttaccgctcagcggggagaaggcatatgggttttcccagcttttatttggaaatcattgtagatgcagaattgcaaagaagcctagaggtgtccatgcaccctgccccaccccacggtatcatcctgcaaagctgcagggcaactgccaaatccagacacacacgccccggtgcccacagggatggctcagacatcgaacttcgctttctttatactcccagtattcccgacacttctggaataggcacatgaccattatttttagctccttatttctttttatttaattaaataagcaacatatggatagtccttgttttgagaattttgggccggccgcacacggcaaagcagctgagcgcccctcagcagctccctgcacagttacgcactgggatggcactgcgatgcgtgtggagaaacacctgctgggtttggaggtgcacaggacctcggggcgatcccaccggaggagcggggctcggcttatggcccagctaaccccaactccccagtgggccccagggcctttccttccacttccaggagtgacaccaaccttgtctcctctccgagccccaagcagtgggaagagagggtcccataacaggccatggcagcggcctctgctgcctgcccacctcagagggtccccagcttgagagttcagagcaaacctgggtgctgcatgtgtctctcccctggaagaagcaggctggagacagtggcccctcttcccacctccccggtgcactgcgggcagactgggaaccaggcagcaaatccacccagcttgaggcccacgtcctcctgaaagggccccaggcccacacccggggttttgctgaagtgaccaaaggtaaccgctgtgctgagggggcggtggaggacagggagggggcgaaggcgaggtgggcgctggaggacgtgggggtgaaggcgaggtggtcgctggaggacagggagggggcgaaggtgtggtggacgctggaggacagagagggggcaaaggcgaggtgggcgctggaggacagagagggggtgaaggcgaggtgggcactggaggacagagagggggcgaaggcgaggtgggcactggaggacagagagggggcgaaggcgaggtaccctgagatcatcccagaaaacacactgggaagttctaccttgtgtctagcctaactcctttgctggccctcaggccctttcccgacagccctcccctcctatgcccctgagcttcctgctgcctctccctctgcgccctgcagccctggcttctgggctctatcctcagcagggcctgcagacaccccagaggccttaagagcctgggaggggtttccagccacacccttcactttgatttctgcaggaaaccaggtggctctgggccttgcataggaaagggttgggggtctcgctggggcctggcaacactggcctgagtatgaccagaacagtcaccagaggcctcctgggagggcgggtgcagccccagcccccgccgtgagtgggggtcggggggcaggtgtgaaagtgtggtgggcagcagctgggtctatgcggctcagcagtgggaagagaacgggccaggcttccaggtgagctcagggacggttttcactgcagctaaccctctcctgcccacctgcgctccccgtggcaaccagcggccctgcagcgtgcgactcctctttattcttccaaactctgtgagcctgcacgctcccatccaggacggaacagcaggggagagtggctgaaggatgacagggggcttttagggccagccgggtggatgagctgggtttgctggggttgagggctcagtcgggggttggggggtgtcgaagtctgggccccatccagctgtcctttttgtcccgcccaggtgtccctggggttcctgttctgcccctggcttctctggggttaagtcctcctccctgttccctcactgtggggtttggcagtgtggcacagtgtggagcttggaccggcagccagggtcacagcagacctcaggaactccgattccagtgccaacactgagtactcctcttttgggggcatcagagcctctcccttggctacctggggaggctggtatggagggaggtggagggagatgggggaagggggagcgggaggtgagggcagctcgggcccttctttttgctctgatcttcctggcctgaggacaagagctgctcccagacctgcagaggccccttggggcagagggatgtttcagagaacagccgggtgacctgcctccctgctctgcgtgacgcagccctaggcccctgtgaggctagagtcacccccgcaaggtgggaggtcacggcccctgcctgcacaggcagcacagctcacatgtccttccttgagccttctctgcttccggaggctgccctgggcgcctgaccttggagccatcatctccagctccccaacccctcccccacagccctggggcagacaccagcctggggaggggtctccatgctcagttccttcccgtcttgttcagagagacgtggcctgcccacgtgcagtcagcggcatccgcaaccctgccaggggccccgtgacacgcccccgctgcacagagcatgtgaccccagaggccaccctggccacttccagaaagctgtgggccctgggatactcccctcccagggtgtctggtggcaggcctgtgcctatccctgctgtccccagggtgggccccgggggtcaggagctccagaagggccagctgggcatattctgagattggccatcagcccccatttctgctgcaaacctggtcagagccagtgttccctccatgggacctaaagacagtgccaagtgcctgcaccgtggaccacagccgagccactgggcagccggtgatggtcccacgcaggagcgctgtggaccccgctctctgggcagccctgtcctaggcctggacacctgcagagcctgggaccacgtggatgggcagatcctgggccagctgcggcccctgacagaggaggaagaggaggagggcgccggggccaccttgtccagggggcctgccttccccggcatgggctctgaggagttgcgtctggcctccttctatgactggccgctgactgctgaggtgccacccgagctgctggctgctgccggcttcttccacacaggtcagtcccgggcgggggggccttcctgccgtgggcctgggcacgattctggacccttccagcccagggctctgcctcctccgtagcatccatcccccaacaggaagggtctggcctgatgacggagcagtggtcctgcaagcccctccagtgcccatgggctcgtgcctgacaccctcccccggagtctctgctggctgagtgtttcagaccgtgggatgtgaggaggggctgcctctggccacagtctgagggtctcagctgtggaggccgccagcttggtgcacaagtacccctttgtgatagaagtgggtggggctgacattgcctggggccctcaccttccccgctgctgttctgcacagggagaggagatgtttaaagaacaggatcagggtgaccaaggcaggcagtggtcagccagaaggtcctggatgctcagcctgtggggaatttctccaggccccaacctgcagctactgtctggtcttccccaactgaatcaagtccccggagtacctatcctagtcttggcccgggcctgctcctctgccctacagctgcagaccatgtggtcagac

SEQ ID NO: 973 - DNA, 6000 bp, Homo sapiens
aaggtcacccaaatagaatcttgtccctgcaggcggatagctgagctctaaattactctggatacagtgaaggactaaatggttccaatgaatcaagttcagggagaaaagggtcagggggtatggaggttagccaaagagtgtcaaacgttctcctcaaagctattttagaacaaggctggtcaggctatttgggctcagctcttttcagcgtgtgtcataggcagcagccagttgaagccatgccaccatgcagtgcaggggtccaggtctcaggaaggtgcagcgtaccgagagtcacatgaagacctcagatcatttcctgctgctgtgtaatccaggcagtctgggaagagaatgaatattcagtggttgtatgtatgtgtgtcttcatcccagcaagtgacagatgttcctgcccagttggaaaatggaaattctgacttcattgtcttatcattccttccagaacaagcaccatgggctcaaaccctccctggctctgctttaagggaaataatattgtgtctgtgcagaggccctgtctgcacagggtcgtggtagggctggccttcacatggtggcccatgccactgctgtagcttagccatgaggaagagattggtgagcctgctggagaggaaggctacccttacttggtgctcctcctttatccatagacatgagtactcagattttcgcatctagctttcaaggggctggagattaaagatccaatccatactccttggatgcccttttgtcaagataatcccttcttctgtagctcctaagccctctaaggtctgagggccaagctgccccatggcaggaatggcaaaatgtagctgtcctctcagtggcaaaaggtaataggattatcaagtagcaaaacagaagccaagaaaagacaggagagttagaggtctggattgtgcaccagccttggagcctcgcatctctagcagggcactcttaagcgttaggctttggagtttgaagaggagataaacctatcaaattgccaggtgttcccctgcccttgatgcatgcaaatgattgttgacagccagtgtgatggtagatgtgcctcctggaagaaataaaagtataatattccaacaatcaagcagcattgtggcttttttctacaatcagaaacatagcagctttgtgcttgatctcctaagcaagataattttttttaacctgggcattctttgagttctcagtttcgaggtgatggggagcaaaaatgatgcccaagttcaaatggcgtactgctgcagataggctgtctcctggcacacagatttacagagtgaatgaaatctctcattcattggtgctaatctttaaccatggtttttaacttacaagttggaggctaattacacagttaccagttaaagccaggtgacctcatttgttgacaacagtgcacagcaaaggaaagaggagaggataaggaaaatatctgtgatttgctcccagaaggacagtgaagctgagcatccatttgagcagagtcctctgagtactggccttggtcagagcttgttggtgggagtgtgctaaggggagatgcctaggtctgtcattggagtaagctgagggtttggatgcaggggaactcaggcagctctgagccacagggtggtagatgggagggattcacagtggcgcacagtctcttccataaatggaaacgtaagaatcggggcacatggccatggcggctcatgcctgtagtcctagtgctactttaggaggccgaggtaggcggatcacctgaggtcagtttgagaccagcatggccaacatggtgaaaccccatctctactaaaaatacaaaaattagccaggcgtagtggcgggtgcctgtaatcccagctactcgggaggctgaggcaggagaatcacttgaacctgggaggcagaggttgcagtgagccgagattgcctgggcaacaagagcaagactccaactcaaaaaaaatgggcacataatggatggaacattctgtcccaagggatgagggagctgtatatctacctattccagctgccttgggattagccactggtagtcattccacctcactcccagactgaaaagagtcaatcacttcatgaagtggggctatccgaagggaccacaggggacctgattatactgacagatttatttttatttatttactttttttgagacagagtctccctctgttgcccaggccggagtgcagtggcacgatcttggctcactgcagcctcagcctcctgggttcaagcagttcttctgcctcagcctctggagtagctgggactacaggcacgtgctactgtgcctggctaaatttttttgtatttttgttaaagatggggtttcactatgttggccaggcgtgtctcaaactcccgacctcgtgatccacccgccttggcctcccaaaagggctgggattttgagccacctcacctggccttttttttcttggagatggagtctcactctgtctcccaggctggagtgcagtggcacaatcttggctcactgcaaactccaccccccaagttcaagccattctcctgcctccgcctgtggagcagctgggattacaggcgtgcaccaccacgcctggctaatttttgtatttttagtagagacaaggtttcaccatgttggccaggctggtctcaaactcctgacctcaagtgacgcacccacctcaggctcccaaagtgctgggattacaggagtgagccactgcacccggccatattgacagatcttttagtctgaattgttatcagccagtgtggtctagtcatgacatatctagctccatctcgagacctcatgtcttactgctgacactacatcctcgctggtactttttcttccttggcttcaggggcattgctgtgtaggctcagatccatgccagatggggtgtgtagggggaaaagctgcataagggaggaatgtcacttggcaacactcaacaagggggaatgggcctgcagtattctcccagagatgaatgagcagcccattctaggaaatatccctttgaaggaatatcttctctatggtacatccaaacttttctctggaaaacatgcctcttcattctgatgactttctatttattctcttcatcttaccatggttttacaaaagaggaattttaacatactcattcagcagagttaaggacctcctctcttctgcgaacggggagaggtataacaaatatagtaaaacaagaacagccactgcccacgttgtaggggtaagtaccctgcccaacctgcagacagtaaatgccacacacagctctaacagtgacagggggagaaaaacgtcttcagttactggcctgaccttagaggtaaagcaacatattaacagagagggtctgattttaaactttgagctgaacatacttctatagtatcttaattctcagtttttaaaaaattacatcatctagaatggcgtcgtccttgctcttccttttttcttgtgccaaataatagccccctttggtatatgttattgttttaattgattctcaaacctctccttaacattttaacaaacataaaatttgatagaaatgggctagactaaattcagcagtccaggaaatcgagtatttttctacacagatttgagtgtcacccaagatacagtatactttgctgaatctccctccatgatactcttgtggttttatctattttaccaaaacacttccacgtaaaacaggcttccgttgactctgtttgtcctttatggacccaacaggggaggaaaaaataccattgcactgggtttatccacttactgtggagttggggaaccagaaacaaccactggacacgttgcaagcgcgtcaaggtttccaccgccacctggtggctagatggagcacagcatctgtgtaactggtgggcaaaggcgttctgctccaagatgtcaaagtgggggagaaaattatgggtgttctgcaatcttggcaaaagaagagtactgtactccttatctttttactgcttctccatgttcacccttaaaagattgatttttattttttactcagctctcctcttgtttttcaggttgacgccgctgtcaccccagaggagcgccacctgtccaagatgcagcagaacggctacgaaaatccaacctacaagttctttgagcagatgcagaactagacccccgccacagcagcctctgaagttggacagcaaaaccattgcttcactacccatcggtgtccatttatagaataatgtgggaagaaacaaacccgttttatgatttactcattatcgccttttgacagctgtgctgtaacacaagtagatgcctgaacttgaattaatccacacatcagtaatgtattctatctctctttacattttggtctctatactacattattaatgggttttgtgtactgtaaagaatttagctgtatcaaactagtgcatgaatagattctctcctgattatttatcacatagccccttagccagttgtatattattcttgtggtttgtgacccaattaagtcctactttacatatgctttaagaatcgatgggggatgcttcatgtgaacgtgggagttcagctgcttctcttgcctaagtattcctttcctgatcactatgcattttaaagttaaacatttttaagtatttcagatgctttagagagattttttttccatgactgcattttactgtacagattgctgcttctgctatatttgtgatataggaattaagaggatacacacgtttgtttcttcgtgcctgttttatgtgcacacattaggcattgagacttcaagcttttctttttttgtccacgtatctttgggtctttgataaagaaaagaatccctgttcattgtaagcacttttacggggcgggtggggaggggtgctctgctggtcttcaattaccaagaattctccaaaacaattttctgcaggatgattgtacagaatcattgcttatgacatgatcgctttctacactgtattacataaataaattaaataaaataaccccgggcaagacttttctttgaaggatgactacagacattaaataatcgaagtaattttgggtggggagaagaggcagattcaattttctttaaccagtctgaagtttcatttatgatacaaaagaagatgaaaatggaagtggcaatataaggggatgaggaaggcatgcctggacaaacccttcttttaagatgtgtcttcaatttgtataaaatggtgttttcatgtaaataaatacattcttggaggagcaccattgtgctggtgtgaatgattccatagtaacaatcttgaccatttactgacgtacagaccagtgagaagtcttcgcatgttgggtacccacacctgttgtgtcttaattgcaagtctgagtaggaagttggggccaacatgtgtctcccagtgctgggaaaatatttcatagacctaatttacagtctttacttgatctaaaacattttgctgccatattttggccctcaagtttgtcccaaatgagagacaaagggaaaagttccagggaaataaaaattaagacagctgattatctgtaaagcatggtttctcatcctgaacgctactaacattttgcagggaataattccttgttgaagggagttgtcctgaccagtgtaggatatttatttattttatttatgttttttgagagtctcgctctgtcacccaggctggagtgcagtggcacaatctcggctcactgcactccagcctgggagacagacgagactccgtctcaataaataaataaataaataaataaataaataaaaggagggcctggcacgaatgacatgcagggaaggcagtgagcaggtggaggtccctgtactcgttgtggtgccttatctaccaggcggttgagttgacgtctttgtg

SEQ ID NO: 974 - DNA, 6000 bp, Homo sapiens
aatctgaaatgttgctttattcttgctctttatttggattaaacataaaaataattttgagaacattgtaaagaaggaataaaatttcatttactgcactacattgcttcatactgtttataaaagcaagtcattatttttcaactttatctacttgaatgaaattatagaagcacaccacaacttttatcatcttgttatataaggagttgatcttatgccagatgaagtaaaactaaagctaaatattaccacgtttgctctgcaacttaatgaaaatacaggcatacatagctttattgtacagtagtgcttacagatagtatttaaaaaaaaaaaacaaaaaggtttctggtaaccctgcatcgaacaagtctattggtgccatttttccaacagtgaacacaggttcacttcatgtctgtgtcacattttggtaattatttaaatattcaaacattaaaaattattatatctgtttggtgatctgtgatcagtggcctttgatgttactattttaattgttttggagtgtcatgaaacatgcccataaagacagcaaactaaatcaataaatgttgtgtgtgttctgtctgccccccaaactggccactccaccccctcaactcccaggctccctatcccttgagagacaacaatattgaaagtgggccagtaaataaccctacagtggcctcttaagtattcaagtgaaaggaagagtcacaggtctctcactttaaagcaaaagctagaaataattaagcttagtgggcaaggcatattgaaagccaagattcttgtgccagttagccaagttgtgaatgcaaagaaaagctcttgaaggagattaaaagtgctactccagtgagcacacaaatgataaagcaaaacagccttattgctgatacggagaaaacttttagttgtctggatggaagatcaaaccaaccacaacattctcttaggccaaagcctaatcaagaacaaggcccacaactgtcttcaattctatgaaggatgagagaggtgaagaagctgcagaagaaaaaaaagttgggagaggttgatttcatgaggtttaagggaagaagccatctccataacacagaagtgcaaggtgaagcagcaagtgctgatgtagaagctgcaataagttatccagaagatctagataagactcctgatgaaggtggctacactaaataacagattttcagtggagatgaaacagacttatttggaagaaaatgccatctaggactttcatcactagagagaagtcctgccttcaaagcttcaaagaacaagctgactctcttgttaggggctaatgcagctggcgactttgtttttgaagccaagactgaccattgtaaaagtcctagggcgcttaagaattattctaaatctactgtgcccatgctctataaatggaacaaaactgggatgacagcacatctcttaacagcatggtttactgaatattttaaacccactgttgagacctactgctcagaaaagactcatttcaaaatattactgctcactaacaaagcacctagtcacccaagagctctgaaggacaggtacagggagattactgttgttttcatgcctgctaacacaacatccattctgcagcctgtggatcaactttcaagtcttattatttcagcctcttattatttcaaaatatatttcaaatatattttgtagggctattcactgccatagatagcgattcctctaatggatctgggcaaagtaaactgcaaaccttctaaaaaggattcaccattccagatgccattaagaacatctgtgatccatgggagatcaaaacatcagcaataacgggagtttggaagacaatgattccaactctcatgggtgactttgaggagttcaagacttcagtaaaggatgtcacagcagatgtggtggaaataacaagagaactagaattagaagtggagcctaaagacatgactgaactgctaccatctcatgatcaaacttgaatggatgaggagttacctcttatggatgagcaaagaaagtggtttcttgcaatggaatctactcttggtgaagatgctatgaacactgttgaaatgacaacaaaggatttaggatatcacataaactcgatgaagcagtggctagatttgcgaagactgactccaattttgaaagctgttctactgtgagcaaaatgctatcaaacagcatcacatgctacagagacatctttttgtgaaaggaagagtcaatcgatgcagcaaacttcattattgtcttattttaggaaattgccacagccaccacaaacctcagcagccaccacctggattagcctgcagcagtgaacatcaaggcaagattctccacgagcaaaaagattaggacttgctgaagactcagatgatcattagcatttttagtaataaaatattttactaataaaagtaaagtatatacatggctttttttttttttagacataatgctattgcacatgtaacagactagagtatagtgtaaatacaaacttttttttttttttgagacagagtcttgctcttgttgcccaggctggagtgcgatctcggctcactgcaacctctgcctcctgggatcaagagattctcttgcctcagcctcccgagtagctgggactacaggcacatgccaccatatgcagctaatttttgtatttttagtagagatggcatttcaccatgttggccaggatgctctcgacctcctgaccttgtgatccacctgccttggcctcccaaagtgctgggattacaggcatgagccaccgtgcctggccaacataacttttatatgtactgggaagccaaaaaatttgtgtgacattttgttgcaaaatttgttttattgtggtgttctgaaatttccaaggtatgcctgtacctccctaaaaaattctttcaatttagcctcaaggtagtcaaatgactgatttttctaagctgaaactaacatactagcaatctggaaaggcaatataaaatatagcaaatgaagcaacttctaaaagtgttttactcgtggtttataacaaaatgagaaattgttcataattattccctttactaaacaaatatgctagctcaacatttttatgaaaagcaaatcattaattagctaatatactagtgtgaggtaatcaggaataaatacaagtctggacatatgcctgtgcctttaagaaaatactgtaattttgtaatattcattgcactaattataatacattatcttaactagtccagtagagggagctgattctcctaattgctgccgctgccattagtcactgtcgcattataggcgttagtgtaattgtggggatgggcttatatgacacaggccccaggccccgacaaatgcaaatctgtacattaatcgtcagctttctaccccaccaactcttcaactctttagtggttccccagtttttattaacctcttcagcaacagcctcatcaagagaaaccctgatcttataacaactgatactagattatcttgccaatgaaaaccatgcttcaaaaagctaaatgtctttctacaaaaaaagaactatgggagttaagaatgcaaatccaaatcccaagtcagttttttatttgctacaattatttggagtcaagtaaggcataaataataatttggaggtgtttcttttagagattaatactaggatttatcaactttatgaatattgaaaagacattttctgcttggaaaaaagtaacactcacacacacacacacacaaaacaaaacaaaagaagtgcctgagataactttaagtattattgctatggaaattttcttaccatttttctgtccaccactgaatgtgataaaattgtcgtcttcattaatttaaccctcttactgcacctactgataagatggaaccctaacataatccacgatttgatttatctccatttctaagcttttggtaaaggattttatataactactagagctgaccacaaaggagatgtggctttttgatttactccaattctaacattaggggggaaaagtgatttcatctgaaaaggaagctgctgtcttctttgcacaaaccttttgatgaataacactatcgggaacatcatggggtcctgctcactccatgatcttactcttgcaagagaagttaaatcatgggaggtaggggagggaatgaaaagaaagagctgggggagaaatgaatgggtaaaggaagacagttccggatgtgaatttaagccacataaagtgttctgtaaaaccaagcagtgtatgcatgtgtttgatccttcaaataaacctattgtaaacctattttcccagaaaacacagtggaagtcaaagtggctgctatattgaaattaattccactttaagtcccgagtcatgcacgaactttgctgccttgtagtctgaaagaactatacatacagcctctttcttttcttttttttttttgggatggagtctcgctctgtcgcctaggcacgatctcagctcactgcaacctccacctcctgggttcaagcaagtctcctgcgtcagcctccccagcagctgggactacaggtgtttgccaccacacccagctaatcttttttgtatttttagtagagatggggtttcaccatattggccaggctggtctcgaatttctgacctcgtgatccacccgccttggcctcccaaagtgctgggattacaggcttgagccactgcgctcagcctagcctatttattttcttcatgttttcatggtaatcctataggcaagcattgtatttttatcttttccttaatttgatttctagcacaggatgaaccagagttaataggtcatttggcaagacaaacagtagtggaaagaggtaaattattttacgtaccaatttttgatgatgaacttcatatcctgagtcatgtcggaattctgcatccatcttcacttcagagatctcctccgtcttgatatttgtcaacccagaacctgtattacatcataattaaagtatgcaggacaaccaattagttttactcataaataataacactgtaagacaaagcctacccaaaacttctttctaggcctgaagttagaagaaaattgataaatgactcttaaagaaaaatgataccctatatttaaaacttcaattactacctattttgaacaaaaagaaatgaaagggtaagggaaacctgaaagtaaggcttctgctgcctttaaatacatgctataatttttgaaaatgggggaaaagcagaagttaaatcctggttgagaggttggcaaggatttgttcctggaatatgttggcttggcttacgggcttattgtttagcctattatgtgtctttttccatgtgcactcattacttcagaaataataataaaaggctttaaaaatgagcattaattacctggtagaacaaaactgctactttggggctttgttccaattacaaataaattatgttcatgtatctatgcagtgaagcgttgtaaaaattatataattttagtcaagtgttctagttacacagattgtaattggttcgtctgctgaataaagagctatagtacataattttaaaaatgcttcttagcaactaacagaatttataacctacgaactcttccttttctataaattgctatatgattcttaacactaattgttctgatgaatttcattattcaaataataatttgaagcttaaaacaaaatgcagagtcatttaaaaaccaaaaacataagtaaaaaatgtaaatgtcagtgtccatgctataacatttaattatcaaacatcagaattttaggatgaaaagggcttttgaagtcatcttctctaccgtgttcccacccaggggcagattgtcagttcctgtttgaacatagaggaatgtatcaatttccctccattttttgataga

SEQ ID NO: 975 - DNA, 6000 bp, Homo sapiens
gaagaagggaacaattctattcagaagagagggtggcctaagccaagcttcctttcatacacagcgtaggcttgggttgcccagtaagatggctaaagttgagaaagaatgctcagatatgaagtgaggaagattctagttaaggtttgtctatgaatagcagtatttactgcacatgtattaagccatgcgtgtgttctgtttttgtgcttgtagtaagtttatcaaacatttgggctaatttccccgtgttttgtagcatagctttggttcttcttcacattttagagaccacccacttgagtctaatgtgccgaattatatctttagcctttccaaacttagaaagccttcccaagattgtcatgccgttcaagtgatggcattgtttttgaataatcactgttgtcctcagaaacaagttaaaaaaaggtttttgtttttcccccacccagtgctttataatcatgactgaggaaaatggcttctccttaactctcatatctaaaaaaacagaatatggtagcttccagcatgcagtgtcaagtagggaccattgtaataacagtggtgatttgggggcatagtggccattatagctcctcctcctggcttacttccaaagaaaaaatagactctgaaggactaattatacagtttgaccagaataaaaaagaaaaacacattagcgagctcttcacatagggtagaaagctaccctttctgttacaattcatcaccacccttctgcagtccaaataaagggaaaccaggtccttgacccgagccatgcaagaggtgtcatgaaggacatacctcccttagcccccacatgaacaaaaggctctgtccactcatcatgacttacaggaagagagagctggagtcaccagggcttagggtgaaatcagcacaactcaagaaagacctctaagtaagcctgcaaaccaaggtccctgccatttatttgaaactactcatcacattttattacatgcattatcaccttattatgaatatttccctatgtgccagcttactgattttgtcttttagtaagatttgcttaatgtaaaaagtcttccctagatgactattcatgctaaacaaacatgaactattatagcaagagctcttctgccaagagcttctcaaactattgagctgtaaacatgaatttatctgtcatgctgacttgataatatgaatttttttttttggaccaccaaaagtattcacagtatcatttcaaaagtagtgtgggcttgtaaagtttttagtggagagctcttggttttgttttttttttttttttttttttaaaacaggatttgtctctgtttccaggctggagaacagtggcatgataccagctcactgcaacccccatttcctgggctaaagctatcctcccacctaagtttcccatgcagctgggattacagggatgtgccaccacacctggctcatttttgtatttttagtagagacagagttttgccatattggctaggctggtctcgaactcctgagttcaaactgtttgcccgcctcagcctcccaaaggctgggattacaggcatgagtcactgcacctggccgagagctcattctttttttttttttttttgagatggagtctcactctgtcgcccaggctggagtgcagtggcacgaatctcggctcactgcaagctctgcctcctgggttcacaccattctcctgcctaagcctctagtagctgggactacaggtgcctgccaccacgtccggctaattttttgtatttttagtagagacggggtttcaccatggtcttgatctcttgacctcgtgatcctcccgcctcggcctcccaaagtgctgggattacaggtgtgagccactgtgcccggccagagctcattctttacttttatttttcagtataaatatttggctccaaaatctaaaagggaagactcttcaaactgttcaagaaagttttcttaaaaatctcagaaatatagttctaacctattgtgttgctagatcttttatttatttatttatttttggagacagagtctcattctgtcacccaggctggagtgcagtggcacaatctcagctcactgcaacctccacctgccgggttcaagcgattcttatgcctcagccttctggagtagctgggattacaggcacccgccaccacacctggctaatttttttttttttttttttttttttttttttgtatttttagtagagacagggtttcaccatgttgaccaggctggtctcaaactcctgacctcaagtgatccacccagcttggcctcccaaagtgctgggattacaggcgtgagccaccgtgcttggcacgttgccagatcttaataacagaaaaggagtgagctctaaagaaatcactggttatataaggatctcagatttaaaagggctatagaaagattaaaatatacagccagtgagaattaagagagttttagcatcactaccctataaaaataagtgtcagaaaggttcgtttcagcagaatgagttgaaacttaaccaaaaaatacttaacaatattaaagtaagaaaataaataagaatagagaactctgtgggtctcgtagcaagaagttgggggttgagggttaggtcattgagaggaccagagttaaagaatgagaaagggaaactgtcccacttccattgtgccttttatgtctatattaaagagaatgaacttctgatgaaaggaaattaaagcccgagatagatcaacatgagaaaagaaagccctagcccattagttacctattgctacgtagcaaataacgcgagaatttagcagcttaaaacaacaagcattagtttcttacagtttttataggtcaggatttgggatgtggtttagctggatggttctggcacagtgtccgtcatgtggttgcagttaagacactgcctgagctaaagtcatctgaaggtttgattggacctggtgggtctgtttccaacgtggctcactcacgtcactgttactaagagacctcagtatcttaccatgtgaactctgtaatgctgcttgagcgtccctacaacatggcatctcgcacccctgcaccaagaggtccaggaaagagattaaggaagttttagtgccttttttggcccagtctcagaagtcatacaccatcacttctatcatgctctgttcactagagcaagtcactacatcccgaccacattcgaaggaagggaatcaagttctccctcttgaaggaaggagtatcagcaaatttgtggatatattttaaactatgacatcttgctacccaagtccaagttcttatgacccagaccaactgcaggctaagagaacttgaaggggaagtagcaccattgcctgtggtctttgtggaaagctgggaaggtagggataggaaaatgaagttctgaatagcaaaaaggagagaagatagcttcacaatctgtaagccaggtatagagtgacattgattgtgggtctcttttcaaataggttatcaagtggaagctttttgaacaattggatgaggaaatggtgctaggtcacaaccagcgtggatttcctaggttttgtcagattatccttaccttctccttgtataggctgtgctcttagactggcacatcatatgctgtggacattgtgcttttcagtgtcagcaagatgtgtcacaagtttcccagaatctcgtagacaagattgaaagagtgattaggccaagagcaggaagtgaattcccctgggagccaaaggaattgggaatgtgtagcccaagtaagacaagaaccagcaggaacatgcctctccttagggtcgtgatacctgttcaaggttttaatgtggaagggaggattaggcttgctctgtgttgaatcaggctcaaaggatggaagttacagggaagctgattctggcttcatgtaaaaaaaggacagtttgggcaggcaaatctatcaaaaaatggagggaaattgatacattcctctatgttcaaacaggaactgacaatctgcccctgggtgggaacacggtagagaagatgacttcaaaagcccttttcatcctaaaattctgatgtttgataattaaatgttatagcatggacactgacatttacattttttacttatgtttttggtttttaaatgactctgcattttgttttaagcttcaaattattatttgaataatgaaattcatcagaacaattagtgttaagaatcatatagcaatttatagaaaaggaagagttcgtaggttataaattctgttagttgctaagaagcatttttaaaattatgtactatagctctttattcagcagacgaaccaattacaatctgtgtaactagaacacttgactaaaattatataatttttacaacgcttcactgcatagatacatgaacataatttatttgtaattggaacaaagccccaaagtagcagttttgttctaccaggtaattaatgctcatttttaaagccttttattattatttctgaagtaatgagtgcacatggaaaaagacacataataggctaaacaataagcccgtaagccaagccaacatattccaggaacaaatccttgccaacctctcaaccaggatttaacttctgcttttcccccattttcaaaaattatagcatgtatttaaaggcagcagaagccttactttcaggtttcccttaccctttcatttctttttgttcaaaataggtagtaattgaagttttaaatatagggtatcatttttctttaagagtcatttatcaattttcttctaacttcaggcctagaaagaagttttgggtaggctttgtcttacagtgttattatttatgagtaaaactaattggttgtcctgcatactttaattatgatgtaatacaggttctgggttgacaaatatcaagacggaggagatctctgaagtgaagatggatgcagaattccgacatgactcaggatatgaagttcatcatcaaaaattggtacgtaaaataatttacctctttccactactgtttgtcttgccaaatgacctattaactctggttcatcctgtgctagaaatcaaattaaggaaaagataaaaatacaatgcttgcctataggattaccatgaaaacatgaagaaaataaataggctaggctgagcgcagtggctcaagcctgtaatcccagcactttgggaggccaaggcgggtggatcacgaggtcagaaattcgagaccagcctggccaatatggtgaaaccccatctctactaaaaatacaaaaaagattagctgggtgtggtggcaaacacctgtagtcccagctgctggggaggctgacgcaggagacttgcttgaacccaggaggtggaggttgcagtgagctgagatcgtgcctaggcgacagagcgagactccatcccaaaaaaaaaaaagaaaagaaagaggctgtatgtatagttctttcagactacaaggcagcaaagttcgtgcatgactcgggacttaaagtggaattaatttcaatatagcagccactttgacttccactgtgttttctgggaaaataggtttacaataggtttatttgaaggatcaaacacatgcatacactgcttggttttacagaacactttatgtggcttaaattcacatccggaactgtcttcctttacccattcatttctcccccagctctttcttttcattccctcccctacctcccatgatttaacttctcttgcaagagtaagatcatggagtgagcaggaccccatgatgttcccgatagtgttattcatcaaaaggtttgtgcaaagaagacagcagcttccttttcagatgaaatcacttttcccccctaatgttagaattggagtaaatcaaaaagccacatctcctttgtggtcagctctagtagttatataaaatcctttaccaaaagcttaga

SEQ ID NO: 976 - DNA, 6000 bp, Homo sapiens
gtcataacaaatagcttttagaaggggaaaaaataagtcttgggaggaaaataagcagtctcttagtttaatatagcggttggcaaatatagatgcttaaaagttctgaaaatccccattgcaggccatcagagtgttgtaattaagtattaaattaattcagataaaaggataatccatcagggccactaatgtagtggaagtgtggtttcggtgtgattagtctcaccatggaagtcaaagaaagtcccactcagaatgaacaatgaaagaatcatatttgtctctgggtattttgtcataggctcaattgcccagtgccagtgtgtaagccactggtaaaatcctgagcccttagtcatgtctacaggtagctggctgccttagacattttatgatgacgaaattgaattccacttctgataatggtaatccatcatgtctacctctttttttctcttaaaactacactgacggccaggcgcagtggctcccgcctcatcccagcactttgggaggccaaggcaggcagatcgcctgaggtcaggagtttgagaccagcctggccaacatggagaaactctgtctctactaaaaacataaaaactatccggtcatggtagtgtgtgcctgtaatcacagtactcgggactgaggcaggagaatcgcttgaacccaggaggcagaggttcgttgttctgaatgacatagccaggggtggttatttctaaattttctgtgttgaattaagataggaatgtggatttcttcctattttgaacaacgaccaaaaaaaaaaaacgaaggctaagtgtgtttcactctgctaaaaatgtaccttttcttgaatctgtcactttttcacttacattttctgaaaatgaatataattaaccaccatggggctcagcatgctggtggccatttggaggaacttttctaccaacagtgtaacagagaaaagagaaaagggtactacagcgtacctcaacctcccctgactgttctgtgaagtacaagtgtaagatttctcactgtgatcttttgctcctctgcctttttactgccaagggctaagatgggcacagggccctttccagctgcccctgcctgagaaatgcttatttgatgaccaaaagcaataaccattccataggactaacggtgattaagtcagcttacaaatccacaagggtggaagagactgctaaagatattggaacagacatgcttaataatgcctaatttctacagctacttttgtgataatacgagaggctgaaatagataggggctgaacatgggaaggctggtgttatgaagcccaggacttggatttcagcactggtgcttactggccattgggtcttgaagagattggttcctttctcccagcctcagtctccttgtcccatcagattaataatgcctgccttgggagaggagagtcatacaggagagggcatttgagctgggctctaaagagttcaaataacgtagatgagcagagatgggcttccaagatagcaggaatagaaaacaaaagtgtcagaatgggtatgcatggtcttttgtgggaataccccaagctatttagcctgagagagaggtgtggtgtagacagctggagctgtgagttccatggctagaaatacggggtgggcccagaccacagagggccttcagcatctggcaaaggagttggaattaattcggtagaaaatgaagacccactgaaacaaagagggagccattcttgtgtgtcaggaactaagatttcaggaaccaaacgtaaaataaaaaccagcagggagaccattgtctcagtcggtttgtgctgttatcatgataccagagactgggtaatttataaacaaacaatagaaatactacaattctggaggctgagaagcccaggatcaagccgggtgcagtggctcacgcctgtaatcccagcactttgggaagccgaggcgggcggatcacgaagtcaggagatggagaccatcctggctaacacggtgaaaccccgtctctactaaaactacaaaaaattagccgggcgtggtggcgggcgcctgtagtcccagctactcgggaggctgaggcaggagaatggcgtcaacccgggaggcggagcttgcagtgagccgagattgcgccactgcactccagcctgggcgacagagcaagactccgtctcaaaaaaaaaaaaaaaaaaaaaaggcgccttgtggctgcatcctccagaggcagcaaaaactgttctcacatggcagatgcacataaaggggcctgtgctggtttcctctagcccttttagaaggcagtagtccattcgggggcacggggtggaactgtcatgacttgatttccagaagaccccatctctcactactaccacagtggagatttaagtttcaacacatgactttgggggacattcagaccatagcaagcagtgaggagactatcgtaattatccaggcgaaaagtaatcatattcctaggggcggtgagggtggtgtggaaaagcaagcaggaaatggctgagagaattcagaaatagaatgcaaaaggatttgtcggtagtgtgagtactggacacgaagaaatacagggagtcctggatggctctgaaggattcaagcctgtgactgggagggagaatggttctgccatgattagaaaacaggaaaggtggaagggaaagccagggaccttgagtacagttgtgtacctaccaagtgcatggatcaggagggagccctaagttggtatctccagcaaactgttggaaatatacaaatttgagtgggagggagaagtcaaagctggggaagtacatttcagattcacccaaaggtaggagatctttagagtttcaagagtcgatgggatttccaaaggggagaattgtagaaagagatggaaagagatacaagaagaaaatgacagggatgaagagaggagaaaaaaagagtaaaaagagttattcagagatgtcacagggaagaagataagtactgtgtatgcgaaacagtgagaacatttccaaataaaggacatggtaagtgatagtagataccacagacccaagaacagcgtagcccctggggagttcaagagctttctcgctggcaaaggttatttcctgtcaagatgaatgtgtatgcaccaataattattagtattccagaatatcctctctttagcatagtaagtgcttaacagtcacaagcaaaagatttatataaaagaaatgctcatttaatttatttaatcagacattggctaagttattagccgctacctatggctttgtaaaacatgaaaaagttggaggaaatctaatgagggtcttttatctgtaagggaaaggtcatcatgggcatcaagtattgaattttagaaacggtgccacagtgaatagggatatattataactcagattagacttcaaaaggactaatttgcttgggacttccatcatttaaaatcacttgcaataaaactgactacatgaaaagatattaatcacaagctttaatgctattccatcaaattattttaatgggtatatttgaacagaattttaatttttcagatacattttttgtcaatagaaaagagaatttgaaagatgattgtaaaatgttacaaatcaaatttaaatcctgatcttattttcattttctctagcaataaaactaaccagtgatgtgtctgaaatatatactacagcaaactcttgacacagctatgattggaaaatgagacattttggttaatcaaatattattgttaatagtgcagtgctgtctgtcggtctctaatttgtaaaaatcagagaaaaacatggtgaatctttggtgacataagagaagactcacaaatcttcatatcctggggtcagtttttaaagcagtaattacacatgatacaagattatattctaagctctctttttccagtaagaaaagataagtcaatgatgttccataaagctgattcttgtttaatcaatttttaaagtgggggggtaggcggcactgacagcattctttggaaagggaagcaacagaggagaaaggcaggatatttggtgtctgctcacattgggaaatacggggagccaggggtggttaagtccagagaaggctggatgtctgtctgcagggctacatctggaagggcaagggaacagtttccttgttgcctcagagcataggtcatgcagcacaagaggagcatttaggaaatgcagattttttttcaaggcaagacagtgaaaactattcaagaaggtagcaaactactggccctttaatgcttttcttatccttgcaagtgtgcaaggcaagacaggagattgtctgttgtctttcagcttgaatgagattgtgcctcacttactgccgccacaccaaagcctggcgtttattcctgtgcgatcattgtatactagggacgtctaactgtgtcaggaggaaatggcagctgagcccctgtggcctttcacctctagcagtgccacgctgcagcacattggccggctgccatgctcctgcctgcagtcctgccagcagctcttgtgagctgcgactttgcataagtagcttgaatgccatgtgcctcagttttcacatctgtaaaagggagatgataatggtacctatgtcatggctctaaacgcgatcatgcacgtgaaagcagttgaagtcttgcctggcagaagtaaatggtggctgctgctgctgctgctgttgtgattgttgttactcaccaaagagatggttttgtttggtttagatgagctgcttcagaaagagcaaaactattcagatgacgtcttggccaacatgattagtgaaccaaggatcagttacggaaacgatgctctcatgccatctttgaccgaaacgaaaaccaccgtggagctccttcccgtgaatggagagttcagcctggacgatctccagccgtggcattcttttggggctgactctgtgccagccaacacagaaaacgaaggtaagagtcccctgagccagcaagggcgttctgggaggtatatatacacatacataacgtgtgtgcaagagagagagttatcttttgtatgttcttgagtggtgaattttttttgatgtagtcataaatattttcattataattttactttaaaaagtaaatactaggagttactatgtcattaaaataatatatctgtgtaaattattctttatattttttatgctgcaaagcatgtaaactgccaattgttggaaaagacaacaactccattgtataggtggcaaaacaaaatggtaatgatttacataacatttgcaggtaaagggcctcttgtttcgcacatgtccaggtttgcattctagggaatattatccttcgagtgaacactcccggacgaaggggagccacagtgtattattgaagaggcagttcttcacaaggaaaatgtgtggcaataacattcttctaatttttattttccagttcctcttcttaatataaaatggtacattatataacaaaagtggatacataaagagcatgtactgtatatcatattattatgtttatgactttttcaaatgaggaaatggaggcaccaggagactaagttcttaagtgatgacttttggtaggaattttttagaaatgttttttaactgtgaggtatattgttccctctggaatggaagcacaaaattcaacttgtgtttatgacgtaatgacctagaatgccaccttccaaaaaagcagatagatagtgaaataaggaaaaattacagtttaccaacagagaggagttttgagggcctgcagagatgcagatttgacaggcaccaaagtagtcttcactggctacttattcttacatgaaatttcagattgaattaaatgttaaaggcaaagatagagaactacatataaataaaatttaattttgcttaagacttaatttgtgtttag

SEQ ID NO: 977 - DNA, 6000 bp, Homo sapiens
ctgaacaagctaaatctgaaccttctgcacaattaaaggagctgatgttagcatggcccacagaatattacctgcacttgtaaaaactagaaagtcaggcaagtactcctggaacagactgtcttttctaaccatgcacttatttctttgtttttaactttgtttttgtttgtttgtttttgagacggagtctcgtcctgtcgcccaggctgtagtgcagtggtggaatctcaggtcactgcaagctccgcctcccaggttcaaacaattctcctgcctcagcctcccgagtagctgggactacaggcgcccaccaccatgccttgctaatttttgtatttttagtagagatggggtttcaccatgttggccaggctggtctggaactcctgacctcgtgacctgcccgcctcggcctcccaaagtgctgggattacaggcgtgagccacggcgcctggcctgtttttaacttcgtaagttgctttgtagaactatcttaaacttggtctattttagattctccttgaagggccagatcacaaagtgattaggagaaggaggctctggagccaagacagtgagactaacccattcttcaaatctaacactaactagctgtgtaaccattgggccagggatgtagcctatgtaaccacaatctcctttgtgcttcatgcctcaccaataaggtggggagagctgctatgactctgtcatagggctgagacgaagatttgatgagttaccagcaaaaagcatttaatatactgtctcattcagaagcagtcaatacacattgaactcttattacttagaggaaagaaaggggtcgatgatttatagataaggcctgagtgaaagaaataaatgtgtattgagtatcagcaatggactacgcatcattctgggtaactatcactgaacacatttaatctgcaaatactatctgaaagatactgccatctgaattgcataggtgggaaaagtcaaggcttttgtgcttatttttaaatgtatgttaacatgaataattaattggccgtgcactggtcgcacgcctgtaatcctagcactttgggaggccaaggcgggcagatcacgaggtcaggagatggagaccatcctggctaacatggcgaaaccccgtctctactaaaaatacaaaaaaattagctgagcatggtggcacgtgcctgtagtcccagctactcaggagactgaggcaggagaatcacttgaacccaggaggcggaggttgcagtgagccaagatcacgccactgcactccagcctgggagacagggcgagattccatctcaaagaataataataataataattagtgggaatatatgctgtttgttgtgataggagaagaaaaggggagatccagatgttggtcatcagaaatgacctgcatcttctctaaattgaaatttagcttgaagtagtaatgccaaggccagcctggggccatggcatcctggtgtacctgcttgttggtgacagtccttttaggacaaaatatcttacaaaaacattcatagatgactaactggaaaaaaagaagttatgatgaaaagcaattcttactgtttttgttttttgttttttgttttttttaattaaaagacaggcagttattctctttcccaggcttgagtacagtcgtgcaatcagggctcactacagcctcaacctcctgggttcaaataatcctcctgaccaagcttcccaagtagctggaactgcaggcatgtgtcactgcacctagctaatttttaaaattttcttgtagagacaggttcttgtaatgttgtccaggctggtctcaaactcttggctgcaagtgatcctcctgcctcagactcccaaagcaatccttacttttttaattgaagtgctttttttttttcttatttaaactcttaaaaattcatcccattttcttcaaaacaataaatcctttacaagggagaaaaatgaaatagagcaactaagaaagcatccatgaaggccaggaaggaacatcatggttaaatgcgattagtcacagccccttctgtctccagtcttggatgaataatggtaacagaactagagagatttctaagaccttggtgcttaataacaagcaagcatcgagggtggttgtgcaagatcctgatcacacaactctgcatatcaaatatccttcacaatcaacaagagtcagcctttaatctctgatgttttcaaatgttctttttttttaattcacatgtataacctatcctcttttcaatatatagagatatagcttatcagtcattacctcttttactacttttcttctgagatttaaaaggtcatcctctgatttgtaaattcaaccagatttcacagttcagatgagagttgtaataagttgccaagaactgttgcaagctgtgatggctgtctttctggggattatagagaagcacatttcttttaggaaaaaagaaggcagatgagcccaagttgttttatttttattgtgtatatgtatttgttttctcaagtacagtagcatggcctctgtggcaggcattcaccaagcaaatacagagcaccctctgggtcaagcactgtgttattggggttccaaataaagaaaaaagaccaaatccagccctgtggatctcacattaaagaggggagtaagaatcatagataatttaatgagttaggtacattaatggggatttgcacagtatttcataggagcacagaaaaagggtacctcgttccacctgagatggcagggagatggctcctaagttaactaagcaaaaggggaaggagaggcacatcccataggatatggataacacaacaaaagctccattaccacccgccccaccaccacacacaccatctctggaataaattttgtaccttccaactggttttcagggtactcatgacacatgggttaataatagctaggtttgcccaaatgaccaaaattctattcccaacatgaattttcacaactggtttttttgtttgtttgttttaatgaagaagaaatgttgtgtttttggaaatcatcttacaaaatcatgtagtggaatgcatatagtgatgaaattgttgaagaccagggaatctttgtccttagtttttattaggatggatgttttcaggtaaaactaaaataaaaatgaaatggaaccaattagaaagaaaataggagcacttaagacgaaatgtaattgttgctgaaagaattagaatctgatagcttagaaagaacttaattaaatttcagagtaaaataaatacagtttagcaatggcctttctcctagaaaaatataatgtctcttacagttcagttactccttggcttacaaaatagtggttaaatttcctgtttttctcattttgatttcgtatgttacatgttactggtgatgggattatctgtgtgacattacctctggtcttcaaaatgtacacgtagcaatgtagtctcacatatgccccttgggtgcgaaaagagaaggacctaacttaacctgacagacctcaaatctgttctctttctatagcagagtactcctatttaaaaagaaaatgttgagtaaggaggacagtcatcatatatgtcgagaatgttaaatgctcttgtggaagtgaaaagcagccgatctaagtaattacccattaagaaaggagtaggagaaatgtttagaaggcagacctgcaaaaaggtgactcacagtacgttcacatgaccggatgcattagtggaacctctaacccatcgccaatggaagaagcagtgttttgcacaaacttgaaaaagagtttttcattttcctcccacagcctcgtcacgtgttcaatatgctaaagaagtatgtccgcgcagaacagaaggacagacagcacaccctaaagcatttcgagcatgtgcgcatggtggatcccaagaaagccgctcagatccggtcccaggtaagcgtggggtataatcatcttctgcagctttgacaatccaggattcttgcttcttgggttggtgacaggatcccacgcattctccgagcacctataggtgttttccctatggcaagagctctttaacttctggtaaattctaaaagcttgtcttagagcaatatgtggtttggcattttctgagttatgaaaataacaaatgtaaaaatcttagtctactgctaactgattgctaaggaactgattaaaaccaatgactaaaatgagaaaaacaaaagttgtataaactaaaatcttgaaaactggttcaactgaagtatggcaggcaatcataaacctactggaatgttgagatttcatgtgagcctaaatgaagcccagtaataatgtattttatactccccggttcccaaaggctgaaaactgggatctaccttaggaaatgtgaaattttacattttcttgaatgaaagagttaaatatatatagcatgaaatagccaatcaaattgaaatacgttgttttctagggggaaatttgcaaagaaatgtatttaggcatgagggtcctgttaagagagcctcagtattaggaatcagaggtggcagaggtagcctttttaattggctgttataagcatacaagataatggtaagtttcaagatcaagtcttaaacctgagctcaaaaagttagagaacagaaataggagaacaagaaaaataaagttgccctttcagttcaacctttttaacagtagcagtgttttgtcagttttcttttggaagtttgtatctacctgcagtgcttggtaagaaaaataacctgggcgacagagcgagactccgtctcaaaaaaaaaagaaaaaaagaaagaaaaagaaccattcctacccccagacattgttgacctggagttgtcatcctttgatgcaggttatgacacacctccgtgtgatttatgagcgcatgaatcagtctctctccctgctctacaacgtgcctgcagtggccgaggagattcaggatgaagttggtaagtaagctgttcttttgatgctgcacatggacatgtattttcccccagaggaaaattgaggaagtgagttatctgtttgaggaatatggaagttaatagaacagcttgccttttacgatgaaactgtcaggctggaactagcttactagccttagcaattgaatcagttcttacctctccatacttgtaagactggaggaatgtcgcctgacttagggtatagttttgtaataattggacacttgttattgaattatacgtggcagcattttttctaatttgcccaatcttgttatggctctcaaattatgatgctttggtactttacaattaatggggaaaaaaactcattcttcatcttttgagtgtcacgattgttccatcttacaaatgaaaaagctcaaacttaaaatttgagtaacttactggcctgtgtcacatgcattataagtagcacagccaaaacacataactgtgacttgtgactttgaggttattgttatattcagtaagtcacaattctctttgatggctgagcagggaagccatgagtgttctctgaaccacatcattgtttaaacttaaaagatagtgggctattaaacttatattctgaaataattgtactctcacaagaacttggaaaaatagtacagagaggtctcatgcatccatcacccacatgcctcaccagtgacatcttacgtaactatagtccattatcaaaaccaggaaactgaccttgtgtgcccactgtcttttatgtccctagttttcctaatgactaatgatttcatttaagatctctcatttctgtttctcttggaaagagaatcaaataccacatgagtctctgtcagctgccaaaatgcccataactgtttaacttacttcacaaaggtacatagatgacgattatgttggtgcatctttcaatataagcatatgtacctatactggagatttagtgtgt

SEQ ID NO: 978 - DNA, 6000 bp, Homo sapiens
tgaggcctggggagtcctcagagcctcctttgctactctgttattgtggcaggccaaatctcactaatgcaggcctccgtaacagctgtttccgtactgactgagtggttcagttaaatactaaaagctaaaaaaaagccagcgcccttatacagaggctggaatgtaacaaaagcccaccaagagttttgcctaggcctttcctggcaaaaccaaggaattcttaacaggacccatttaggattaacaagttttactgggagtctgaagaaactctacaggcctccaagaacaagtttactggaggtctgcaggaactcctcaaacctccctgatttagcaggagacaagataagagtaatcaccccagcacctagacccatttagattaagtaaatttactgagactccagaggaaggtcttcaggactcagaccttagttatggattaaagaagttaatcacttctgtcatgagatgaatgcacacttacacgtagacatacagcttagaaggcatataagttctggaaactttgtaattttgagttggtctggcactaatttccaggccatctccctgtaaaaggttacaaaaataaaaactctcttcctcccagttcatctgcatctcgttattgggctgtgaggtatagtagcccaaccctcagttcagtccgggaacattattatcaaactctggggattttcaggataagttaggaatatattttgaaggagaatggcagtattaaatgagatcagcaattgaaaacatgtgaatacattcaccatttaattacccatctcaatagaagataaggatgaatttagcactagaaaccatgaatgtcacaaaagcctaactttaataccttgaatcactttccagtaatcctaatcctttatccacatggatagaggacattcctatcttgctctttcttctccccacacattagcttaataattagctaaataatttcatgcattagctaaggaataatggaactccagaaacctaggacagtaattgagagactgaacaagctaaatctgaaccttctgcacaattaaaggagctgatgttagcatggcccacagaatattacctgcacttgtaaaaactagaaagtcaggcaagtactcctggaacagactgtcttttctaaccatgcacttatttctttgtttttaactttgtttttgtttgtttgtttttgagacggagtctcgtcctgtcgcccaggctgtagtgcagtggtggaatctcaggtcactgcaagctccgcctcccaggttcaaacaattctcctgcctcagcctcccgagtagctgggactacaggcgcccaccaccatgccttgctaatttttgtatttttagtagagatggggtttcaccatgttggccaggctggtctggaactcctgacctcgtgacctgcccgcctcggcctcccaaagtgctgggattacaggcgtgagccacggcgcctggcctgtttttaacttcgtaagttgctttgtagaactatcttaaacttggtctattttagattctccttgaagggccagatcacaaagtgattaggagaaggaggctctggagccaagacagtgagactaacccattcttcaaatctaacactaactagctgtgtaaccattgggccagggatgtagcctatgtaaccacaatctcctttgtgcttcatgcctcaccaataaggtggggagagctgctatgactctgtcatagggctgagacgaagatttgatgagttaccagcaaaaagcatttaatatactgtctcattcagaagcagtcaatacacattgaactcttattacttagaggaaagaaaggggtcgatgatttatagataaggcctgagtgaaagaaataaatgtgtattgagtatcagcaatggactacgcatcattctgggtaactatcactgaacacatttaatctgcaaatactatctgaaagatactgccatctgaattgcataggtgggaaaagtcaaggcttttgtgcttatttttaaatgtatgttaacatgaataattaattggccgtgcactggtcgcacgcctgtaatcctagcactttgggaggccaaggcgggcagatcacgaggtcaggagatggagaccatcctggctaacatggcgaaaccccgtctctactaaaaatacaaaaaaattagctgagcatggtggcacgtgcctgtagtcccagctactcaggagactgaggcaggagaatcacttgaacccaggaggcggaggttgcagtgagccaagatcacgccactgcactccagcctgggagacagggcgagattccatctcaaagaataataataataataattagtgggaatatatgctgtttgttgtgataggagaagaaaaggggagatccagatgttggtcatcagaaatgacctgcatcttctctaaattgaaatttagcttgaagtagtaatgccaaggccagcctggggccatggcatcctggtgtacctgcttgttggtgacagtccttttaggacaaaatatcttacaaaaacattcatagatgactaactggaaaaaaagaagttatgatgaaaagcaattcttactgtttttgttttttgttttttgttttttttaattaaaagacaggcagttattctctttcccaggcttgagtacagtcgtgcaatcagggctcactacagcctcaacctcctgggttcaaataatcctcctgaccaagcttcccaagtagctggaactgcaggcatgtgtcactgcacctagctaatttttaaaattttcttgtagagacaggttcttgtaatgttgtccaggctggtctcaaactcttggctgcaagtgatcctcctgcctcagactcccaaagcaatccttacttttttaattgaagtgctttttttttttcttatttaaactcttaaaaattcatcccattttcttcaaaacaataaatcctttacaagggagaaaaatgaaatagagcaactaagaaagcatccatgaaggccaggaaggaacatcatggttaaatgcgattagtcacagccccttctgtctccagtcttggatgaataatggtaacagaactagagagatttctaagaccttggtgcttaataacaagcaagcatcgagggtggttgtgcaagatcctgatcacacaactctgcatatcaaatatccttcacaatcaacaagagtcagcctttaatctctgatgttttcaaatgttctttttttttaattcacatgtataacctatcctcttttcaatatatagagatatagcttatcagtcattacctcttttactacttttcttctgagatttaaaaggtcatcctctgatttgtaaattcaaccagatttcacagttcagatgagagttgtaataagttgccaagaactgttgcaagctgtgatggctgtctttctggggattatagagaagcacatttcttttaggaaaaaagaaggcagatgagcccaagttgttttatttttattgtgtatatgtatttgttttctcaagtacagtagcatggcctctgtggcaggcattcaccaagcaaatacagagcaccctctgggtcaagcactgtgttattggggttccaaataaagaaaaaagaccaaatccagccctgtggatctcacattaaagaggggagtaagaatcatagataatttaatgagttaggtacattaatggggatttgcacagtatttcataggagcacagaaaaagggtacctcgttccacctgagatggcagggagatggctcctaagttaactaagcaaaaggggaaggagaggcacatcccataggatatggataacacaacaaaagctccattaccacccgccccaccaccacacacaccatctctggaataaattttgtaccttccaactggttttcagggtactcatgacacatgggttaataatagctaggtttgcccaaatgaccaaaattctattcccaacatgaattttcacaactggtttttttgtttgtttgttttaatgaagaagaaatgttgtgtttttggaaatcatcttacaaaatcatgtagtggaatgcatatagtgatgaaattgttgaagaccagggaatctttgtccttagtttttattaggatggatgttttcaggtaaaactaaaataaaaatgaaatggaaccaattagaaagaaaataggagcacttaagacgaaatgtaattgttgctgaaagaattagaatctgatagcttagaaagaacttaattaaatttcagagtaaaataaatacagtttagcaatggcctttctcctagaaaaatataatgtctcttacagttcagttactccttggcttacaaaatagtggttaaatttcctgtttttctcattttgatttcgtatgttacatgttactggtgatgggattatctgtgtgacattacctctggtcttcaaaatgtacacgtagcaatgtagtctcacatatgccccttgggtgcgaaaagagaaggacctaacttaacctgacagacctcaaatctgttctctttctatagcagagtactcctatttaaaaagaaaatgttgagtaaggaggacagtcatcatatatgtcgagaatgttaaatgctcttgtggaagtgaaaagcagccgatctaagtaattacccattaagaaaggagtaggagaaatgtttagaaggcagacctgcaaaaaggtgactcacagtacgttcacatgaccggatgcattagtggaacctctaacccatcgccaatggaagaagcagtgttttgcacaaacttgaaaaagagtttttcattttcctcccacagcctcgtcacgtgttcaatatgctaaagaagtatgtccgcgcagaacagaaggacagacagcacaccctaaagcatttcgagcatgtgcgcatggtggatcccaagaaagccgctcagatccggtcccaggtaagcgtggggtataatcatcttctgcagctttgacaatccaggattcttgcttcttgggttggtgacaggatcccacgcattctccgagcacctataggtgttttccctatggcaagagctctttaacttctggtaaattctaaaagcttgtcttagagcaatatgtggtttggcattttctgagttatgaaaataacaaatgtaaaaatcttagtctactgctaactgattgctaaggaactgattaaaaccaatgactaaaatgagaaaaacaaaagttgtataaactaaaatcttgaaaactggttcaactgaagtatggcaggcaatcataaacctactggaatgttgagatttcatgtgagcctaaatgaagcccagtaataatgtattttatactccccggttcccaaaggctgaaaactgggatctaccttaggaaatgtgaaattttacattttcttgaatgaaagagttaaatatatatagcatgaaatagccaatcaaattgaaatacgttgttttctagggggaaatttgcaaagaaatgtatttaggcatgagggtcctgttaagagagcctcagtattaggaatcagaggtggcagaggtagcctttttaattggctgttataagcatacaagataatggtaagtttcaagatcaagtcttaaacctgagctcaaaaagttagagaacagaaataggagaacaagaaaaataaagttgccctttcagttcaacctttttaacagtagcagtgttttgtcagttttcttttggaagtttgtatctacctgcagtgcttggtaagaaaaataacctgggcgacagagcgagactccgtctcaaaaaaaaaagaaaaaaagaaagaaaaagaaccattcctacccccagacattgttgacctggagttgtcatcctttgatgcaggttatgacacacctccgtgtgatttatgagcgcatg

SEQ ID NO: 979 - DNA, 6000 bp, Homo sapiens
agtcaaatcagccttcagagagcctatgaaatactgattttcaatgagaaagtaggtttgatgagggttggagagtgcaagaaagtgaagtaagctataaaacgtagaattagtcaatgttggaatgactatgcagtctttaggatactttttagcactagaagaaaatggaataggatgtcttttttagaagacttgaaattgctgcttcatcctacttattcagtccccatggacatatgtgtttatgatggcagcatttccaggagaaagtggaatctttggaacaggaagcagccaacgagagacagcagctggtggagacacacatggccagagtggaagccatgctcaatgaccgccgccgcctggccctggagaactacatcaccgctctgcaggctgttcctcctcgggtaggtctcgctgcagccgagttcacacttcaggtcacagcacagacagtaagggtggggcactgggaactggaagccatacaaaaagaatgaggagaaatgccttgagcactgttattcagaggttcaacccctgtccattccatcttgaaggtcaaagggtcacagggcagctacctccacaaggtcatctctacacagcaggtactcacacttccccacagagcagccagacaggactcccagggactcacattgcaagccctgacttgatttaatattcctgaggtggtgacaattgatggcatagttcaagttcgaacacaaaagctggaaggatgtcttccagtcccttcaggctgctgtaacagaataccatagactgggtaccttatcagcaacagaagtttatttctcacagttgcagaggctgagaagtccaagatcaagacatcagcatacttggttgtctggtgaaagtttgcttcctggttcatagaacttaaattttgtttatcttttatttattttatttttgtttttgtttgtattttgctgtatcctcatatggtggaatgggcaagagagctctctgggccctcttttataagggtactaatgtcaatcttgaaggctctgccctcatgcctaattgtctcccaaagctttcaccctcaaatagcatcacactgtggcttaggtttcaacatatgaattgggggtgggagagacacaaacattcagaccatggcaaaggattttagaagtaaccttgcccagccccctcatcatgtaagtataataatataactaaggtcaaggaaagttgagatttggctgagttgtaagaatttttagtggaccagaaagaattagaactcaaatttccatctcagagcagtggccatattctctgtggggaagcatttgtcagtcatgacattagcaatgatgagacttattcatggttttcagtgatcattgccccaaaaaggcatgttgagtggtacaggcatagatgtgttcaccggcattctgtgggagagcttacttggaatggaaggaactttctgagcatgagtgtgtaacttatgtccacttgttctttttttttttttttttttttaaatgagatggagtctcactctgtcacccaggctggagtgcagtggtgcaatctcagctcactgcaacttctgtctcctgggtttaagcaattctcatgcctcagcctcccaagtacctaggattacaggtgagccacgacacccagctaatttttgtattttagtagagacagggtttcaacatgttggccaggctgatctcgaactcctgacctcaggtgatccacccacctcggcctcccacagtgctgggattacaggcgtgaaccaccatgcccagccatttgttctttctgtttgtcattgagcaagggatattgaaagctctgcctgtgattgtggaccgggccatttttctaaacagtgctatcagtttttattttgtatagtttgaggctgtgtttttaggcgtgtaaatgttccaggctgttaggccctccttgagcctcttcttatgaaatgatctttttatcctttgtaatgttttgctccaaaatctactttaatattaataaagctattccagctttcttttgattaatattaatgtggtgcatttttccatccttatactcttattgaccttgtttgtctttatatttgaagtgtattttttgtaggcagcatgtaattgggtcttgcgttttcctttggattgggaagaccatgtacactgaatgaggttatggatatggttgtcactgaatctgtcatcttgatatttgtttgctatttgtccagtctgttccttgttcttcttttttcctcttttttttttggattaattagaaattttttatgattctattttatctcttttgttggtttgtaagttacaactagtttgttattttactggtttatctcctttgtgggtttataagttataactagtttgttattttactggttgctttaggcttatagaaaacattctaaacttgtcacgatgatgttatgtcagttcaaatgatattataccactccacagacagtactttacaaaagtacttccatttttcatctctctctctctctgtaagcggttgttgtcatactttttccttactacattgttgatgtttttctttaaacagttattttttaatgagttgtaaatttaaaaaaaaaacaacatgtttacccatgaagtcatcattttgggtgctgtaaactctttgcgcagatccagctggtatcattttccttctgcctgagagatttcctttaaaatgtcttagagactgggcttggtggcttgtacctgcaatcccagcaactcaggaggttgagataggagatcacttgaacccaggagttcgagactgcagtgagctgtgattgcatgactgtactcccatctgggtgacaaagggcatcctgtctctttaaaaaaaaaagtttgagtgcacataagttggtgatgaaatctttgtttggctttgaccaaaaatgtcccttttatacctttggttttgaaaaatatttttgctgggtaaaaaatactggattgaggtttctctttcactgcctgaaagatgatactctgctgtcttatttgtgttgatatctttatctttatttctctaaaaataacatgtcttttttttctgtttttacagttttctctatatcactggtttttaacaatttaattttgatatgccatggtatcattcagtctgcccttaattccatctggccgtttttcatcttatcacctcacatactgtagttgttgtatatagaaatttaacctgggctacccccaacacccataatatcgtctgtatcttaacttttgaacctatggaatacagttattatatgaaaactgtttaaatatccatgtttgctaattctaacatctctgtcaactttgaatcaattttgattgcttattattacatgtggcatttccctgtatcattttatgcctcataattttttattaaatgtcggacgctgaatttaaacctgttgaatgctaggtgtttttgtaatattcttgagcttttttctgtcacatagttgagttacttggaaacagtttgatccttttgagctttgcatttttagatttgttaggtgggatagaagcagttatcagcctaggactagttattccttactagtgaggcaagacccttctcagtcatctaccatgaatgttaagttttctcacctgactcgtgggaagaggcattattcctgtccctgtgtgaacaccaagcactgttaatgctaattctttttggtgattttccccctggcttcagtttctttcacatgcatgtacccatcattactcagctatattctcagggatcactctgcacatctctggattctcttttggagcaactctctcctcaccaataccctgtcctgtgaattacaactaccttgatctctccacacacttcatgtcctccactccacgagtcctctaggctctgtgtgggtttccccacctgaaaccatgacctggaaattcagggccatgagtttggcagctgtaagtcctcatttgtttccccttttcaggaatcagtgtccttcacctgatgtctaatgtcttgcagaaatgttgtttatgccaggtgtggtggctcacgcctgtaatcccagcactttgggaggccaaggcgggcggatcacgaggtcaagagatcaagaccatcctggccaacatggtgaaccccgtctctactaaaaatacaaaaaattagccaggtgtggtggcgcacacctgtagtcccagctactcaggaggctgaggcaggagaatcacctgaacctgggaggcagaggttgcagtgagccgagattgtgccactgcactccagtgtggtgacagagcaagactccatctcaaaaaaaaaaaagaaacgctgtttgtatatgaatatattgtccagttattggtggttcaggcaggagggtaaatccagttcttctcactcaatcttggctggaattgtttgtgcattttatgcaacttaaccagaaagtcacccatttgcaccgattttcctcaccattttgatttttctttctatggataaagttacagtgcacagaaagccatgaggagccgttaaagagctcgtggcattcttccaagacgtaagatactatttaccctgttctaccgatgatatcactgcaacctcgggagatggagcggctggttcagggtgacactgctgggaagggagagggtagagccgcgagtcactgtggtgccttctcactagaacgagcttcctctctaaacaaagagcttttgaaaaagaatattcatattagcgttttcattttctatttgccaaaattctctatcttagcaaggcacttgtcaggaaatttttttttatatctctgcagaacaaaagttccttggttcctctcttttttggagaacacgctttcaggagaggagccgtgtgatcatttgccagagaaggataggctggtgggtgctgagaccagaatctttatagcagaaacttgtgaagcgttccagctgaaagtccaatctctaaagtaagatctttgctaaatggacattgatgggactaaaaataagctgagggctgaatggaggctttaacaaatgtacatttaaactctcagtttagtctcatcagccatcacaggaaaggcagtggcaagaatgtttgccgaagtgtcatcttttatcaaaggggataattttagagtggttgtaatcgtgcttattgtgggcctccgcattgcttcatatggaattaggcaacatgttcatttgaaaaaaaaattaaaaactggattaggaagaaatattttactgtcaaaaatcagatcactgttgttgattgatctaaggattcctgttaaattcttaactcggatttatttatttatttatttattttctctctctctctctctttctctgtttctctttctctcctgccttccttccttccctccctccctccttccttcttcccttcctttcctttcctttccttttctcttcccctcccctcttctcttctctaatcttctcttttcttttctcttttcttttcttttcttttgttttcttttcttttcttttcagggtcttgctctttcacccaggctggcatgcagtggtccagtcgtagctcactgcagccccaacctcctgggctcaagcaatccttttgcctcagcctcatgagagttgggtctacagaagctccaccatgtgtggctaatttttaaaaaatttttgtaaagacagggtctcgctgtgttacccaggctagtcttgaacttctggcctcaagcgatcctttcacctcggctttttaaagtgctgatattacaggcatgagccaccatgactcacctttaaatctttcctttgtaataaaatgtggctgggtggtcacaggcctggagtctagggggcattacttgcc

SEQ ID NO: 980 - DNA, 6000 bp, Homo sapiens
gggcttccctttgcccttggcattgagttcttctggaaatgccctcccactcttcttcacgctgacacatctcacccattccttacaccccacttcatactcagaatgagacaggcagtcattgctcttacctttcatttaattctaaatatttgctccccggttttgttagtgatttctggacacacctgcattatctttccaagctggatagaaaccttgagacctcaagtcatgaagcctgctacctgcattcatcgtggacccactgtagcattttttttaatgtgtgtttttttaatcctggattttttctcctagtatatcttgttcatttttgaccttattaagaaaacttatttcaaattctctgttagttttagatgtgacaggtcttctttaaaataataatttaacttttagcacatctgtgtaacttgtgacttagttcatgattttgtagattttgttcatcttttagtcatcagatatatctgatataacctaagagatgttgtcccagagcagagaatgttgtctactagattccagtggtcataggaatgtgagacacctgaaatcaatatgtatcttcatagtctgtggtgctgaaatctagggacttttcaactttaaacttgcctgcctcttaaatctctacttagtagtagtcattttctctgcatgaaacagccaagtctttgaagattgataaatccaaatgaaattgatacctttgtgcctgcagtggaaaattgctttataagaatccatagagccactgcaagggccaggtcctgagaattttaaattttaaaaattgtgcggttttttaaattaagttttattgtagtttttgttatatgttttcttacaaatacagaggattttggaattttttcatattttggtttgttgttgccattgtggagtataactctaaacctgtagatttttgttgctaaacctgtagatttttgttgctatatgtcgtgactagcatctagtcaaatagaaatctacagctgaaccatgtgtgagcacttttattacttataaacttactacttttagtatatgcttaaaatgaagtccttcaaattgaaagctgacccaactcataggtttttatttcttatcttttttggagatggagtcttgctctgtcacccagctggagtgcagtggcacaatctagactcactgcaacctccaactccctggttcaagcgattctcctgcctcagcctccccagtaactgggattacaggcacgtgccaccacgccgagctaatttttgtatttttagtagagacagggtttcaccatgttggccaggatggtctcgatctcctgaccttgtgatccacccgcctgggcctcccaaagtgctgggattataggcatgagccactgtgcctggcctaggtttttatttttaagataagcagcaacattttaagagcgcccctttctcctgtcactaaatataaataaacttagctcacctaatgaattttttattttataataaaaaattgggtaccacagggtacaaaaacatgatctttagagccacagagatcttggtttatattcttccctctcccttttttacctgcatagcctcgagctggtaccttaacctggttcgtaaaatgggatggccctggctaatctcacaagctgttgtgaggaatcaattaaattagatagattttgtaaagctcttaatacagggtcagcagtaatgctacttgttatcagtcccacagtgaaattcactgttcacagggagatggtcagcctacatatagtgtgtattcatttgcagtagagtcttagtgggatggtgcaggtgatttgtttatttgtgggggtataggatattgttaaattgttctgaaaatcaaaatgtgagttaatttctatagtaatgcttatttgcaactcattagctaaataaatctctttaattatttcatggattcccccagcttaaagcttaaagtccagtttcttaaagtgtatgaggtaaaatggaaaaaatgtaaatgtaatatgggaaatcagttctcacattgcagtagaacattgaacttctatctcaaactaattttgagattccttgcttgaagaattgttggtagagtaccaccactgtgaacattcccaaagcaggaaattgaaatatttatattgcaaggcttatctcatctataaagcaaagatggtcttccatttcccccttgcccacaggttccctttattaacgtggtagaagcaccaaagcagatgggacaatatgtttcttttcttccatgttctattcttgttcattgcagcagggcatttgtcccaattttgctgtgaaccttgagattatttttgatatgcttttcaagtgtaatgaaatatttattccatcttgtttcctccatggttttacaaaaacaacaagaagaagctaattgcctatcatatacaaagaatgaatgccaatggacaataaaatctgtaattaggaacccacatggtgatttgatatagtattgtctcatagaagtcttctatctatagttatttattccaagcctctttttctttcccatcttgaagtatgttagaagagtctattccttaaggctaagtacctacaaaaaacaggctcttataatacagtaatcaagttttctcatgctttgggagtacacagagtatgcaagtacacatctggcaccaaaccaatattttgtttccttgatctttcttcattttacctagttcagagttgcacttcaaacaaattctacttgtcatacacttgaaaaggcagctgtaggtggtaggaagttaatattttctttgaacaacatacagaggtgcagacttttactttttgtatcaggttaatgagtgaacttctctcagggaaatccaggtgaacatcaaagttgagagcaggaagcattgatttcctacaaaacacattcacctgatatcttagtcagtttgtgttgctataatagaataccccagcctggataatctgtaaagaaaaagaagtttaaaattcggctctcagttttgcaggtggggaagtccaagaacatggtgctggcatctgttgaggacttccttgctgtatcatatatggtggaaggaagaagggcaagaggagggcaaaactgagttttataacaacccacttctcacaataacaaacccactccccccataatgatactaatttactcatgaggacagagactgaatcacctcttacaggacttacccctcaacattgttgcactggggattaagtttccaacacatgctttttaggggttacattcaaaccatagcagttggttactaaattagtgctacttgtaaaaaaatacatgtttgctgcattcagaatattacatgttttcttggagtttttggaaggacttagcgtaatccttgctgttcatgacttaggttggcaagctcaaagggccttaattccccatcagttctttaaagggggataggtcttaggatattagacagcagaagtcttctttttcttcccccattatgtactgctttttggcattgtattcatgacacacacacacataaaatgtcatattttctttaaagtcaaaatatacagtttaaaatggtttcagttgctttcataagagagtaaaacttaggtgttcagtttaatattggaagaccttgttcagttaatgtgtgccttccatgaatagttggtatttgttcacatcaaatcaaatgactgtcagttctcggggtaaaaaaagaccaaccttgactcaaaaagctatattcctgcaataaatatgaacatttatgtttaatatactgctgtgattaattatttatatcctagtgggaggtcaaatattcttcagataggaaggggtatgtaataaattttttaaatatctaaaatgacaaaaatagaggaaaaacataatcatccatcctattaagtctgtattcaaaggatgaactgatgattttaaattcaaatgtttccttaatttataggtcatgagagaatgggaagaggcagaacgtcaagcaaagaacttgcctaaagctgataagaaggcagttatccaggtaaaacctgaacccatttcctaccaaacatcacatgccagcagtctttttaatgagtgtctgcaggtttacctttatctgccagcacctcacgtgtgattgttcatagtcccatgaacttcagctgttcttaatcattgtctagtaattgagttgtttaaatcctgccttatatttgctcccaattatttcaagttataattcattgccataaaactcacattgtaacttgcaatctactttttattaataatacatcttttcagtcaccacaatcttctgctgcttctccctccagcaaaaattatgagaatttgaatttttgatggaaaccagtctcaaaattaccttaagtaaaccaacagtttattatggtcaattacttgaggtactgttagtaagagagggatttttttttaatatgtaatataagagtttcaagagtgcatatatttatccaaagttattagtcaaatcagccttcagagagcctatgaaatactgattttcaatgagaaagtaggtttgatgagggttggagagtgcaagaaagtgaagtaagctataaaacgtagaattagtcaatgttggaatgactatgcagtctttaggatactttttagcactagaagaaaatggaataggatgtcttttttagaagacttgaaattgctgcttcatcctacttattcagtccccatggacatatgtgtttatgatggcagcatttccaggagaaagtggaatctttggaacaggaagcagccaacgagagacagcagctggtggagacacacatggccagagtggaagccatgctcaatgaccgccgccgcctggccctggagaactacatcaccgctctgcaggctgttcctcctcgggtaggtctcgctgcagccgagttcacacttcaggtcacagcacagacagtaagggtggggcactgggaactggaagccatacaaaaagaatgaggagaaatgccttgagcactgttattcagaggttcaacccctgtccattccatcttgaaggtcaaagggtcacagggcagctacctccacaaggtcatctctacacagcaggtactcacacttccccacagagcagccagacaggactcccagggactcacattgcaagccctgacttgatttaatattcctgaggtggtgacaattgatggcatagttcaagttcgaacacaaaagctggaaggatgtcttccagtcccttcaggctgctgtaacagaataccatagactgggtaccttatcagcaacagaagtttatttctcacagttgcagaggctgagaagtccaagatcaagacatcagcatacttggttgtctggtgaaagtttgcttcctggttcatagaacttaaattttgtttatcttttatttattttatttttgtttttgtttgtattttgctgtatcctcatatggtggaatgggcaagagagctctctgggccctcttttataagggtactaatgtcaatcttgaaggctctgccctcatgcctaattgtctcccaaagctttcaccctcaaatagcatcacactgtggcttaggtttcaacatatgaattgggggtgggagagacacaaacattcagaccatggcaaaggattttagaagtaaccttgcccagccccctcatcatgtaagtataataatataactaaggtcaaggaaagttgagatttggctgagttgtaagaatttttagtggaccagaaagaattagaactcaaatttccatctcagagcagtggccatattctctgtggggaagcatttgtcagtcatgacattagcaatgatgagacttattcatggtttt

SEQ ID NO: 981 - DNA, 6000 bp, Homo sapiens
actaatcagtcctaaacccgcctaccctgcttcgctcattctttccatgaaaaccacaataaaaggctcttgctcatgttttcccctcctgaccaaccctggtgcttcccatatgaccctgcatgtagtggcatgtaccggcttcttgggagctgagtaacaaactgtcttttccatgataatcatctcctgacctcttggcctcacctgaataataagaaaatctacccttgaaaacataaaactaatagtttatctagaaaggtacaacacaggtactgttttttgtttgtttgttttgttttttgtttgtttgttttgccttaagatgaataacaatacttggatctactttggtataataacataaagaggaaaaaagccttataatcacagtacttttggctctggaatataatgtgcagttctagtggctgcccacgatgaaaacctaacagctaattgaactagaaagctagccacagggaattattaagttttcacctgatgccaagaaaatcagatctttccttaggaaagacacaggcactgttcggaaagcattggaggactatgaatcatacttattgccactgaaatgtcctcatttgaatttacatcctatctcccttctttatgaagctttcagaggcttcctgtgccctcacaaatccacttctgggcacatgaagtcgtaaaaaaagaacaatgacaaaaataaacaccgaatgctcagcttgtcattttcagcgcctaccactgtaccctgactctggtcttcctaccacctcttccttctcaactgctacccttgctttctgtacagcgttaagctgctgttctgatcaggccactctgctcatcgtctgttcatctcatcttgggcttccctttgcccttggcattgagttcttctggaaatgccctcccactcttcttcacgctgacacatctcacccattccttacaccccacttcatactcagaatgagacaggcagtcattgctcttacctttcatttaattctaaatatttgctccccggttttgttagtgatttctggacacacctgcattatctttccaagctggatagaaaccttgagacctcaagtcatgaagcctgctacctgcattcatcgtggacccactgtagcattttttttaatgtgtgtttttttaatcctggattttttctcctagtatatcttgttcatttttgaccttattaagaaaacttatttcaaattctctgttagttttagatgtgacaggtcttctttaaaataataatttaacttttagcacatctgtgtaacttgtgacttagttcatgattttgtagattttgttcatcttttagtcatcagatatatctgatataacctaagagatgttgtcccagagcagagaatgttgtctactagattccagtggtcataggaatgtgagacacctgaaatcaatatgtatcttcatagtctgtggtgctgaaatctagggacttttcaactttaaacttgcctgcctcttaaatctctacttagtagtagtcattttctctgcatgaaacagccaagtctttgaagattgataaatccaaatgaaattgatacctttgtgcctgcagtggaaaattgctttataagaatccatagagccactgcaagggccaggtcctgagaattttaaattttaaaaattgtgcggttttttaaattaagttttattgtagtttttgttatatgttttcttacaaatacagaggattttggaattttttcatattttggtttgttgttgccattgtggagtataactctaaacctgtagatttttgttgctaaacctgtagatttttgttgctatatgtcgtgactagcatctagtcaaatagaaatctacagctgaaccatgtgtgagcacttttattacttataaacttactacttttagtatatgcttaaaatgaagtccttcaaattgaaagctgacccaactcataggtttttatttcttatcttttttggagatggagtcttgctctgtcacccagctggagtgcagtggcacaatctagactcactgcaacctccaactccctggttcaagcgattctcctgcctcagcctccccagtaactgggattacaggcacgtgccaccacgccgagctaatttttgtatttttagtagagacagggtttcaccatgttggccaggatggtctcgatctcctgaccttgtgatccacccgcctgggcctcccaaagtgctgggattataggcatgagccactgtgcctggcctaggtttttatttttaagataagcagcaacattttaagagcgcccctttctcctgtcactaaatataaataaacttagctcacctaatgaattttttattttataataaaaaattgggtaccacagggtacaaaaacatgatctttagagccacagagatcttggtttatattcttccctctcccttttttacctgcatagcctcgagctggtaccttaacctggttcgtaaaatgggatggccctggctaatctcacaagctgttgtgaggaatcaattaaattagatagattttgtaaagctcttaatacagggtcagcagtaatgctacttgttatcagtcccacagtgaaattcactgttcacagggagatggtcagcctacatatagtgtgtattcatttgcagtagagtcttagtgggatggtgcaggtgatttgtttatttgtgggggtataggatattgttaaattgttctgaaaatcaaaatgtgagttaatttctatagtaatgcttatttgcaactcattagctaaataaatctctttaattatttcatggattcccccagcttaaagcttaaagtccagtttcttaaagtgtatgaggtaaaatggaaaaaatgtaaatgtaatatgggaaatcagttctcacattgcagtagaacattgaacttctatctcaaactaattttgagattccttgcttgaagaattgttggtagagtaccaccactgtgaacattcccaaagcaggaaattgaaatatttatattgcaaggcttatctcatctataaagcaaagatggtcttccatttcccccttgcccacaggttccctttattaacgtggtagaagcaccaaagcagatgggacaatatgtttcttttcttccatgttctattcttgttcattgcagcagggcatttgtcccaattttgctgtgaaccttgagattatttttgatatgcttttcaagtgtaatgaaatatttattccatcttgtttcctccatggttttacaaaaacaacaagaagaagctaattgcctatcatatacaaagaatgaatgccaatggacaataaaatctgtaattaggaacccacatggtgatttgatatagtattgtctcatagaagtcttctatctatagttatttattccaagcctctttttctttcccatcttgaagtatgttagaagagtctattccttaaggctaagtacctacaaaaaacaggctcttataatacagtaatcaagttttctcatgctttgggagtacacagagtatgcaagtacacatctggcaccaaaccaatattttgtttccttgatctttcttcattttacctagttcagagttgcacttcaaacaaattctacttgtcatacacttgaaaaggcagctgtaggtggtaggaagttaatattttctttgaacaacatacagaggtgcagacttttactttttgtatcaggttaatgagtgaacttctctcagggaaatccaggtgaacatcaaagttgagagcaggaagcattgatttcctacaaaacacattcacctgatatcttagtcagtttgtgttgctataatagaataccccagcctggataatctgtaaagaaaaagaagtttaaaattcggctctcagttttgcaggtggggaagtccaagaacatggtgctggcatctgttgaggacttccttgctgtatcatatatggtggaaggaagaagggcaagaggagggcaaaactgagttttataacaacccacttctcacaataacaaacccactccccccataatgatactaatttactcatgaggacagagactgaatcacctcttacaggacttacccctcaacattgttgcactggggattaagtttccaacacatgctttttaggggttacattcaaaccatagcagttggttactaaattagtgctacttgtaaaaaaatacatgtttgctgcattcagaatattacatgttttcttggagtttttggaaggacttagcgtaatccttgctgttcatgacttaggttggcaagctcaaagggccttaattccccatcagttctttaaagggggataggtcttaggatattagacagcagaagtcttctttttcttcccccattatgtactgctttttggcattgtattcatgacacacacacacataaaatgtcatattttctttaaagtcaaaatatacagtttaaaatggtttcagttgctttcataagagagtaaaacttaggtgttcagtttaatattggaagaccttgttcagttaatgtgtgccttccatgaatagttggtatttgttcacatcaaatcaaatgactgtcagttctcggggtaaaaaaagaccaaccttgactcaaaaagctatattcctgcaataaatatgaacatttatgtttaatatactgctgtgattaattatttatatcctagtgggaggtcaaatattcttcagataggaaggggtatgtaataaattttttaaatatctaaaatgacaaaaatagaggaaaaacataatcatccatcctattaagtctgtattcaaaggatgaactgatgattttaaattcaaatgtttccttaatttataggtcatgagagaatgggaagaggcagaacgtcaagcaaagaacttgcctaaagctgataagaaggcagttatccaggtaaaacctgaacccatttcctaccaaacatcacatgccagcagtctttttaatgagtgtctgcaggtttacctttatctgccagcacctcacgtgtgattgttcatagtcccatgaacttcagctgttcttaatcattgtctagtaattgagttgtttaaatcctgccttatatttgctcccaattatttcaagttataattcattgccataaaactcacattgtaacttgcaatctactttttattaataatacatcttttcagtcaccacaatcttctgctgcttctccctccagcaaaaattatgagaatttgaatttttgatggaaaccagtctcaaaattaccttaagtaaaccaacagtttattatggtcaattacttgaggtactgttagtaagagagggatttttttttaatatgtaatataagagtttcaagagtgcatatatttatccaaagttattagtcaaatcagccttcagagagcctatgaaatactgattttcaatgagaaagtaggtttgatgagggttggagagtgcaagaaagtgaagtaagctataaaacgtagaattagtcaatgttggaatgactatgcagtctttaggatactttttagcactagaagaaaatggaataggatgtcttttttagaagacttgaaattgctgcttcatcctacttattcagtccccatggacatatgtgtttatgatggcagcatttccaggagaaagtggaatctttggaacaggaagcagccaacgagagacagcagctggtggagacacacatggccagagtggaagccatgctcaatgaccgccgccgcctggccctggagaactacatcaccgctctgcaggctgttcctcctcgggtaggtctcgctgcagccgagttcacacttcaggtcacagcacagacagtaagggtggggcactgggaactggaagccatacaaaaagaa

SEQ ID NO: 982 - DNA, 6000 bp, Homo sapiens
agctaaggatattgaaccctgtgttttgtctcgttttaagtctaggtttttgtggaggggggaacatacctagccagcttgcttgcagaaggcatgagtgagcaggctgaaggagggacccaaggccagaacgtcctccatattctagctccatgggctctttcacttgatccctgctttatgacccaacttctgttgaaggatttgccagatagtgtttggggcaggaacagctgtttcatagaaaacaagccaacggacatcataacaaagcatatggttgttttgccaagttgtgctgctcattaacaaaacaaaacaacaaaaaccctttacagtgccccagcatgtggatggattggccctttactactctaaaaattagctttacagcctttttatggcttacccaatcttaacagactttatttgtgtgtgtttagggatgcaaatgggtatgttaaatgatagtgttttgcctctacgcaataaaatagggtaattttttcttcccatgtattaaacgagaacacagaacatgcctagcatggtgggctctgatgaaaagaggctgttatcatttggccaacatggaaatcctagcctttatttatttatttatttgagacggagtgccaacatggaaatcctagcctttatttatttgtttgtttgtttgtttgagacggagtttcgctcttgtagcccagactggggtgcactggcatgatctcggctcaccgcaacctccgcctcccaggttcaagcgattctcctgcctcagcctcccaagtagctgggattacaggcatgcgccaccacaccctgctaatttttttattttattttattttagtagagacggggtttctccatgttgatcaggctggtctcaaacttccgtccacctcggcctcccaaagtgctgggattacaggtgtgagccaccccatccggccgaaatcctagcctttatcagaggttccgtggaatctcagaggtctgtgagcaggataaactgctttatggtagtttaaaatgcaaaaccagaaataaaccctcctaaagccagtttgtttccactttctaagtggttacagtgacctgtgttttaagtaccttaaatatatcagtgacctgctgatatacagcttcctgtttcctctgtgtcctgtgacatatcctgacattccttgagccccactcccttcccaaaaggaagtaccttgatgggtgaggacatagggcacacgtgtctctggccttctgtggacataatcacaaaatggtagtcagtcctatgaatttaatctctttaggatataaggatattcacgaaatagaagttgagctctctggacatactccaccttaaaattgctctctccttccgggatcctcaccagctgcagagcagtagtaatgaactattaaattcatttaacaatatcagcatatgctatccttctctgcttgactagacagtaatctggcttgctggttggtatgaatataggataatttcactcacactaattgagatggggagtttgtatgaatggctgaaaaatttgagttaaagataaaaagagacacagcttcctcaactatgggaaataactgggactgttaacaaagatttacttgaagagaaattgtattgctcagggttctccagagaaacaggaccaataggatatatatgtataggaagagattgattctgcagaattgactcacacaacaattatggaggctaagtcccacaatctgttgtctgcaagttggagacccaggagagctggtggtatgatttagtccaaatctaaaggcctgagaaccagggaagacaatggtgtaaatttcagtccagggagaagagaagaccaatatcctgactcaggcagccaggaaataaaaagggtgaactgctccatcctctgcccttttgttttcagaccctcagcagatcgggtgattcctgcccatgttgaggagggtgatttactttactgagtgcaccaattccgatgctaatctcatccagaagcaccctcacaaagacactcagaaacaatgtttaatctgggcaccttgcggcccaatcaagttggcacagaaaattaattaccacagaaatatttctggattcaatggattaagttggtaatatagtattcatattcatttccacgtgcctaaaaagaaggtttttatcctttttaatatcctcagtcctattaaacatacctcacattcatgttccatggttattctcttattatgttgctaagtgcatttctacttaggccaatctgattatagtgattcagattatagtgtttatcttctttcctttatacagtagacagtgttcgcaaaccataggagctgaaaaaatttccttcttatatagtaagttttatgattccagttttccaaaggggtgcttatgttatggttataacagttacagccagatgactatcttcatcagcaggtataaccccaaatatttatacattttcatttgtttcaaacataaaatatggtttgcctaaacatgtcattctgccagattggactatgcaaaagaatgttactgttttattttctgcttttactttaacttgttctcatttgagctctaccagttaagatgagaagatgactaaagctagggaagcacattttaaatgctaaataccatgttcatttcaagttgggaacttgaaatgcaagtatttttaacttaatcattaagttaaagtcagtaagaacgtggtatttagcatttattcattttaacttaatgattaagttaaaaatacttgcatattggtttgcttgaagctatggagaaaaacatttaccttttttccaaaaaggtcttaatattcaaaattattgtttcaatcttacaaattaacaatttacttatttttgatactttcggccttttttatgtgggctacacctaacattttttgaaaaatacatactgcttttcctgtaggttgcactttgtgatcctgtgtgtaattcattttcagtggttctattttatttattttttgttagtttgtattttcttttgtttctttttctcaatttttaaaattttaaaacttgtccttttcttttttttctttattattgcactcttctaccaaaacattttcagtggctttgaataaaagtatcagaactttcccgtggttagcattagctctgagatttgaacaggatgtattaagcagaggaggagggaaggccactaacatgtatgagctccactgtgtgtcaccctctctgccggatgacttacatgtggtatggtatctcattttcccagctctcctatcatgtcctgcggcatgttatcaccacttgataaaaaaattgaaacatggagtgcttaagtttcctgccccaggtcacagctgatctgaaaaagaaatgggattcaaatccaaatgtgcttaattgcaaatccccacatgactctttccttccttccttccttcccccgttgctgccaatgtaagaaggaacaccactccctcatttgctacagagaagacaggggcagctgtgtaaaggcaccaggaatatgccctgcctccttccttccacttgaaagcaacatctggatagacactcaactgcttttattttttgaaaaatgattattaatcaggattgaagtggagggaaaaaatcaaaacgaatgtttctttttaaaatgaaagatactgtttaattatttaacagccttccggttttagttaatatctttgaagactttggattaagattccagacattttcttgaaggatgtagaaaacgtatttaacttcaagtttagtttcaaaatgacttagctatcaattcttctcattgaagtcctctttgagatattatatcccaaatgtaatacacaggtaataattcaataggaatacttggaacattggtgatatttgaataaccttttgaatgaaacaattgatttgatctcaaaagatagtgaaaacgtctcattttgttttttatgttaaatatgcttcctcttaagtcaaaattcttttttctttttgcttttaagctcataaatactctgaattctcactaatcttttggaaaattgcttgtataggtattataattcacttggctcatgagttacataatatagcagtatatgttgcaattcaaatattgcttagcagtattagttgaattcaaaatagaaatcactttctttttgacaactagcataatgaattcattgactattgtcaaatttatgaagacagaaaagtccttttgtgattcaaaaatgtgtttattgatgtttatatatcttttgtcgtgtttccatactgtctcatgaaggttgtcttcgtaattcagttatctaaatacatcatacatttaccttttccctggggtgccgttattctacaacaggctaattacagatatctgtggtttctgcaggagtcttagtgtatgatattgatgatatcatcatttactttcaaaattgcaaaatagtaatttaggaaagcatggggatttggaaaaacatgtcttcagcaccaactgtttttgctctttgcatgcttgtttcgtaaagaactctaatgctataattgcaaaatggaccattttaaagatttttccttcattctgtacttgggagtggtgaaagacatccttactgtgctgcacagtgtctcatggtgttctcttaaacagcattaacgtcttgtatgcgctgctttactaaattctctgttctgagaaataactgaaaatacggctttctattaaacgagtggattattctgttgttgttggcttttttttctcaaacctccttctcttctactttatagttcctacaacagcagccagtacccctgatgccgttgacaagtatctcgagacacctggggatgagaatgaacatgcccatttccagaaagccaaagagaggcttgaggccaagcaccgagagagaatgtcccaggtaagtctggctcttccatcattcagccctacgatattgggaaacctgagcttgcctctgcctcagtctccccacaggcctgctggctttatcaagatctttaaagatgtaaagttctaattttaaatgtttactgtgtgggcacagtttgtgggttttttgcatcctccgtgaacatgctgcctaggaaggatccaggtatagttggattttgtaagcacaaattaaatgatgtctgtaacattctctctggcgaagaaaggtacttggcattattattctgtgtatatgtagtacctgtaatcaacatgttgtaaattaaaatccatcaaaatgctctttagtaaagatgaggttttgtattaaatcccagactgttataattgtgaacctacgattgtttacagtctgtaaaatcatagagacttaaaactgagctgaaccatagtgattatttcatctagtctcctaagtgatacatagtggaatagaggttcgagagagtggcttcccattttagcacaaagcaaaatcagtgagccagagacaacatttagaatccaggcctttcttgctcctagtacagtactcctttcattatactttgctgaaaaaaaaaaaaaaaaaaaaaacctgttttggtttggtttgtttttttttagcaggtccttaattaagcaaattaaaaaataacttatgtctaaaacatggctaatccatatatactatcaactacaattgaagctatgtctgctaccaggcactggatgttgtattggagtttgataatatggaggattttagcccttgctcagattcctcattcattcattcattcaatcaacaaatatggacttattattttccagtcacttttctgatttgtagtctacaaacctaggagtgaatgtggggggaaaagaagtaggacataaaagtgaatgaataaagatctcaggtt

SEQ ID NO: 983 - DNA, 6000 bp, Homo sapiens
aaaatgtggcacatatacaccatgaaatactatgcagccataaaaaaggatgagttcacgtcctttgtagggacatggatgaagctggaaaccatcattctcagcagactatcacaaggacagaaaaccaaactctgcatgttctcactcataggtggaaattgaacaatgagaacacttggacacagggcggggaacatcacacaccagggcctgttgggggggtggggggttgggggagggaaagcatcaggagaaatacctaatgtaaatgacgagtttatgggtgcagcaaacaacatggcacatgtatacctatgtaacaaacctgcacgttgtgcacatgtaccctagaacttaaagtataataaaaaagaaaaaaaattaaaaatcttttctttgagacaattgtagatttacatgcagttgaaagatttaatagaggccgggcgcggtgcctcacgcctgtaatcccagcactttgggaggccaaggcaggcggatcatgaggtcaggagatcgagaccatcctggctaacacagagaaaccccgtgtctactaaaaaatcgaaaaaaattagccggtgtgtggcgggtgcttgtaatcccagctactcaggaggctgaggcaggagaatggcgtgaacctgggaggcggagcttggcgaagcctgcagtgagtggagatagtgccactgcattccagcctgggcaacagagcgagactctgtctcaaaaaaaaaaaaaaaaaaaaaaaaagaattaatacaaagagaccctgcatagtcttcactcagtacagtatcacaactattaaattgacattaatcccttaacactgctttaacccaagtctatgctgctgcttctccgtgttcacttctgagaggcactggccatttcttgtgtgcttattcatactttgtgtaaaagcattagcatcatacatcgctggtgctgaccctaccctcagtcccagcttctcccagagtaggctaagattctcttttctactacatggaaaattgttctggaataataaagggttagcaaaaaagtcagagaaaacaaacagttgcattccctttccctgtagtagagtaggaatataattatgagtgatagaggatacgttccattcctttcccagtcctctccgaagtcagcttcactgctgtaggaagttgctgttctcattatttccctgagggaaagtgttgggaagtgagagttgaggtgatggggaatcagggttgctgacaattgggggaattataacgagaagctctttttcaccaggagaggggttgcatgttaagagaaggcctatctgctcatcctccatgtcagcagatgagaaccagttggacaaggtagctgtctcttagagattgagaagtaacaaaagcacactgtcagtcctgttcttccagcctcacgtacatcttctccatacattatgtatttgacattaaattaacatacactgttacacccattcctgaccgcattatctcaggtagccttttgtatttgagtattgtgggatctgttgctattgcccatgatgcccacttggactccaccaaggcagtgaaactcttgggggccgttcaaagtcaagagtgccaactgcccctaacaggattgggagaaccaaccaacactccccgaatagggactaactcactcttttcttggcctttatgaaaggaaggagttaaggctcttacagctggagactccagcaagagttgtaggctcaacgtgtagcttatactatttacttaattaacatgtaaatggattttgagttctgaatgcttgttctagttgattagggctcatttagcctggcttctacgaattagctataacaaatggtttcatagctgttatagaatgaggcagaagaaaataaaatgaatgtagcattatgtttaattagtggtataggaaaatgttaatataatgccatttagattctggactggggagattgtgcctttatcataagtaagaaattgttgctaggtttcacataagggcacatagttatcatgaatcatctccttcgatcatcattcttttatcccattacttgacttgcacccatccaaaattctaccacttttatttaatatatagactcataaagacaaggtttgtgcatctgcagagctgtgatgttcactgcgaggcccgtggcacacatctataagaagacacatatttggtactctaagatgatacttttttttaatgccaaaatgtgagggtcagcataaattgccaaggcatggtaaattttgttgccaatgctcccgtgactatggggtgaagggattctgtgcctcccttggtagcaatgaccacggtgcttgcaatcccagtgccaattcccggcacagtgcaggctctggaggcactgctgccttgcagtcttattggaattaacactgcctgagtaagagattaataatgggtattgttgtgtcttagaaacgttaaagagcatgtgacatgaatatgtacacattggtgaaggagatacagagaaggaaagcaaagtgaagctgtagatgtttgttacaactgaaggtaagctctgggagcagagaccactgctggctatagttgatgggatccacaatgtcaatacaaatggggactaactattgttttacttccctatacacgttgctctttcagtagatgcaataaagtactggtaaaaccagaggtggctaccatcacgatgatgtcaacaggagggacagtcagcactaagcccagaaggtgtcaaacactccgcaggagaaatgcgccatgcaacggacatgaagatgatctgacactcttcacgtggttttcagatggaaacgtggctacgaaagcatcaacctcattatcatccatcattaaggccatctcactcagtactgctgctttcaaagtccacgctcccaaagcaaattggatttctgtacacaatactcttacaggatgaaacccaaccaacttgttgacgtaagtatcccatctacttcgcaattttatttatcttccaaaattaaaggactggcaccctgatttattaaaagtgaattgggtctagggaccatatcccctctgagttactgacagagcagcttctggcctgtgaagctcaaagccatgcctagatgtgatggatccttgtctttgattggctaattagaatcaatctgttgaaggaccagtggcagtggctcacgcctgtaatcccagcacttagagaggctgaggcaggtgtatcacttgaggccaggagttcaagaccagcctggcctacctggtgaaaccccatctctactaaaaataccaaaaaattagccaggcgtgctggtacaagggtaatcccagctacttgggaggctgaggcgcaagaatcacttgaactcaggaggtagaggttgcagtgagccaagattgtgccactgggcggcagtgcaagaccctgtctcataaaaagaaaaaaagaatctgttgaatattcctaacttggaagtaatgggtgatgcgtggctttcatcttttagaaaggtgttttttcctctgtcagtaaaactaagaagacatctgtgtgtgctaaggcgtcagtctagcaagggcagggcacaaacccagagagagaattgggctgttgtttcacttccaataaaaatgggatatacatgggaggtagagttataattctactcaggattgactttatacatgcaattggatgggtcactgattgactttgaggcaatcagggatgagtgaaactgatcttggggagggtggcaagacatgttgacaggtaagatgtgttttaatgtataacagtgcgtggtgtgtattaatcagttggagttgattgactgcgttttattgtttggaacattcctgcccaagggtcaggtaaatatacaaaatatacaaataatacagatttttaatacataaatatcaattaagtagcataattaaataatacattgttatagttgtacttaatgtgtatgtaaatatatacaaataatacagatttttaatatataaatatcaattaaatagcagaattaataatacgttgttatagatgtacttcatgcatatgtaattaaattattaatgtataatatataaatacatattttaatatacaaataaaatggtcttaaatcagagttaatttaagaccgtttatattagtacatatcttaatatacaaatgaatggtcttaagttaatgtcattgagtataagtcacatttacagatatgacatgtgtttccagataaagtcaatggacagacagcttccaacactggaaaacattcaaaatatatgcaattaattttatatttgagttaaggcaatcatttattaaggaaagcaatcagatgtttgtgagggcttaaactttcgcttcataaccaaagcagtttccttacatgaaagttgacttcttaaaaagagaagtttattttttatgatggaggattgttgtgatgtgcagataccttccgtcatttcatactcatctaaaagcagccaaatgatcttttcacctttggccggaatccttttattgctaccgagtcctgcactcattaaaccagatgacagtgcatgctctgagaggtgtaaatctctagtcctggtggccagttaaattcctcagtaaatgtttggtagatgctgcctaataaaccagtccaggttgccactgggaggattaaaagaagtaaacgtgtatacatgaacagagagacagtgccttttcatgctaaatgtggttccccacatctcctctgattagaggtgtgctctgaacaagccgagacggggccgtgccgagcaatgatctcccgctggtactttgatgtgactgaagggaagtgtgccccattcttttacggcggatgtggcggcaaccggaacaactttgacacagaagagtactgcatggccgtgtgtggcagcgccagtaagtggacccttcttcgagcctggccacctttcgtctctctcgccactgactctgctttttgtaacagattgattttcctggttcttgggaatgggcctgttgctaccactaaccacatttctgtccacttctctaattgctcagagtctccgcagtatgttcaatcatgagcacacctctccgtctttccctgataaagcatggccatggatgtgttctcttcctagctgtagcacatatgtcttgcaatccagagggacttttgagtgcttctcttttaaacaaagctggagtggctgttttgtcttctgcagccagccgtttctgcaaatgcatacttatgtgtttgtccgtgtacatatgtgttcatgtttatgcatgtgcactacctgtgcagatactgtctaccactggaagcctggctgatgcagcttgagttgcattgataaggtgtatggctgtgatgaatacctttaagttggttcataacatgtcttttattgtgctgatgagggaatgtgattgaattgagctcatgcatctcaaatgccggagggtagaagtgcccgtcttgccccctccgagctcagcacacagacatttgccaggtcaaacttctgcttcttctcttgaaagtagaagaaaacttttgacttaacgtgagaaactttcaatgacataaggctcgaggaacataattttattttttttgtttttttaaagacagggtctcattctgtctcacaggctggagtgcaatggcgtgatcttggctcactgcaacctccgcctcccgggttcaagtgattctcctgcctcagcctccccagcagctaggatcacaggcacatgccactgcgcccggctaattttttgtatttttggtagagacaaggcttcaccatgttgaccaggctggtctcgaactcctgacctcaagtgatccacctgccttggccatccaaagtgctgggatt

SEQ ID NO: 984 - DNA, 6000 bp, Homo sapiens
tatcacccaaagtccatagtttacattagcattctctcagcattgtttattctgtgagtttggaaaactgtctaatgacatgtacccaccattgtagtgtcatactgagtacttttactatcccccaaatcctctgtgttcctcctgttcgaccctctcttgcctttaacctttccaagccactgatctgttactgtctataattttgccatttctagaatgtcatatggctttcttagaaaatacaaatggtgacttttttggcatgactttaataaacagaaatgaaaattggtgtgtgaatcaaaatctttcactctgtaaagggacttatcaggcggcacctgcatgtggaattatatcaaggtcagctttagttagaaacagaaggagagtcacctttgtgatgtcatttctccttcatccaagtaaaatctcgcatgctgacacataaaattttatcatcagtgatttatttcctcgtaggaatgtccctttgaccttattaaattcagatactctggggatggtcagcattttcagatggttcccttgttctgtaaaaatgtttgttattggtgtttaaaagctgtaaaagccacccactataaattgatagccactaaagtctgcgaatgtggtatgaatgttccactatgttgccaagcgtttattttattgtgagttgttatttgattgtttgtaaggaaattgttttatgatgctcagctttatatttccataaactgttcctcccttgcaactccttaaactgtgatgagcttttcaaaacaagtccacaggacaacagtctgtccagcatttgaagaagtggtggaaaagtcatttttttcctttcagtgtttctagctgttcatgaaaactgcagttaaaagttgtaatgttgttgtgtttggcattctttgggaagatgcagcattattcaaacaaaaccgtgtgctcttgttttaaatagtgtccaaatgaataattgaattcatggacatctaaatttaattccagaaatcaaagctatggtaataagaacttggacctgagttctcttaggccaagtaatttaattccttagccggttgaactatttattacgtgtctccgttcctggttattatgccagtaaattgctcaggcagatgcagggatggatgatgggcatataattcactctttttcacggctagacacataccagaatgcagatcacactaaacagctgtttttacaaacatggtttctattcagagctttaagggccacatccaagtaataacaaagaagcctggagaaggaacctggggatacccagggtcatgttttcaccatcccacctggaaacacggtgctgtccaaaccctggatggtacacttggacatcgtcattccagtcatggttcaagatcacgtgtatacatcatgatttaaagagaatactggtttgatttttcttcctgactttccctgaattttccacttaaattggaaaacagcgctagttagtgcccatgatttgattgaataagtaagagatctcaaacacggtaaattaactgatgacatgcatcaggtcatctttctttgattcaccagtaatacaacagtgagatcctacagaaaaatgcaaaggcagaagctcagggcagctgagcaactgttaaggattcttttgaaatgtagccccacgtagtaaactttcgtgcaataatttgggcagtcaaaaaaaaaagtcagttatttcacctcatttatttctacgaggagataaaggcttccaacatctgattttcagtgccagtgttttctgtttctcttttcacctatttcgtcctagtcttgtggaaatgttacaataactgattaggattttctctgtattaacacttcatttattaacatatgagtaagttgctattaataaattattctgcttaatcagtttctttttattctttagccacatgctaaacttcttcggatgtcttcacttaatatccttacatcatatttaatcagagttagaaaggcgttccacttgggggtcatacacatttttttgaaacttttataaacgccctttatactattcttgtatcctacgtaatcagagtcaggtgttccatggggatcatacacatctttatacaacttgtgtaacacatgctttaaatcctgaggtaatcagagaattcctgccattgatggattaatctctttacatatctttccctttcactctcagcaaaactacttatggcggtcctgttagactttgaaagcctttcaggtttatggaggagtcttcctttctattgtcgtagatcatggaatcatagtgttcgcttgtctcacgtgtttggaatctgatttcctacataatgctgtgctctcactacgagtccaaggcttcctgtggctacaaatcccgggttcctatcacttttcccaatgatgagcttctccttgttggccagaatcagctctgtggtaataattcccttctgctttctccctctcgcttttttttttccttctgggtacattataatgtcagcatagcagcttttaattctattactatggtacttctcgaatagacctgtggtagttgccccagaaaggttgaaaccccctgccacatctaggtctttctcctgtattggttttgtgatctgatcaaggacatctattcctctagtcctgctaggtggtatacgataggcttttactattagatattcaaatgctgtcaaccatgcctgccttgacaggtacatgatttccacaaggatttcctaataggcctttttaattttgttctagacatgcccttcttttgccatccaaatttgcttattttttacaaactatgatgcatcagcatgtaaatgtttaataccataaatatttctgatcctcttcccaatttcactgagttactggttatctcttgccattattctcagcatattgcagtggatctcagaatattttcccctgaccaccagcatcagtattacctgggaatttgaaatgcacattctcaggccccaccaaggcctcatgattcagaaactctggagctgcattagaaactgccacaggcacctggtgatctgtgttggtttttgtttgtttttaaggagacagtgtctttgtctccctggctggaatgcagtgatgcagtcatagctcacagcagcctcgaactcctgggctcaagcaatcctcccgccccagccttctgagtagctggaactacaggtgcacaccaccatgcctggctggtttttgtttgtttttaaggaggcagtgtctttgtctccctagctggaatgcagtgatgcagtcatagctcacagcagcctcgaactcctgggctcaagcaatcctcccgccccagccttctgagtagctggaactacaggtgcacaccaccatgcctggcttttttttttttttttttttaatttttttggagacagggtctcaccgtgtggcccaggctggtctcaaactcctggcctctaggttttttcccacctcagccttccacagtgctgggattacaggcatgagccaccacatttagcaggtaggtgatctgtgtttcaataagccttccaggtgattctgatgctcactgaaatttgagaaccactgaaatatttggttttctacaaaacataagcagttagtaaccatagggtacgcaactaaatagttccagcaggcatccctgaccacagggcattgcagatttacttaagtcagtttcatcttccacctgtgtgagttccagcaggcatccctgaccacagggcattgcaggtttacttaagtcagtttcatcttccacctgtgtgagttccagcaggcatccctgaccacagggcattgcaggtttacttaagtcagtttcatcttccacctgtgtgagttccagcaggcatccctgaccacagggcattgcaggtttacttaagtcagcttcatcttccacctgtgtgtccagtttaagctctcagttgcagtttttaaaccaatttccaccagcatatactgagtatccgctaccgtgcaatgcgttgcggctcttgtatgtgcactatgagaagtaattcccataatacggcaaactcagttttgatatccaccaccccactttttataatggactacatttttcagagcagttttaggtttacaaagaattcaagcagaaactacaaaaagttccctctacctctcacttccccactccccaacagtttcccctggattaacattttgccttagtatggtacgtttgaaccaatatcgatacactattattaaccagtattcctgttttaacatgagaggcgactttttgtgtagtatagtctcttggttttgacaaatgcttaatgctgtgtatctattattacttatgacagtatcgtgcagagtagtttctaaaaatcctctctactccacctattcatcccttccccactccccctgaaccactggcaaccgctgatctttttattgtctccgtaattttcccttttccagaatgtcctgtggttagactcatggcatccccttttagcaactgcagaaactaagaactgtccccaaggataaaaatttttgcagacccactgagctgggatttatacttagacctgctgaattgaagttttgggtgtgtttcttctcaaattgccaaaattccatatggacgacttttcttttccttccctgaaatgtgtttaattgactttttctgttatttgtgtttgccttcacagtgaagacaaagtagtagaagtagcagaggaggaagaagtggctgaggtggaagaagaagaagccgatgatgacgaggacgatgaggatggtgatgaggtagaggaagaggctgaggaaccctacgaagaagccacagagagaaccaccagcattgccaccaccaccaccaccaccacagagtctgtggaagaggtggttcgaggtaatccaccatttgcttggattccccccacccccaaggaaaagaaagcgtaataccagagttggaaatatccaccctagcaccactgccttccccaatcaaaaacatgtttttttttccaaaaggcttcttatgcttgtgaaatttttttggtttaacaagcaaacaatttcaaataatgtgaaatctttattatacagtttgttttgtaccttgtatatgctgcttggcaaatcccaagttaattctacaagactccgcccaaccaggtagtcatctaatttgacaaacactgagttaggtgactccttggtattcctttggcagtgagtgtttgttatataatattgtctgttaccacctagacgatgagctccttgagggtaaggacttgattttattcagtattgcacagagtgcctggcttgtagtttcgataaatcttagttgagtgagtagttgtgattagatttcattaaagaaggagatttgggccaggcacagtgcctcacacctgtaatcccagcactttgggaggccgaggcaggcggatcacctgaggccaggagttcaagaccagtctggccaacatggtgaaaacccatctctactaaaaatacaaaaatgagccaggcgtggtggcacgcacctgtaatcccagctatttgggaggctgagacaggagaattgcttgaacccaggaggcggaggttgcagtgagctgagatcacaccattgcactccagcctgggtgacagagcaagattgtctcaaaaaaaaaaaaaaaaaaaaagatttggtgagtatcgcattattttatgctatgaattttaacagaggtgatttatgttgagtttacattgttttattgggaagtacggcagtgctttcttcaagaagtaaatatagtattaatgtcttagactttctctattgaattaatgtttgtgttgcaaatattgtgaactaaaagaactaaaggt

SEQ ID NO: 985 - DNA, 6000 bp, Homo sapiens
atgcagtacatgtccttttggtgaataagtaaatatgttttggtaactttagctttgcattataatctagtcgtcagcagattgactaagggcagataaaacaagatgatttggttttgtggtttggcacttactgtctgatttatgcccccaagaactcttgcaggccaaggtcgagtgtatctgatacctgctctggctcttctcacgaactgatttagtagctttgggccagcattagattttttaaactctttgacctatttgtacatgacaggcatttaatctttccagtagttacttgtcaaatagaaaagcatcacttcttagtttggacatttgcaaatatgactgagcagagctgacagatgaggtgggcatcttcaggccatagggtacttctggcctcctgtaacctagaaaattgggatgcctcagatatcaggtattcttccaagcagctagggttagtccctgacctcagaaaccctgagagccctcagaaaccctgagaaatccacctgggaatggtgtatttgttttggatgagattacctttactttccattctccaggtcttcttgtgttttttgtttttgttttgttttgttttgttttatatcattctatgtaaaagagaaatgtggtatcatttgcattatcatgttatttctttccttataatttatatcttaatgcttatctctggggctaggttataatctcctgagttaggtagccttaggtttcttggcggagattcctcccctgggaagtgaggtttataaaagaacccgtgatgtggccctgtggagctgcatggggtgtgtgctcagtactcactggtttcttccctgcaaagtgacacctgcagcctttggggtaccatgtctcataatttttgcattccctgcaacacacactatactgctatgggcatcattgatcattttaaagatttaaggaatgacaagatacagtgcttattctcccctatgatttgcttagatttttatctaaatagtacttattgaaataagtacttcagtatcatgctacatcttacatgtttgagctagaaacagactaaagtttaaacccttttatgagaatgaaaagttacttccttccccttcttagggcttttaatccctctttatgttgcatttcagaaaatgccctatagcgtactatgaaagaaagacattcattcctgtctttgctgctgtgtggacgatctgtattccttgctccgtgggagttgtgggtttatgtctattcttgcatgttttgcctgaaggaccacagtgacctacttggtggtctccctgctttcatggtttcactatgctgatctatccttcacttaattatagagtctatcttaaaaaaaaaaaaaaaaaaaaaaaaacttttggcctatgttgcttcttccaaaatggcatccaaaacctaagcctctttaaaattggagtccagcatgcttccccagtgctacttccttctggactccctttgccacttgctttctgcttccacccatatccagatgggctgcaaatatgccttgctggttctttactctgtctttgcacaggaggctccctcattttgaagggtcttttgctacccatccatccatccatttggattctataatagagttcttgatgtttgacagaactaggccaggaattgtgggggtataatggcaagcaagacagagtctatccttacgttatggaagttcaattcatttcccatgtggcatactacttctcaccattcagattcatctcgaatattgtttcttctttgaggtttttcccactgcacccaagatactggcctgacactttccttatctctattacagaatttaacttgttcattcattaacagatatttattgcctactatgtgcaagaatctgtgctaaaagctgggaatattgcagtaaacaaaaattaagtttacagcttacatataatgtggtaattatccatcttttaccttcattagactgagttcatgtaggactttatgtaatatctttatatcttcaataccagaaatgcctagaaataatttgcataatatacattttctttaaagatttaacaaaagtctgagggacagttttcagaataaactgaattaaactctctctctcttatgtgtgttatgtaaacatatatataaaatacacttttgggttttttgcttaggaagtagaaaaatgctaaaatttctgttacttacaagcagattaaaatgtccaagaaagaaaagtagggatttatattgattctgctcaaatgcttacctagacaatgtcaatatttatattttactcccctgttgtagtagaatggtaattggttctctagttaagcagcttttttaggattaattttgaagcaagaaattcagattaattaagggacaatttcacttgcagcatttaggcattattttaaccatcaaacttgaagtggcaagaaacggagttgcttaaggaggccagacgtaacattctaaaggtagtagggtcttgattgggttgcttaggcattaaaaggctgtttaacttgtcttgaagtctatctttccttgatgtcttctgcggtaagaacactgtgatacagatggaatgacgggaagtggttttcctttctttcagttggtgagtttgtaagtgatgcccttctcgttcctgacaagtgcaaattcttacaccaggagaggatggatgtttgcgaaactcatcttcactggcacaccgtcgccaaagaggtaccagcccataaattctttcttattgcaaagtgaagatttcctggggacgtgcttaatggcattttaggggtattttgaggcaacagctatgttgataagttatttaagaaaaaaacccagtgctactatccgtaacccagattttagtttttagagtgattttaggttcacagcaaaatcgaacagaaaatagagttcccgtgtaccccctgtccccacacatgcgcagcctccccatccatgaatatttttaaaaagtcaaaaatagggccagttgaactagattcattatgtgcctgtgccgtgtttcgcaacttaaaaatataagttgtctgtgccatgccttataacttaaaaatataatctctaatagttataactttaaagtttacccttcagattatttttatgcacctgttgttttcttttgtcatatacaattttttaataatttagccttttcccctgttatctattagtgaatacagtggtagaacagtgaagtagcttttttataccagcctgaaagctccagttagaattcagtttctcagttataccatccagttttatattcagcaggccatgcctaccatcttgatttttccacagggtgagtctgaccgagcacttggttaacctctgcttttggctaagccaataaaagatgtaagatacttagcatgaaaaggtcactgtgtggtaagaccaccttcacagctgctgtgtccccttgataggtttcctaataaatttatataggtttatttgtggcaagatcagtcttaggctaactagaattaggctcctttatctagctcatagtgcttcacttgagtcaattttgatcccctgtccctcaccggaacatgtctggagacattttttgttattacagcttgagggagtggtgttactggcatctgatagtgcccagaggccagagattctgctaaacatcctacagtcaacaggataaccacccgccacccccaagaattaggcagtccaaaacatcaatagtgctggggttgagaaatctgatctagcttagcttaaccattgtatcatagctttatagctgttagacagaaaataccactgaagatttagtattattttatgcctcttataaaatagtatatttggatccactgtagaataaaatgttttttatgtaaaaatgtgttttggaggtttaagagcttgctgagtttaagaaaacaaaccaaataatttgaagtccagctacctatttgataacctcattttttattccttctgtgttttcaaaagaaaaatcctttgtctctaagaaacggaaatgactcccataaggtcaaaatacagtctgtaatattttcattgtctacctttatgtcttgaattattcatccttcatttatcactagtggatgctctcagaactttatgctaatctagatttgtgcaaatttagcaaatcccagaaaagcaaaaagacattcaaggagaaatctctaatgactgtaagttctgattcttagtggctgcaggggataatttcttctcttcccaggattgttactctgaaagtgaaccaagagagtcagaatttctaggataaggcaggtccatgtgagataaacttccatctgtaagggaggtaggagtgagctggggatctacctggaatgcgcacaatttctggatacacgaattaagccagaaggcattaattctctggtatctgttcaccagtggagactgctacatcttatttcccaattagtttccattccagttgttcgtataaacctctattatataacatcgtggtcttattaaataaataataaacaagaataaaaagagtaccaaagtgtaacccatgctaaaaaaaatcctgttgtaaattcactcaaaaagcaaataatcttttcctttgtgaaattggttcctaatatattgggtctgcatgttgattattttatgtggagttttcttacaatgaaacacatctactctaccactcactgttttctccttacactttgtagacatgcagtgagaagagtaccaacttgcatgactacggcatgttgctgccctgcggaattgacaagttccgaggggtagagtttgtgtgttgcccactggctgaagaaagtgacaatgtggattctgctgatgcggaggaggatgactcggatgtctggtggggcggagcagacacagactatgcagatgggaggtaaggtggcctttgtgttcagcctcagagatgctgaaacatcttgtatggagtatttgtatcctgtaaattaatctttctgtttatcactgaaaaggtctctgcccactcccatcagagtctgctgttatgcaaaaatctgaactatgaatttttatggcatcctgttgaattaataatatcagtcacccatcacagagttaattttaactatttaatattaaacttgggatcaaaatcccactgataactatcataggttactggtagttctaacagggagttgaaataataatggcgttctgttttggtcattaatttaaaaatatttttaaatgctctctgggattgtcagtcattagtttaaggtgaattttcgttaaaggtttggtttgagattttgggcgttctctgtgtggatgtgtaagggtttttttttggccttttatcatttcttttccttcatagtggaagtcaaaggcattaataaatgcttgttaattttttttaactacctttgatttgttgattgtaaagaaacctattttcgcctctttttcttagggagcttagtcccgttacttcttacctgattctcattcttaactgaaggcaaacatctatattcaaatcataaaattataaaatgagaatctttgggttggaaatgccatctggttcaggcattgattttatgctgtctcatcccccgaagggtgatgattgtatcacttatcttattccttcagtattctcttagatgttccctagagctacagatttccaaacagcacattcaataggagttgtaagtttataatcggcaaactacaggatgcttgtttttttttcttttaatttctggtgtaatctgctactagggcccccatagagtttattgtctatatcagctagaacactgggaccacagtcataaactgaaggatccaggcaaactgggtcatatg

SEQ ID NO: 986 - DNA, 6000 bp, Homo sapiens
tattagaggaaaaaacaacaacagaaaacctttcacctttgtcttgtttctcctgccttctgtctggaacttggacacagagtcttgaatttctgtgaccataaaacacgaggataaaaccaacgtgctcaggatggcagtacagaaagataggaatacgctggtccctgatggcatcatggaatatctgcagtggccctagcttcagtgtcacttcttaggtgagatacataatcctaccgtgtgtttaagccacggtttgacatgtggtctattctctgccgctgactgcattcccagctgttctatatggcttgctagctaatttaagtctagttttattgtcaaattgaccacattgtagattataatattaaagtacttcacagtctaaaagtgaactacttttgtaaaagccaaaggaaatgggccaaatgaaccattttgaacagagtttaaatgagtgagttgagttaccactcttggatggagaactggagacctggattttcagtctagttcttctgccagttggctctgtgggcaagtcacttgacctgagctcttttcctcccatctgcaaaatgaggtaatttgagctagacagtcctcccaaagaccaccaaagagctagcagattgaggcctgcagactcctattgaatttgccatccttgttcaccttgccaagacttcatagccaagaagccagacccagattttgttcattagctttgaaaacaccctttcagttgggtgtgtgtgtgtgtgtgtgtgtgtgtggtgtgtgacatgcgttttgaatataaattgtgaattgttttagcaagaaaccaggttgtatgtttctcaataaacatgcatactgtatattgatgaatttatccacttgaaataaatggtgccaaattgcctaaagtttgctgtaaacaggaacatgatttctcattatgatgtttaatttgttttagtctttgatctcttacatcagaattctgttaagaactctttttacctgaaagatcaaagcaaataagcagaagcatttataaaaataaggtatacgtggctgtggagagaaactccaggtatatacgatcataggctttttaaaattaataaactttgtttttaaaaacaaagcagtggaagttcacagcaagtttgagtagaaagtacagtttccatgtaactgctgtcctagcaaagatttttaagtacaatattttttaattaaaaagagaaaatataaaccgtgctaagccagttggtgaaaaaggcttcattatacttttagcactcttaacgcttattaaaagtttttaaaaacagatttttgtggttgaatcgcttacaatttctgatgtgtaaccttctaacatgtttcatcaaattttaaaagtaatgtaagcagtgctgtccactgctaaattttattttaatgttagaatacaatgaggtttctattttgccattagtcctgagagcttattaagtaaccagttttaatcctttaaaaaaccattctcattttgagggacacatatttcttagctttgtgcaatataagaagctaagaccatcttggcagtatcaaatgaaatgttttgcaagttagaaagttcagtaaccacttataaacataatgaacaattgttatagtcagtctaatgcagaaatacaggtgttgggggcaggggggtggtgggtgggcagacttggtccacaagtagtagtttgccaacctctgtcctaaacacaagttcaagaatatggttctcttggatagattttctgccagatgaaagtaagagtaacatccttagctaatgaactcctaatatccaaggcaacttttaattaattcaggcttttaagaaaagcttgtttaccaactcctcattaaaaatgttcagactggctggtcgtggtggctcatgtctgtaatcccggcactttgggaggctgaggcaggcagattgcttgagcctaggagttcgagaccagcctgggcaacatatctagaccctgtctctgcaaaaagtgaaataattagctgggcatgatggtgcacagctgtagtcccagctactcaggaggctgaggtgggaggattgcatgacccccggaggtcgaagctgcagtgagccattgatccaaccactacattccagccagggtgacagagtgagaccttgtctgaaaacaaacaaacaaaaagattaatgcagtacatgtccttttggtgaataagtaaatatgttttggtaactttagctttgcattataatctagtcgtcagcagattgactaagggcagataaaacaagatgatttggttttgtggtttggcacttactgtctgatttatgcccccaagaactcttgcaggccaaggtcgagtgtatctgatacctgctctggctcttctcacgaactgatttagtagctttgggccagcattagattttttaaactctttgacctatttgtacatgacaggcatttaatctttccagtagttacttgtcaaatagaaaagcatcacttcttagtttggacatttgcaaatatgactgagcagagctgacagatgaggtgggcatcttcaggccatagggtacttctggcctcctgtaacctagaaaattgggatgcctcagatatcaggtattcttccaagcagctagggttagtccctgacctcagaaaccctgagagccctcagaaaccctgagaaatccacctgggaatggtgtatttgttttggatgagattacctttactttccattctccaggtcttcttgtgttttttgtttttgttttgttttgttttgttttatatcattctatgtaaaagagaaatgtggtatcatttgcattatcatgttatttctttccttataatttatatcttaatgcttatctctggggctaggttataatctcctgagttaggtagccttaggtttcttggcggagattcctcccctgggaagtgaggtttataaaagaacccgtgatgtggccctgtggagctgcatggggtgtgtgctcagtactcactggtttcttccctgcaaagtgacacctgcagcctttggggtaccatgtctcataatttttgcattccctgcaacacacactatactgctatgggcatcattgatcattttaaagatttaaggaatgacaagatacagtgcttattctcccctatgatttgcttagatttttatctaaatagtacttattgaaataagtacttcagtatcatgctacatcttacatgtttgagctagaaacagactaaagtttaaacccttttatgagaatgaaaagttacttccttccccttcttagggcttttaatccctctttatgttgcatttcagaaaatgccctatagcgtactatgaaagaaagacattcattcctgtctttgctgctgtgtggacgatctgtattccttgctccgtgggagttgtgggtttatgtctattcttgcatgttttgcctgaaggaccacagtgacctacttggtggtctccctgctttcatggtttcactatgctgatctatccttcacttaattatagagtctatcttaaaaaaaaaaaaaaaaaaaaaaaaacttttggcctatgttgcttcttccaaaatggcatccaaaacctaagcctctttaaaattggagtccagcatgcttccccagtgctacttccttctggactccctttgccacttgctttctgcttccacccatatccagatgggctgcaaatatgccttgctggttctttactctgtctttgcacaggaggctccctcattttgaagggtcttttgctacccatccatccatccatttggattctataatagagttcttgatgtttgacagaactaggccaggaattgtgggggtataatggcaagcaagacagagtctatccttacgttatggaagttcaattcatttcccatgtggcatactacttctcaccattcagattcatctcgaatattgtttcttctttgaggtttttcccactgcacccaagatactggcctgacactttccttatctctattacagaatttaacttgttcattcattaacagatatttattgcctactatgtgcaagaatctgtgctaaaagctgggaatattgcagtaaacaaaaattaagtttacagcttacatataatgtggtaattatccatcttttaccttcattagactgagttcatgtaggactttatgtaatatctttatatcttcaataccagaaatgcctagaaataatttgcataatatacattttctttaaagatttaacaaaagtctgagggacagttttcagaataaactgaattaaactctctctctcttatgtgtgttatgtaaacatatatataaaatacacttttgggttttttgcttaggaagtagaaaaatgctaaaatttctgttacttacaagcagattaaaatgtccaagaaagaaaagtagggatttatattgattctgctcaaatgcttacctagacaatgtcaatatttatattttactcccctgttgtagtagaatggtaattggttctctagttaagcagcttttttaggattaattttgaagcaagaaattcagattaattaagggacaatttcacttgcagcatttaggcattattttaaccatcaaacttgaagtggcaagaaacggagttgcttaaggaggccagacgtaacattctaaaggtagtagggtcttgattgggttgcttaggcattaaaaggctgtttaacttgtcttgaagtctatctttccttgatgtcttctgcggtaagaacactgtgatacagatggaatgacgggaagtggttttcctttctttcagttggtgagtttgtaagtgatgcccttctcgttcctgacaagtgcaaattcttacaccaggagaggatggatgtttgcgaaactcatcttcactggcacaccgtcgccaaagaggtaccagcccataaattctttcttattgcaaagtgaagatttcctggggacgtgcttaatggcattttaggggtattttgaggcaacagctatgttgataagttatttaagaaaaaaacccagtgctactatccgtaacccagattttagtttttagagtgattttaggttcacagcaaaatcgaacagaaaatagagttcccgtgtaccccctgtccccacacatgcgcagcctccccatccatgaatatttttaaaaagtcaaaaatagggccagttgaactagattcattatgtgcctgtgccgtgtttcgcaacttaaaaatataagttgtctgtgccatgccttataacttaaaaatataatctctaatagttataactttaaagtttacccttcagattatttttatgcacctgttgttttcttttgtcatatacaattttttaataatttagccttttcccctgttatctattagtgaatacagtggtagaacagtgaagtagcttttttataccagcctgaaagctccagttagaattcagtttctcagttataccatccagttttatattcagcaggccatgcctaccatcttgatttttccacagggtgagtctgaccgagcacttggttaacctctgcttttggctaagccaataaaagatgtaagatacttagcatgaaaaggtcactgtgtggtaagaccaccttcacagctgctgtgtccccttgataggtttcctaataaatttatataggtttatttgtggcaagatcagtcttaggctaactagaattaggctcctttatctagctcatagtgcttcacttgagtcaattttgatcccctgtccctcaccggaacatgtctggagacattttttgttattacagcttgagggagtggtgttactggcatctgatagtgcccagaggccagagattctgctaaacatcctacagtcaacaggat

SEQ ID NO: 987 - DNA, 6000 bp, Homo sapiens
ctcaggaggctgaggcaggagaatcgcttgaacctgggagatggaggttacagtgagctgagattgcaccactgcactgcaacctgggcgacagagtgagagtccatctcaaaaaaaaaataaattaattaaataaatagaaaaataaaactcatttatttatagagctttctatttaatatttttggactgaaactatggaaagcaaaaccacagataagggaggactactatagttatgataaaaatcaggaacttaatctagccacgagaacatttgtatttctgatgaaatttttattcttgtctaaaatgttgaactatatttatatttatatctttaaatataaatgaactatatttatatctttataaatgagctatatatttatattttatataaatataaatatttttatatctatgtaaacataaaaaggctttttttcctctctggatgtttactggggttatttaataaaaacctagggatgatattgggaatttttgttggaattttaaattttaacgtgtttgtttctttttttgttttgtttcgttgtttgctttctgagctgggagttggctgtgcatgtggcagttgctttatcaaaagggtcttgctctgcttcagaagaagttttgttaccttgattgctaatgttctcccccttaaataaacctcctgatgttggaacagcaaaattgcattatgtttggaaaatctaaattaataatcccttatctctgaataaaagtaactgaatcaggttgaatttactgcttccattttaataggacagtaggaaaaaactatgcatgggctttatgtggttcaaatttttttttttttttttttgagaccgagtctcgctctgtcaccaggctggagtgcagtggtgtgatctcagctcactgcaacatccgcttcctgggttcctgcgattctcctgcctcagcctccggagtagctgggacttaacaggcgtgtgccatgacgcccagctaatttttgtatttttagtagagacagggtttcaccatgttggccaggatggtcttgatctcttgacctcgtgagccgcccgcctcggcctcccaaagtgctgggattacaggtgtgtgccactgtctccggcctggttcaaattttgtaatctccacatccatctgcatattaacaattgtcattgttggtgttatagagagagaagctgaagcacagaaaataacacgcatgttctagatttcctggtgggaactggaagtaaattctgtgtttggctgatcactgtataaagttctagtactagtctttagggaaaagccccgtcttcatggattttaatttgtcaatttgcaattctacctacttggaaatagtcaacctaatcagttactgccctgttgcaccaactattaccataggaatctgaagatggtatgcaaccaacatgaaaaagagatccttttctcctggtaatcagtttgtaccctacaaacaattcgttggttttaagttgtatagagggaaccatgatgtgaatatgcctgccactgggtttatagaaaaccgatgactcctgaggaaattctcagcagggttgtctttcagtgaaaagaaccctttagaaagatgcagtaactcacactttactgcacataaagtcatgtccctcagggtggactctcaggtgtcatacagtttatgactcatgagtgctgcagctttgtgatctaataaacaagtaaagacggtgggagaattatattcctgtacaaaaagccacttcacctttcattatataggaaaaaagccatgggaatattaaatttttagtggcatttttagagcattttctgtgatctaaagtgcctgcattgagatattaagatacttaagaacaaagtaaaataaagagaagtattaatagcaggatccctttggagctaggttactgtggcagtggtttcaagaataactctctcagcacccaccccaggattctgatttagagatttctttgtgtgttctcttagcatatacctctaccactgagtttatcccctgctgctacactgattgataccttatttttaaatttttgtttttaaaatagacggttttttagagcagttttagattcacagaaaagttgagaggaaggtacagaggtttcccatatacttgctacctgcacacatgcttagcctctcctattataaacatcccccacagaatggtacatttgttacaatcgatgaaccaacattgatacatcattagcacccaaagtccatagtttccctgagggttcactcttggcggtatacattttttgggtttggacaaatgtataatgacatatgtccatcattgtagtaccatacagagtagtttcactgccctaaaaatcttctgtgctctatctgttcatcctccccctgcccccaaccacccaaacccgtggcaaccactgatctttttagtctccatagttctgccttttccagaatgtcatatagtgggaagaatgtcatatagtatggagcctattcagatgggcttctttcacttagcaatattagttaagttcctccatgtcttttcatgggttcatagcccatttccttttagtgttgaatgacattccattttctaggtgtgtaccccacagtgttatttattcattcacagtaccttattttttaactgatttttttggggtctgggactaaggtgaggtaaacaaggcagtcaggaattgagattaagaatttttaatgtaatatttttaaaaatcaaaattactgcaaaaaaactccatgatgaacaaaatatcaactttttagacagagattgagtcacgctcaattgacatcaagccatgcatagttctcctactgccttattaaaatggaagcagtaaattcagcctgattcagttacttttattcaaagataagggattattaatttagatttgtcaagccctctgaatgtcatggacaattgtgagtgaaattccgtgtatcgtctaactccccatggatgttatcttgctcagaaaccttgttctccctccaaggaaggcactacttctcctgtagccttctcaggtcgaagttcttttctcaaaatcctcacagcgttgcccctagaggtgggaatgtcctcttttcctcttcatttcctcttttcctcttcatttttgtttccaaaccactcttcctttctcttccctaaaagcccccctacctcagcttgaagtgcatgctttcagacaaatcactttgctcctccacctgttggtcatctccagacctctttctacctcatcgatgttcaccattcagactttgaagattttagctcctgccttgctgtcatcaggtgtagctgcttcatttgctgattcttaagtgatcctaatattgatctcaatgatccttccagtattccaatttgtcagttcatgattctcatccctccagtgaccttgttttcatcattctccatcacccattgcttacaatggtcatattatactccttgcaatgaccaatcactgcaactcctccaaaattttaatttcaattatttgactctccaagtactacttattaccacctcactttctccagtcctgtgcgccatacattctttagcccctggagtgtgatcagtggactcagattccactggtccctaccaccttttacctgtgtctaattcccctcatgttctcacttttgccacttgagattgcatggcccagcattctaatcattcccttgcttataccgtcacttctctattcgttgttatttatctggcaaaacaaccaccctgttgcaatgcaaggtttatgcaagggaatgcacattttcgaaatagatttttatgtttatgtttttctttcaaatctctactcattaataaatagaagtggtttgatatttcacaaatgtgatttaattgatcaagtttcacatttcattctaagtgctcagttaaacaccatgatgtattcacaacagtaatcaaagcaaggggctgtagttagttataggagcaaagagaattcatgagtttatttttatctaaatgacacccttgataacttttcgataagttattttcatgtaaattacttggaataagagcaggatttttatatagaaagctttctatgtgtcatatcctgtaaaatgtttgtccgattagtgagagatagggggaggttgaattttactaaacataatatccccagccatatctactgtaacgtttgtttaggacattacagactattatcctacaccaatttatttcacatcaaaaatcaccccatgcttgtaagaatcctcctttccccctcttgtttctattttagctcccctggaaaaataatattttaagtctaaatgagtacaataaattaaaaagttgcattgcttaatattttgaatggaatagctagatgcttgttcatttgctatctttttctttgtactgaatttctttagcttggtcagaggtagagcaggcttgactcttagtggatagtggtataggttgagtatcccaaatttaaaaatccagagtccgaaatgctcaaaaacccaaaactatttgcatgtcaacatgatgctcaaaggaaatgctcattggagtattttggattttggactttccggattccagatgctcaaccagtaagtatataatgcagatgttctaaaatcggaaaaagtcagagaccttgaaagcacttctggtcccaagcattttggataagggacactccacctgtaccttacagtggaggcttgttagatgcttgtaaatgccagcccctgcctcaagtaacaattgattctttttgtgtgctctcccaggtctaccctgaactgcagatcaccaatgtggtagaagccaaccaaccagtgaccatccagaactggtgcaagcggggccgcaagcagtgcaagacccatccccactttgtgattccctaccgctgcttaggtgagccggccggccgtggggctggtgttgattgggggcctggtcttgagggaagaaaaagaggatgctcctgttaggtcacatacacagacttgttcttcagcacattgccactctgtgttgtactgtgttttggactcttgcagttacattctgtgcactgaccctataggagcagtatttttgagttccctgcctcagaatgaatttacccagggtgtatattgaaattacaaattcctgggccagttccaggactcctgaatgaaaaatgcctatagtagcggatccgggaattcttattttaccgtatcgcatagatgattctcatgaacaggggccttgtgtgtttcttcacatagactttctagaagaaagaatctaatgtgaagctgcagcattttgttaatttctaaaaaaaaaaaaaaaaaaaaaaaaaaggctgttctacaataactactcctcttatttggtgatagtagaggaattggaattgggaaggctttttttctgcttacatcaaactggaggaaacagtctgattactaatgtttaatgtttgttttgtcacaaacctcaaatttacctcaacattttatttaaaaaaattgagtagttttatgtggtatcgtgctcttttcctctggaaactgtcatactccatatttaatctaacttggttattagtctgttcctagttgttgtttttatgtgaccagtcattgcagaagtcaagttctttgctctggtatcttacatctagatgttttccacaagtgtattcatcagtaggcaggttgtaaataaggatatagagattgtctgtggagattgtggacaaatattgatgtatattctgatgacttcttataaaggttaaaaggaatatttcaaagaaaatccaacagcaaacttacaaagtaaggatatttactgaagattccggagatctatgtaatatatggtca

SEQ ID NO: 988 - DNA, 6000 bp, Homo sapiens
aaaaatacaaaaattatctgggcgtggtggcacaggcctgtagtcccagctacttgggaggctgaggcaggagaatagcttgaacctaggaggcggagaggttgcagtgagccgagatcatgccactgcactctagtctgggtggtggagtgtgacagtgtatccaaaaaaaaatactgagattatgcaagaatctgactcgaagaagtttgaactgattaaaaagtaccaaatacttcattatatgaggccagctatttagactagtcagcgggtggttcaaatgcagaaaacagatggctttcattagccagaaaccttaaaattacataaatccacggatgcaactaagctatggatctgtgccctctccttgccaaacaggacctctcagctagcaaaacagagagctccttgttcacttttccctcctagttgagaccctgttggggaggaatgctgccaagcctgctctataaggaattttgatctcctagatgataacagagagaaactttttggagaaagggaacaccctgtttgaaaggacaacaagagaacttgttcaagaaggtggctttgcatttaattgaaaattgtagcaactgtaggcgtagggtttccagattcacatctgcagactggtccagattaggtatatatgtttatattcgtttatgttatccccttaagcctcttttaaagccatttctaaaaattgctttggaaagtccatttcacttcagtattctttatattgtggctcaaaaatattttttttctggtaacaaaaatattttctttctgtttttaagacttgtagcatttttaagtttgatatgtacgtctctgtagttcagagcacttggtaaacagcctcttgcttttgaggcaatttatgaatgcttcattgtttttagctggttattttgttcattgtcaggaacactgttttcccatgggaaagcatctccagttttatgatgtcagtggcaagtcattcagtttacaagaattaccttcatattcagtcttagaaaagcatagaccacaaacggccagttatatcacagttctcatcttttaaatgttgtcttagatttttgcaaagtaatcttaactcaccttagaatagtgttaagacataaatagaactaaaatgtagtagttaagtggttatatttcccatctactaaggtatttatatttcttttcttttagaaaataaaaatgtttaaaaaattaggaataattatctttaggatgactttgtaagactgtgcttttttactggcagcaaatacctgccagatttcaggtatttggcaggtaaattgaatcttaaaagatttcaattttaagagtgtccatattaacagatcctgaataggaccctgtgtatcatttattaagtcatttcttggaggcttcactcaggaaaagggagttaacccttggatggcaatgtttaatgtggccacatttccttctggctgaatgccagggagtggctgcgcttagcaaccaggctttgtttcataaatgggttatttgatgcaggtgaggatgccgtgagttgtttgtcttgttttaattcagggagacaggcatatgtagtgaaagcatggaattgtttgcagatgggcttcagtaagaataggaaggtttctggttcaatttgtatctccaagctaattgctctgatttccatatacacatctggtgttggttcggggggaaaaaattttacttgagaaacatggcttttgtgagttgatatttatttgtgaagggcctcttgtaatgtcaaatgtaagaagatctatacacacaaccaattttacaatttctaattcaacagcttaccctattattgaggattcgcagtttaaattattaaatgatctccacttgaagaaaatagagcatgttaatcatcacgattctccaaacatttatttttaaagttaatattaaatctcatctggtggaaaacctgacaggaactgaagcatatattttctagtctaaactctcattgttaaaatgaagacaacatgagacagttatagcgccgtaatcaagttatttgaaaaaaatgttttaaaaattaccactttttggtagtcaacatacacacatatgccaacagatggcattaaaaaatggcaagaacatgagacaattatagggtcataataaatttatttgaaaaaaatgtttaaaaaattaccactttttgatagtcagcatacacacatatgccaacagatgacattaaaatagctgtaaagtcaagaagcagggaggatgacaaagtgaaaaatagaagaaatcaaaggaagttaagtcaaaagaggaaaaaaaaatgaagcatttacttggtttgtcaggtagggtgatccagtgtattttgccaaaaactttcctggttttagcaccaaatgtctcagaacatggcagctgatgacctccctcacagtgagtgatcccagagagcaatgaagaattgtgatgcccttcatgaccttgttttggatgttacacatcatcatgcccttcagtgacctttctggtagcaaagggtttgtttttaaaagagttgcagcatctttaagtctaatatatacatgctcggaagttacaccatcatcacttctgctgtactccatttgttgcacagacagaccctgatacattgtggagtttcccagggtccatgaatagcaggaggcagggactattgggggccttcttggaggctggctaccctggggagagaaattgtcaatttcctctccttgcggggaggaaatggaatcaagtgcatttgtattgacaagaaggtagaacgctttccttagacattgtaatgaacagattgtggataaacaaaagtacagagagagtttgaggcagaggaggagactgtttcaacagaatatttaccagctatggtaaaggctcattagtgtctccgtacagttaacaacatgctgccaagactggaaatctttgggacaggaatgaattcggaaggtgaacagaataaagtactgtgggaacaatggcgattccattagtggattgtacattccttacgggcagggccctccatagcatctgatgtagggccttatccacaggtatctgattattatttgactttctttaatgtttttgcagtgttattatctatactacttatttcagtaagattgacaacatttgcatttcgatttctaagatcaagacaatgaatttcctcttaatccctcaggaaagctgtgaaatttaaatttatagagcattctacttagcctgctgctttgcatctgtcagagaatgagaccccccagtttcatggaagtcacaggaagtggcaaggggctcagatggagttgaggggttctagctatttctgcagatgatctggatattttggcatcggctgctttgacttaaccatctggcaatgtaaaggcagaatttcgttaaatattggaaaagttacttgaaaacatggctctagagattttgccagcagcttttgcactcatgacttggttcaatctaagacctgttttgtttttttgttgtaaggacctaagtcctctgttgggttttgacgaagtatgtgtaaaaatgactaaaatggccagaggtatcttattttacatttatgtgggaagaaatgtttggaaactgtttcatttctttaactgaaaatttctcagtgcaattttagttggtgtttttcctcctgtggacagtttttaggaatgatacaagttatcgtggaatcacccagttcttgagtgtgtgaacgaatggcttctgctggaagttaattcttcttggcatgggtgtctcacatttccccagcagctggatttgacaagggagggcctatcatgattaatatgccttctaattgattggtttaataacacctttactcctgtggatatatttttcatttcttgctgaatttttttttctttttgagataccagaacctgttaagtgacacggtatagatatttcaggacttccattttctcttttaaaaatatttttgtaaaggtaatgcctgtacacagaagagtttgaaaatacagaaggcaccctttttcatgaagttattttgtgaagtggtctattgcctgcaatggtaatagctaggaccccttacttactacccagcaggcactatgtagagctccaaatgagaaaatgttggctccttgcagatggttgggagaggagacaccagcactcttaacagacttgttaagagttgagactgataaccagagaatattctgggggaaaccaggagggatcgccaacatactcagttatatttgtggatggtgaattctacagtgaatttttctgttcaaaatcataatacagtcacttgctaactaccaacgccatacttgctctcagtgctgagaggtggcacaaatattattttcagtcttggtcatcaggcagggcctggcaggcatcatgctctgtgtgagtcagtggagtttattataagaatgcggtagcctccacagtgattatatttattataggaaaacgtgtaattttgttgtcagaacctttcagcaggtaccacaaaatctcatatgggaaaacgtgtaaatttttcatgaataaattcctttcggtattggtaatttccttctctgttttagtataaaagaaagcattgccttataggtggctaagaacatctgtagcatacataacacttaatctaaaggagtgttgaagaccgggctgattcctaattgagaatgagcaagaatagaactctttttgatagttatccctgttcttcctccaagcctctgccttggagctatggatactataactaactgaagcttcttctttcaggtacccactgatggtaatgctggcctgctggctgaaccccagattgccatgttctgtggcagactgaacatgcacatgaatgtccagaatgggaagtgggattcagatccatcagggaccaaaacctgcattgataccaaggaaggcatcctgcagtattgccaagaagtaagtcctgtccggtggctagcaattcacgttggatcacatgcatttgttttcaaaaaatttaacttcttgtattttgcatcagtattttaaccctacagtaaaaatcttggttcctaatgattcaccataccattaatatatttatttgcattaccctatgatatacatataaatgtttttaaaattatgatgtcgtattatgaccatcactaaacagtagtttaagatgtcacagcacttttttttttcctcactctgtcacccaggttggagtgcagtggcaagattatggcttactgtagccttgacctactgggctcaagcaatcctcccacctcagcctcccaagtagctggactataggcacatgccaccaggcctgactgattttttttaatttttagtagagatggggtctccttgtgttggccaggctgtctgaaactcctgggctcaagcgatcctctggctggacctcccaaagtgctgagattacgggtatgagccaccatgctcagccctccacactcctttcatcttcagtatatatctcaccacggctctacagtcaaggtcttttggttaaaagtgctagcattaatttttttctgttaccagcttgatacatattttagttcatttgtatctgtttgtattctattatagtttggttttttcctcccttattaattttactttttgactatcatgttagttctatgaaatatactcagaaagctcacttttcactcattctctattgataaacattttcattgttcctgatttatttttttggcaaaagaaaatacatatttttccttcttgtacaaaaaaagtacaaagttcactgttctgcactttgcttttttttttttttttttttttaacttaactttgtatcctggaaat

SEQ ID NO: 989 - DNA, 6000 bp, Homo sapiens
ttgagataaagaagttaatcatgtccttctgtcttggaggaggtagaaagagatgagaatgaatacaattcaggatctacttctggtctttgatgaggagttagcacacggttctgggaggaaagacaggttaagaggcatgtgaaactctcaaatacgtcactgcgtctgccaacgtacatgatacccagcaagctcacatcttcatggaaagcatggtaattcccaacactaccggaagtctggagtggctaagtaatccatatattcaaccaggaagcagctaaagaaatattctaattacctaggaaggtttctgatttcaaaaggacatgaataaaaagtagaaggaatccactcccaaggacggacatcagagtagcttaaaatgtgagaataattttaggggaattttagaggtttggttatagacttatgttcccccaaaattcatatgttgaagccctaacccccagtaccttagaacatgactgtatttgggtagggcctttgaagagctaattaaattaaggccactggcgtgggccctaatataatctggctggtattcttgtaagaggaggagattaggacacacagaaataccagaggtacctgtgcagaggaaagaacgtgtgaggacttagcaagggtgcagccatctgcaagccaaggagacctctgaggattccaatcctatctgcatcttgatcttagacttttctggaactgtgagaaaataaatttcttggtttaagccacccagtctgtgatattttgttatggcagctctagtaaactaatacagattttaaatgtcattaaatgtcaatgtttaagctttgacaaaattttctaaaggaaagtataaaaggtcattttctttcttttcagagcctgatgattgcgggaggggtaagccagctgcatggggatcatgatgcaatgctgatgcaggacagacagaaagtagatctcttccatttctattttttttttttctgttgagttgaatgatcttcagactgaaaatgaaagaaaggtcactggaaataaaggccaaagatgagtgacaggattatagaataagtcttagctgttctaaagaaggacatattatgtacccccacccccaaattcatatgttgaagtcctaacccgacagtgtctcaaaatgtgaccatatttggagatagggtcaaagatgtaattaaggttaaatgaggtcattagcatggatcctaacccaatatctgctgtccttataacaagaggagattagggcacagtaagacacagagggaagaccatgtgagaatacagggagaaggtggccatctgcaagccaaggagagaggcctcagaagtaaccaactcagccaacacctcgatttcagacttccagcctcctgaaatgtgaggaaatacatttctggtgtttgatccatccagtctatggtaagttatggcacccctgcagggttcatctggctcagacttaacgattgcttttggtgatatttatagggcacagataacagcctaaacacaagacgacagaaacgcggcccagcagactatgcataaaatagaaatggggtatctggaccaattggagtctgcagtgggatgcggttactaaaacagtcaaatgcaacatgaggctccaggcagagtagtgggcaacatctcccatgttgcagcagtcagagcacacttcgagtactgtaaaaagacacagacaagccagaacacatttagagaatggccaaggtgtggaaggaaccagaaaccatgccattatgcaactgttgaaggaagtgcctgttttaccttgtgaagagaagactctagaggaagaagtagcatgaaaaccgctggcaaatttgtaaagatctgaagtgtggaaaagaattattctgcttggtcactggggatacaaggatatctgagtgggagtttaaaggcgggggatgtgagctttaaatgggataagaacattctagtaaccagaaatgcccaaagatagaatgcacagtctggagagccagtgaatatctcacaaatggagacacttgaaactaggatggggatgctgttgtaggaattccagcagacaagtggttgttggttccttccccaactttgtagggttataactagggatgttcctgcgttttctgcttggaggatctgcaagacacctcagggcaggaaatggcattaaatgcagaacagagctagtggctgaaaagcaaaaagccatcaggatctctgagtagtgaaggaaccagagaacatgcaggcaatgtccatcattctgacgcaatcagcagcataatcatcttcccccaggaacatcttgaccagggaatgtgtcagtgtggtgaatttcaacagtggaaagagaaactgctaaatctaagaactttaatttttatagattatgatctcatctctacaattttgaatttcatgctcaataaaagttccttactctctttttttttttttgagacggagtctcgctctgtcgcccaggctggagtgcagtggcgcgatctcggctcacttcaagctcagcctcccgggttcacgccattctcctgcctcagcctccccagtagctgggactacaggcgcccgccacgacgcccggctaattttttgtatttttagtagagacggggtttcaccgtgttagccaggatggtgttgatctcctgacctcgtgatccgcccgcctcagcctcccaaagaaaagtccctcactcttaaagttgcctcctccttcccagggctggcttcatgggcatgcaaccctggagagtctcacaggccctgcggtgggaggagccccatgcttggtttaacgctctgccattgccatcttaaaattcttaatttaattttttttcttttttttgaggtggagtctcgctctgtcgcccaggctggagtgcaatggcacaatcttggctcactgcaacctccgcctcccaggttcaagcgattctcctgcctcagcctctggagtagctgggattacaggcaggagtaaccacgctcggctaatttttgcatttttagtagagatgggggtttcaccatgttggccaggctggtctagaactcctgacctcaggtgatctgcccacctgggcctcctaaagtgctgggattacaggcatgagccaccaggcccggccttaaaattcttaataatgtaacaaagggtctcacgtttgcattttgcagtggactctgcaagatttgtagctttggaccacgtttctctttgcattcagataccttcttttttgccttatttgctcatgcagacccggaacaaatacggaattgcggtgggtaaatgtggtgcagaaagtgaacaactgggtttgtcctgtcactttaggcttttccctgctgtcccagcttcatgtcacttacttgctattagatttgggagttcattagcttcattttcctgatgtataaataggaataatagtaacagcctctttggcttttgtaggaagtaaatgacatgaagcgtataaacaaatactgcatgacaataaatatttgtccttatttgttgaggacatccaaaggacattcaggggcaaaagtaatccaagagtcaagactgaatgcctagtgcgggaaaagacacacaagacaacatttaggggagctggtacagaaatgacttcccaggaaggaagtctgtaccccgctggctgagccatccttcccgggcctaggcacccttgtcagcgcaatgagcaagggagagaaggcaggctgcagtgcagccctcagaagggccagagcactccctggcttcagtccttcgctccaagccctgtgtggagtgggctgtggcttggtaactaaatgctacttcaggtcaagagcaggggatatatctgggcagttctagagcattctaaactatctggacactaactggacagtggacggtttgtgtttaatccaggagaaagtggcatggcagaaggttcatttctataattcaggacagacacaatgaagaacaagggcagcgtttgaggtcagaagtcctcatttacgggggtcgaatacgaatgatctctcctaatttttccttcttccccaactcagatggatgttacatccctgcttaacaacaaaaaaagaccccccgccccgcaaaatccacactgaccaccccctttaacaaaacaaaaccaaaaacaaacaaaaatataagaaagaaacaaaacccaagcccagaaccctgctttcaagaagaagtaaatgggttggccgcttctttgccaggtcctgcgccttgctcctttggttcgttctaaagatagaaattccaggttgctcgtgcctgcttttgacgttgggggttaaaaaatgaggttttgctgtctcaacaagcaaagaaaatcctatttcctttaagcttcactcgttctcattctcttccagaaacgcctgccccacctctccaaaccgagagaaaaaacgaaatgcggataaaaacgcaccctagcagcagtcctttatacgacacccccgggaggcctgcggggtcggatgattcaagctcacggggacgagcaggagcgctctcgacttttctagagcctcagcgtcctaggactcacctttccctgatcctgcaccgtccctctcctggccccagactctccctcccactgttcacgaagcccaggtgggccgtcggccggggagcggagggggcgcgtggggtgcaggcggcgccaagggcgcgtgcacctgtgggcgcggggcgcgagggcccctcccggcgcgagcgggcgcagttccccggcggcgccgctaggggtctctctcgggtgccgagcggggtgggccggatcagctgactcgcctggctctgagccccgccgccgcgctcgggctccgtcagtttcctcggcagcggtaggcgagagcacgcggaggagcgtgcgcgggggccccgggagacggcggcggtggcggcgcgggcagagcaaggacgcggcggatcccactcgcacagcagcgcactcggtgccccgcgcagggtcgcgatgctgcccggtttggcactgctcctgctggccgcctggacggctcgggcgctggaggtgggtgccgcgcctcggaaggcggggggaggctgcacggtggggacgcgataccccccaagaccttaacccaagtctttaatgcagagaagccgggggtccgtcaatgggacccctctcctctccgcccccgcttgcggacgtccagcgcatccccgctttcggcccagccctgccccagggagtcgcgctccggcccgctgagagggagcgggcgaggcgctggtctccctggttccgcgccagcccggggcgagaagggtagggggcgaccctgagcccagaccccgacttagtccctgccttggaagcgggggtcgggggaggcgagagacattcagacaggggggaagggggaaggagcacgtggggaaaaccgaaaacgcagcgtccctaaagccagtccttcgctcttgaatcgttgccctttcctttctcttgggccctggggaggaggaggaggagtcgggacagcccaggaagctaggagcccctcgcttttccctgcgttctccgcctcgtttcaccttcctctctcacccccatcccccttccttgctccaacctcttttcgcggctgctggcggcggcagcctgggtgcgaccctagcccgagccggcgtcggggtcgcgcaccgccttccacaggcaaactttgtgcatgtccgcgtctcccttttgtgtaacttgcgagaaatgggaggggtcggagacccatagccaccccgcgccttccccaagtctggacgtcccgggagttcgctcgcaccctaagctctgtctgagaggcagaaggtccgcgggaacaaaagccgcgacaccccgccctcgccgtgggccg

SEQ ID NO: 990 - DNA, 6000 bp, Homo sapiens
aaatttaaatatgtgaatttattcctagagcaatcattgtactccagtttttgccagatttctacttctgaagaggtaccactcaagcataataataatctataaccaagattaatctaaagaggaaaatttgccaaacttttttttccaagaaaaatactagtgtcctcacagtaatgattatttcttaagccatccacactaaactgaaaaaatagttacataacatttccccctttactaagcttttcacttgcaaaatcagcttcagggtttgagttctgtctgcttttcttcttatacaacaataaaaaaagaaatacatattttattgattaaacttgctactcattctggggtgtgctcattccttcccctgccaccttctgtcttctgtgtacagatgagggtgttatctgtacactggctgtgagacccacagggtgacagcgtttccaagggtttgcaaaagacggcatttcccatccatccccactccatacatttgcatctgagctctcactatgaaaaggaaaagatttttttatttctgttttcttcagcccttttctgtctacaaagccaatctcctctgttcaactcatcggaacatttatactattttacagaatagtgttgcctgaatgtagaatcacaacaaagccagttgagatctttaaattaaaaaaagaaaaaaaaaagatttcataatcaagcatagtcaagtgaaacagagagaggttgaaaaccaccagacaaaaacaaaacacaaacagaaaatgtgatttttccctatcctcctcgttgccactgttcatctcatactctgcccatcaagatgctactgaagctctctggtcctgcattcagccccttacctttgacctctcaactccttatttcaaattccctactcctgttgagaataccctgcaccagcatctgtcactcaagtgagagagagagagagagagagagagagagagagaaagagagagaaagagacagagggtgtgtgtgtgtgtgtgtgtgtgtgtctgtctgtctgtctggtagaggcagagaggaatgtaaacaaatattgtatatgcagaaacttaacctccaatccccagacctgggatataaacctggctggaaatttactaccaggaaatgctccaggattatctatgatctcatcccattgttccttactttttaaatacaggaagttttctctgtaacatatttactcagtatacctaatctgtattttccttttggtattttagtacattccactttgttttattatcatgtgcatgttttatttaccctgcaaacttcctgggagtaaggggagggaggagggaaggggaggtaatgaggtatgcagtcgaactaaaccttacattctggaagctttaaatttaaaatgcatctgtacaggtttatctttacatttgtaattgatagagattttaaaagaaatgtattaatgaaagatgctttgtaagattctcaaggtaatacaatttgcagaaacaatgtacatttctactgaatttaatgcacttctcactgatagtttagtggccacgtgaaatgcaagtaatagctatgcttatttccagaatgactgacaacattcatacaaatatctgtagaagactctagtatgcaaaaaacagtaacataaaatagagatcctctagcaacaagacttaacataaagacaacctctcccattccttcaaaccaatattgttgatcacgttatttctttttaatttttttgaatcagccattcctcatttaacctcgtgaacttgcatgttccttttcatttcctcagtcaggaccagtattattccatctagtaacttctccgcagtactaatagccttgcaaatgtcgttcaggagcctctgctggttccggtgacaagagaaaagcttctgcagtctgccagttatcatggtttctcatcgattagcaagaaccgtgactccttacagatcaccatcaaacctgagctttactattctgtgtgtcggcttctacctttagcgaggtactagtcagtagcagcaggtttccataaactataaattagcactaccacaaaggtaagatgattgtgactaggttaaaccctcaacagagggaaataaaacttaagaggaagctagatttaaaaataaataaataaataaatattagggtagtgaaacatcatatagattagggtttgttaaactcacacctctatcaacataccagccaaaatcatcaacccagataataaccatgtttcccccgatagccaaggccccattatcattgcccttattcatttcttttctacagccacctgcagcagacctattttctaagctctataaaagacagtcaactcgtaattacatcttttcagtggacacagagagaaccagataaaccaccctcaaacctcagtagactgaattacctacccttctaccaacacttcgcaaaatggcataatgtgaatctcacctccaccctttaaaggagttaacaatagctactgaaaaggtcccaaaagatggcagaaagagcatattaatgcaattaaacagaccaaaaactaaattcgaatctgcctacatgcttcctctttttatacagaaagaaatattgctcaacaaagttacatatttaagttttgacaaaagcttcaaaaatacggttatcatatgcttttaattccttaaatgtatggtttttaatctgtagtaagaccattcgggaaaactggaataattctacaaataaatgtaagtaagtcatgagagaaatcagaattctcttagttaagtgcatttttttaaaacatggaaaacgaaattctttaactcttaaaacaacctgtcttaactagccctaaggtgattcctgagccacttgtgggtaaaaatcagaagagaaaaaagttcaatgaccttgcaaattagaaactaaaaaactaatggtgtgatagtctgtacagcctcagtggaattacaggaaaacatctgcccggaaattgctttttttcttttggaaaattactaggaggctgggggaaaagaggggaaaaacgggtaaggaaggttgcaaatgttaagatgccaaacaggaacccaaccgaagtccgaagtgaaatacagcctcctctggcccaactgtcatgcaaacaacttctaagcatcttcagatgtaaagaaaaacagtcattgtgcacaggcgttagctgaatgttcgagagttggatgaatggggaagacttgttatacacctagtggtgggtggatttcactaggctgcagcctccacacagcttttctttgctgcactgcagaggcgccatcttctccgtcttaatcttcactcaattcgatccttttatctgcaccctaaaaaaaagacccttcggaccctccccagcatcctgtgcccccaggggaactaaaccagagtccccagagctgccagggaagaggccgcgccttaatcagacaaacgcctccttggatgcacaggacagagcccgtgcctccccaccatccgccactgccctttccagacgcacatcccactctccgccttatttcctccccgccaaggactttacagcccagcacagaattaagcctcggaggtgatccgagggtgggaagcagaggggccccgaggctccgccagaagccccggcagcgtctctgccccctcccaggcggacgcgcagccccgggaagggagccgggcgggagcctcggtggcgcactgagactaacgcggctcggcccacggcgagggcggggtgtcgcggcttttgttcccgcggaccttctgcctctcagacagagcttagggtgcgagcgaactcccgggacgtccagacttggggaaggcgcggggtggctatgggtctccgacccctcccatttctcgcaagttacacaaaagggagacgcggacatgcacaaagtttgcctgtggaaggcggtgcgcgaccccgacgccggctcgggctagggtcgcacccaggctgccgccgccagcagccgcgaaaagaggttggagcaaggaagggggatgggggtgagagaggaaggtgaaacgaggcggagaacgcagggaaaagcgaggggctcctagcttcctgggctgtcccgactcctcctcctcctccccagggcccaagagaaaggaaagggcaacgattcaagagcgaaggactggctttagggacgctgcgttttcggttttccccacgtgctccttcccccttcccccctgtctgaatgtctctcgcctcccccgacccccgcttccaaggcagggactaagtcggggtctgggctcagggtcgccccctacccttctcgccccgggctggcgcggaaccagggagaccagcgcctcgcccgctccctctcagcgggccggagcgcgactccctggggcagggctgggccgaaagcggggatgcgctggacgtccgcaagcgggggcggagaggagaggggtcccattgacggacccccggcttctctgcattaaagacttgggttaaggtcttggggggtatcgcgtccccaccgtgcagcctccccccgccttccgaggcgcggcacccacctccagcgcccgagccgtccaggcggccagcaggagcagtgccaaaccgggcagcatcgcgaccctgcgcggggcaccgagtgcgctgctgtgcgagtgggatccgccgcgtccttgctctgcccgcgccgccaccgccgccgtctcccggggcccccgcgcacgctcctccgcgtgctctcgcctaccgctgccgaggaaactgacggagcccgagcgcggcggcggggctcagagccaggcgagtcagctgatccggcccaccccgctcggcacccgagagagacccctagcggcgccgccggggaactgcgcccgctcgcgccgggaggggccctcgcgccccgcgcccacaggtgcacgcgcccttggcgccgcctgcaccccacgcgccccctccgctccccggccgacggcccacctgggcttcgtgaacagtgggagggagagtctggggccaggagagggacggtgcaggatcagggaaaggtgagtcctaggacgctgaggctctagaaaagtcgagagcgctcctgctcgtccccgtgagcttgaatcatccgaccccgcaggcctcccgggggtgtcgtataaaggactgctgctagggtgcgtttttatccgcatttcgttttttctctcggtttggagaggtggggcaggcgtttctggaagagaatgagaacgagtgaagcttaaaggaaataggattttctttgcttgttgagacagcaaaacctcattttttaacccccaacgtcaaaagcaggcacgagcaacctggaatttctatctttagaacgaaccaaaggagcaaggcgcaggacctggcaaagaagcggccaacccatttacttcttcttgaaagcagggttctgggcttgggttttgtttctttcttatatttttgtttgtttttggttttgttttgttaaagggggtggtcagtgtggattttgcggggcggggggtctttttttgttgttaagcagggatgtaacatccatctgagttggggaagaaggaaaaattaggagagatcattcgtattcgacccccgtaaatgaggacttctgacctcaaacgctgcccttgttcttcattgtgtctgtcctgaattatagaaatgaaccttctgccatgccactttctcctggattaaacacaaaccgtccactgtccagttagtgtccagatagtttagaatgctctagaactgcccagatatatcccctgctcttgacctgaagtagcatttagttaccaagccacagcccactccacacagggcttggagcgaaggactgaagccagggagtgctctggcccttctgagggctgcactgcagcctg

SEQ ID NO: 991 - DNA, 6000 bp, Homo sapiens
aggcaggagaatcacttgaacctgggaggcggaggttgcggtgagccgagatcacgccattgcactccaggctgggcaaaaagagtgaaactgtctcaaaaaaaagaaaaaagaaaagaaaagaaaaagaaactgaatcaaataaactgaaactaagtcaaaaataaaaattatattctaccagcagagtaaacaagtacatcaatgtttgttttccagtggaagtatggaaggaaaatttaaacaagaaagtcttcattaaatcaattaaacaaaagcttaaatttactgaaaaaaaaatttttttttgagatggagtttcattcttgtcgcccaggctggagtgcaatggcgcaatctcagcgcactgcaacattcgcctcctgggttcatgcgattctcctgcctcagcttcccaagtagctgggattacaggcacccaccaccacacccggctaatttttgtattttcagtagagatgggggtttctccatgttgaccaggttggtctggaactcctgacctcaggtgatccacccacctcagcctcccaaagtgctgggattacaggcgtgagccatcgcacccagcctaaagtttttaatttaataaatatcttaaatactgaagtcaaaaactaacattaaccttcaaatttcaaaaaaatcttaaaagaaaatttttgagacagttaattatctccaacttacctggcttatatcgtagttctgtatctaagaccccagaaagtacttcctctatcttctgcactatttcttcatttggtagactcctggcagaggcagctgcatcacccgcctggtttccttcaatgggtgtatttgtttcaccattcagctggccttcattccttccacttgacatgaaaagttatcgaaattcattaatattttatcataccattaataaaaaaatccaattaattacaataatcatatgttgtactgactgtcagatgttttacctttttcctattttagatattcaccactaataatgcttcttaccatgatctacttatattttggacatttcatttttatacaattaaagttttcagaactatgaaaattaagaaaacaggtttctaagtacactctttgttaaacaaaataatttcagaaatctaactttaggcttttgggatacccacatatttctttcaggggagaaaaattaataagagcccggtcacaaatcaaaagaaaaacatgtggcctaacattatggtagaaaccatggctacattaaagccacagctgtgcataaatcacaatcaccatcaatagtatcaaggaacacaaaagttagccacaggcacactgaataaaaagggtaacctgtaacctctgtccaggcttacattgctactgaaatgccactgaacttaaaaaggaaaataatttatgtaatttttacacaattatcaagaactctggtttataaaactcacataaaacaagtggcatttataccaacagtaaaagcatagatggcttaacacatgttccattcacagggccagagaaatttttaaataggtaagaacatatcattcgcccagtaatttttactatttttgtgtgaatttgcaaaattttgaaaaatcaaatactttcagcaacagtttgattttaacttcaattttagctaaatgaaaacacatcaattatgctccactacctgataaaagtctgaatggtcaaaaaccaaaaaaaattcagtagttacctaattattattaaggaacatctggctttctaatacaatgaattgtataattatagttataataattatcatttattgactactagtgtcatactgttctacattaactcatttaatcctaacaaaactctgagatcaccactattattcttttataaatgaagaaacttagctgaaggtcacacagctactaagaggtgaagctggtactcaaaccagaggccatattcttacacaccatctataacagaagttcgataacttgttttaactatctaaatgtcagcctcattactctaatttacataaaagcagatgagaaaaaaaacagctcactgaaatggcaaataatcaaaaacttgtttgcagactgataacgcattatgtgttgaagagaagctgcatattcctctagtaataaactgcttcgtctaatattatttttagatattccttctgtagcactttattttacaattttcctaagcatttatacataattatgacaaatttgaaaatcagaaaagtaattatggttttaaaagttaatctacaaggaagtaatgatttcatcttaaagccagcaatcgttaaccgcatttactgaaaagcaatgaaaatttcaaaccacctaaatatgcaacagtatattcctacaatgggattctatgcagccatgaagaagtccaaaagactgagactgagagggataaacctgttcacaacgtattagctggaaaaatgatcaatacaaaacaagatgatcacatatcacacaatacatggggggggaaatgaaatgacatgagaatatcaataacgtgagttttttcttttctcctttttcatgtcttctaaattataataaaacgctcattttctaaaggaaagactagcttttaaaagctacaaaaacacacctcgttaaactaagcaaacaactacttattgcagccagagatttgtcaggaaaattatattctcttagctcgggtctcttctcatccaaaacactactagcaatatcacaaaaatttaaaaagcaatgtgagtggatctatttccacttaaaaaacaacacattctgcaaaagtgataattctagcaataatacatcattgccctaataatcctgtattactttgggcacttacaactggttttcggcccattttcaaattcacgtactgctcttgctctcaacttttaaaatacaattaaaaacacttgaactcggaacacttacgtttcaagatctctttcctacttctgtactttaaagaaatgagtatcttatacaaaagcaaatatcgagagacaaccgctgaacatgacacactattttcctaagtaaacaaccatttctttaacaatctcttcgccttcaaattttgtgaagccaagcgcaaattatgtaaagtctaccagcaatgacaaaaatagcgtgtcaactggggcaggggtagcaagaaaataatagacctacacacaaagtccactttcacttgctgtaattaatcgcaaccatttcaaagtccccttccatctttatctcgagtattttaacaaactagcaagtgcatcagtttgagttcgttttaattgaaacatttaactatcagaacggctgacagatactacaggacactaggccccgaataatcttattaatagatccagacccccaagcggtctgaagctcgcaataataaagaggatttaagattaaccaagaaacggccgttagagaccctttccggtcataggcaccggccggcaaaatccgcggaggcgagagggggaggggatacgcggcggcggaggaggagctgaggaaggaactaggcccgtccctggcggacaaccgggcctacgagtagctaaacggcaggggggacccaaacaggggagaagggtgaacatcttaactcggttctgaaacagggagtcttgggttacctcggaaaaggcgaagttcctcgagggaaaaggaagggagcggctgggggggcggttggggggggcccggaaaatggatcccaggcccaggcggggccctagcggggcctgagccggggaacgactgcgtctccgaagaaaggtgccaaagaaggctaggtgagggcctaacggtccgttgggagcagaagaatctgggaggcgtttacctggaaagctcctgttgaatttcccggaatttactgaccacgaaagacctaaaaatctgctcgatgttggtcgccatggcgtccgctccgttctctcaactcctcctcgctagtcctccaggctcccagcatgcctcgggaggaggcgcacgggccaattcggtctctcgccttcctgattggctccaaagggaatgcccggtccggcccgctccaccgagggaccaatcagtgagcacggccctgctctcctctgctgtttctgagcggctggggtagaggtgctgacgtttgcgccgcgcacgactatgtccgccatgttagtgtctgacgcaggcgccattacaggagccgtctctcttgaggcgaccgtgtccgcataagttgtcagtccccagcagtgtttgggagccttaacaggcttgctaagtgcctgagattaaaggcgaagaggaagaagagcaagaagggcaacccggtgtttaacacacggctttcaggcgctctcaggtggcgccaagttcagtttcgacagggatatgcatccgggagagaatttttcagcccccgcccccactggcatgtgagaggaggaactcgctgttgccctgtgtcttccccagtgcgttctataaccagcctcatttttttttttagcaataggccggatgtcctaagcgaccggcattcaaagcccggtgcattttagtctcatcaggagtcaggcgtgtcacgagatttttccgcggtagctgctcagctctgactcgtgagcggcgcacaattggctaagaatgggtttagcattttggcgctcccccccggcgctcctggaaacactgcgtggcaccccgtaccactgtcacattataaacgtgctaaggcttgggtgtctcggctggggagcagtcaggcagcgcccagggcgggagggaatcagactagattctcgccgcggagacccagggccgcgcggaccaatggggcagggaagccgtcgtagggcggggcagtgaggggcggtgccgcgctggtcccgcgccggtcccggtgggccgacttccggcgagcgggcaagcgggaaccaggtggccacccggtgtcggtgcgtaaaccccctccgcttttacacggagcgcgcttaggctttggtttggggatttaagatcgcgaactgagtgaaaccatagaaactgatttgtagaaattttcctgttgtttgtaaatgcggtgggtgggggttggccatgtgcttttcacttgctactgttagctggtttctatttgctcttttacttttcctgttttctaagatgtcaaggcctttttgtgtctttatacatttttaggacataaccctaaattggtgtactttctctttatgcacccgttgtctctggcagattacttggttaattttgtagttggtttctactttattctccatatcctctgatacggctttatttgcctgtcttattctgcttatgttacccattctgaggaatgaggcccaaggttagtgaagtcccccaaggtcttcctgctagtatggggcagcgtctctacccaggccaaggcgctgtgtgagactcaggagcccaggcgtcctcaccactgggtagtaaggctattttcagtgatccactagagtaaacagaattttcccacactactgctatattcaaactaaagatgtaacatttgctctagatttaaagatctgtttatttctggccggatgtgatgtaatcccagcacttgggaggccaaggtgggttgaccattggaggtcaggagttcgagaccagcctggccaacgtagtgaaaccccgtcgctactaaaaatacaaaaattcgcctggcgtggcggcgcacgcccgtaatcccagctacttgggaggctgtgaggcaagagaatcgcttgaacccgggaggcggaggttgtagtgagctgagatcacaccactgccctccagcctgggcgacagagagagactgtctaaacaaataaataaataaataaaataaaaaatctgtttatttcagatacacatggcaagtaaaatgtgttttccc

SEQ ID NO: 992 - DNA, 6000 bp, Homo sapiens
taaggaggctaacatttaagtggagctctgaataatgaggagacagtcatagtaaggggtgggaacaaatataaagtccaaagcagcaagcttctgcttgggaaattggtaggacagcatggatagggtatagtgaaaagagaaaaagggatataaaagatcaggctggaagagcaggcagaagacagactgcacaaagggctttgaaaggcatggtaaggaatttgagttttattctgagtattattagaatactgaggagtttctgaagccactgacaagcttaatgtagtatatgaactgaccattttttcatttttgccaattgagagataagggtggaggctgggcacggtggctcatgcctgtaatcccagcactttgggaggctgaggcgggcagatcacctgaggtcaggagtttgagaccagcctgaccaacatagtgaaacccggtctctactaaaaaaacaaaaaattagctgggtgtggcggcatgcacctgtagtaccagctactcgggaggctgaggcagaagaatcgctttaactcaggagccagaggttgcagtgagctgagatcacgctactgcactccagtatgggtgagagtgagactctgtctcaaaaaaaaaaaaaaaaaaaaagtcagagagagataagggttgagatctattagagtaacaactgttaaaaactttgttttgtgagacaggttctcatcttactctgttgcccaagtagctggcactacagatgtgcaccaccatgcctggctaatttttgtattttttttttgtagagatcgggtctcactacattgccctggctagtctcaaactgctgggctcaagagatccttctgccttggcttcccaaagtgctgggattgtaagcgtgagccactgcacgtggccgcaagttgtatttaatagcaatactaaactttccatttacaaaaatacacaacaaaatgcctttaatctgtattaggcacttactacttttccaatggatgtgttttatcaggtttaaaacagtttaagataaggaaatgccatattctgaacaataggttaccttaagtttataacatattggcaagcattcaaattaccaaataaattttaaggtcaaggaaagcactcaaccctgaatagtagtctatattttattttattttgagatggagtctcattctgtcgcccaggctggagtgcagtggcatgatgtcagcttactacaagctccaccccctgggttcaagccattctcctgcctcagcctcccgagtagctgggactacaggcacccgccaccacgcccggctaattttttgtatttttagtaaagacggggtttcaccatgttagccaggatggtctccatctcctgacctcatgatccgcatatctcggcctcccaaagtgctgggattacaggcattagccactgtgcccagcctatctttattaacataaagtacagatatggttgacagcataccattaataacaaataataactattactccccactttaaaacatgattaccggtatttgaaatcttttcagagcaggcagtgcctgcgtttcctggggcaaccaacacttgtttgacatgatgagactgtgcaagtttccaggccagcgtatgttcccttcctccactgccaattataagtactcgggctgccattgttctgtctgtaaagcagaaattccaaaggaaaatgaaacctgcagaaagaaaaccacagtttatatcttaggatgcacattttagaaacccagggacgggcacagtggctcatgcctgtacccccagcattttgggaggccgaggcaggtggatcacttgaggtcaggagtttgagaccagccttggccaacatggcaaaacctcatctctactaaaatacaaaaattagccaggcatggtggcgggtgcctgtaatcccaggtactcaggaggccaaggcaggagaattgcttgaacctggtaggaggagatcgcagtgagccaggatcacgtcactacactctagcctgggaaacagagcaagaccatctcaaaaaaaaaaaagaaatccagatttgtaaatataatttaagtaatcatttgtactcatacaaatgacattttcatccaatgattcatttttgaaaaactgggattcataatttgagaaatatgactgtcgtcataagcataagggaggtatttcaaaaagaaggcaggctggcctagagagctaggttaaggagtcaaacgatgactctcagctccttatgtgataatctcccttctctgggcttcacttcaaaaagatttaataatcatcatgccttagttatgaaatgaatcttgttttagactcaaaatgtattataaaatatcaatttttaaaccttgaaatcttacagataattaggttatcataaattaaaggatatactgaaaactggggtaagcaaactttacacaaaaagggccacatagttctgtcaaaactactcgactcggccaccttagcaggaaagcaaccaaagataatacgaagatgaatcaatgtgccaatgtccagaaaaatttaatggacccataaacaggcagtgggtcagagatcactgttgcctatcagtactttaagtagcaggaaaccatcaaaggtttgtaacaaataaacgtgactcgctttcaataaaactttatgtacggatactataatttgaatttcataaaattttcacatgtcacaaaaacctcatttatttcctgttctttttctcaatcattcatatttggtgagctgtacaaaagcaggcagcagaaggatttggtatgtgggccatagtttgctgactcctaattcaaatagcgcaatatgctagaatattggtagagaaggcaaaaatcaaattccaactcatttcactttagttctggcacctgagacttagaaggatggatacaacagcagtgtaacctaggagattaactgaaatgacatttataaataagtacaatctggcactcagcagtagtaaatgttaacttgttacatttacttaccacaagacaaactggtaacaggaaaaagaaaattgaaaacttattttgatgatgttgggattacatattttaagaaaaatgtaagctgacaatatacaaaactaacatttttttgagcacttaaccttgggcagggtactatttaaaatgcttgtcatgaaagaatcctatgagggagatactattactatcaccaatttgcagataagacaaggaggcccagataggtaaataacttgctggaggtcacacaggtaagagggggtggagcctaacagaagcaattttgcttcagattctctcaacaagtgaaacgatgatcattgaaaatttgagaaaggaaaaaaaaaaaccctgttaaattacagtctcggaaggaacagctactttagtgtaacgggaaaacacattttacttgccatgtgtatctgaaataaacagattttttattttatttatttatttatttgtttagacagtctctctctgtcgcccaggctggagggcagtggtgtgatctcagctcactacaacctccgcctcccgggttcaagcgattctcttgcctcacagcctcccaagtagctgggattacgggcgtgcgccgccacgccaggcgaatttttgtatttttagtagcgacggggtttcactacgttggccaggctggtctcgaactcctgacctccaatggtcaacccaccttggcctcccaagtgctgggattacatcacatccggccagaaataaacagatctttaaatctagagcaaatgttacatctttagtttgaatatagcagtagtgtgggaaaattctgtttactctagtggatcactgaaaatagccttactacccagtggtgaggacgcctgggctcctgagtctcacacagcgccttggcctgggtagagacgctgccccatactagcaggaagaccttgggggacttcactaaccttgggcctcattcctcagaatgggtaacataagcagaataagacaggcaaataaagccgtatcagaggatatggagaataaagtagaaaccaactacaaaattaaccaagtaatctgccagagacaacgggtgcataaagagaaagtacaccaatttagggttatgtcctaaaaatgtataaagacacaaaaaggccttgacatcttagaaaacaggaaaagtaaaagagcaaatagaaaccagctaacagtagcaagtgaaaagcacatggccaacccccacccaccgcatttacaaacaacaggaaaatttctacaaatcagtttctatggtttcactcagttcgcgatcttaaatccccaaaccaaagcctaagcgcgctccgtgtaaaagcggagggggtttacgcaccgacaccgggtggccacctggttcccgcttgcccgctcgccggaagtcggcccaccgggaccggcgcgggaccagcgcggcaccgcccctcactgccccgccctacgacggcttccctgccccattggtccgcgcggccctgggtctccgcggcgagaatctagtctgattccctcccgccctgggcgctgcctgactgctccccagccgagacacccaagccttagcacgtttataatgtgacagtggtacggggtgccacgcagtgtttccaggagcgccgggggggagcgccaaaatgctaaacccattcttagccaattgtgcgccgctcacgagtcagagctgagcagctaccgcggaaaaatctcgtgacacgcctgactcctgatgagactaaaatgcaccgggctttgaatgccggtcgcttaggacatccggcctattgctaaaaaaaaaaatgaggctggttatagaacgcactggggaagacacagggcaacagcgagttcctcctctcacatgccagtgggggcgggggctgaaaaattctctcccggatgcatatccctgtcgaaactgaacttggcgccacctgagagcgcctgaaagccgtgtgttaaacaccgggttgcccttcttgctcttcttcctcttcgcctttaatctcaggcacttagcaagcctgttaaggctcccaaacactgctggggactgacaacttatgcggacacggtcgcctcaagagagacggctcctgtaatggcgcctgcgtcagacactaacatggcggacatagtcgtgcgcggcgcaaacgtcagcacctctaccccagccgctcagaaacagcagaggagagcagggccgtgctcactgattggtccctcggtggagcgggccggaccgggcattccctttggagccaatcaggaaggcgagagaccgaattggcccgtgcgcctcctcccgaggcatgctgggagcctggaggactagcgaggaggagttgagagaacggagcggacgccatggcgaccaacatcgagcagatttttaggtctttcgtggtcagtaaattccgggaaattcaacaggagctttccaggtaaacgcctcccagattcttctgctcccaacggaccgttaggccctcacctagccttctttggcacctttcttcggagacgcagtcgttccccggctcaggccccgctagggccccgcctgggcctgggatccattttccgggccccccccaaccgcccccccagccgctcccttccttttccctcgaggaacttcgccttttccgaggtaacccaagactccctgtttcagaaccgagttaagatgttcacccttctcccctgtttgggtcccccctgccgtttagctactcgtaggcccggttgtccgccagggacgggcctagttccttcctcagctcctcctccgccgccgcgtatcccctccccctctcgcctccgcggattttgccggccggtgcctatgaccggaaagggtctctaacggccgtttcttggttaatctta

SEQ ID NO: 993 - DNA, 6000 bp, Homo sapiens
aacccgggaggcggagcttgcagtcagctgagatcaccccactgcactccagcctgggcgtcagagcgagactccgtctcaaaaaaaaaaaaaaaaaaaaaaaaaaagactacagaagaaaataaatcaacacttgacataggccaaagcaaaacttaccattttctattaattgtttgtttcataatacaaaatgttagataagtcatacttcaatgaaggttgttagagccatgaatctaagcaagtctgtttgagagtcatgaatctaagcacagctaaagttccccccaaaaaagaggacaaaccaaccatattacaaacttgattccagaactaaatcaaggtaatgactgttatttttgtggctaaatccttcatttctaaacatcaattaatcaattccaaaaacgctaaatattcaagcaatgattcctctccatccactgcagtttaagtgggatgggtatttttacacaactgtttaataaaaatccatactcaaattcctgatactaagaaacttaatcaagccgggcgcggtggctcacgcctgtaatcccagcactttgggaggccaaggtgtgcggatcatgaggtcaagagatcgagaccagaccaccctggccaacacggtgaaaccccgtttctactaaaaatacaaaaaaaaattagccgggcatggtggcaggcgcctgtaatcccagctacttgggaggctgaggcaggagaatcacttgaacctgggaggcggaggttgcggtgagccgagatcacgccattgcactccaggctgggcaaaaagagtgaaactgtctcaaaaaaaagaaaaaagaaaagaaaagaaaaagaaactgaatcaaataaactgaaactaagtcaaaaataaaaattatattctaccagcagagtaaacaagtacatcaatgtttgttttccagtggaagtatggaaggaaaatttaaacaagaaagtcttcattaaatcaattaaacaaaagcttaaatttactgaaaaaaaaatttttttttgagatggagtttcattcttgtcgcccaggctggagtgcaatggcgcaatctcagcgcactgcaacattcgcctcctgggttcatgcgattctcctgcctcagcttcccaagtagctgggattacaggcacccaccaccacacccggctaatttttgtattttcagtagagatgggggtttctccatgttgaccaggttggtctggaactcctgacctcaggtgatccacccacctcagcctcccaaagtgctgggattacaggcgtgagccatcgcacccagcctaaagtttttaatttaataaatatcttaaatactgaagtcaaaaactaacattaaccttcaaatttcaaaaaaatcttaaaagaaaatttttgagacagttaattatctccaacttacctggcttatatcgtagttctgtatctaagaccccagaaagtacttcctctatcttctgcactatttcttcatttggtagactcctggcagaggcagctgcatcacccgcctggtttccttcaatgggtgtatttgtttcaccattcagctggccttcattccttccacttgacatgaaaagttatcgaaattcattaatattttatcataccattaataaaaaaatccaattaattacaataatcatatgttgtactgactgtcagatgttttacctttttcctattttagatattcaccactaataatgcttcttaccatgatctacttatattttggacatttcatttttatacaattaaagttttcagaactatgaaaattaagaaaacaggtttctaagtacactctttgttaaacaaaataatttcagaaatctaactttaggcttttgggatacccacatatttctttcaggggagaaaaattaataagagcccggtcacaaatcaaaagaaaaacatgtggcctaacattatggtagaaaccatggctacattaaagccacagctgtgcataaatcacaatcaccatcaatagtatcaaggaacacaaaagttagccacaggcacactgaataaaaagggtaacctgtaacctctgtccaggcttacattgctactgaaatgccactgaacttaaaaaggaaaataatttatgtaatttttacacaattatcaagaactctggtttataaaactcacataaaacaagtggcatttataccaacagtaaaagcatagatggcttaacacatgttccattcacagggccagagaaatttttaaataggtaagaacatatcattcgcccagtaatttttactatttttgtgtgaatttgcaaaattttgaaaaatcaaatactttcagcaacagtttgattttaacttcaattttagctaaatgaaaacacatcaattatgctccactacctgataaaagtctgaatggtcaaaaaccaaaaaaaattcagtagttacctaattattattaaggaacatctggctttctaatacaatgaattgtataattatagttataataattatcatttattgactactagtgtcatactgttctacattaactcatttaatcctaacaaaactctgagatcaccactattattcttttataaatgaagaaacttagctgaaggtcacacagctactaagaggtgaagctggtactcaaaccagaggccatattcttacacaccatctataacagaagttcgataacttgttttaactatctaaatgtcagcctcattactctaatttacataaaagcagatgagaaaaaaaacagctcactgaaatggcaaataatcaaaaacttgtttgcagactgataacgcattatgtgttgaagagaagctgcatattcctctagtaataaactgcttcgtctaatattatttttagatattccttctgtagcactttattttacaattttcctaagcatttatacataattatgacaaatttgaaaatcagaaaagtaattatggttttaaaagttaatctacaaggaagtaatgatttcatcttaaagccagcaatcgttaaccgcatttactgaaaagcaatgaaaatttcaaaccacctaaatatgcaacagtatattcctacaatgggattctatgcagccatgaagaagtccaaaagactgagactgagagggataaacctgttcacaacgtattagctggaaaaatgatcaatacaaaacaagatgatcacatatcacacaatacatggggggggaaatgaaatgacatgagaatatcaataacgtgagttttttcttttctcctttttcatgtcttctaaattataataaaacgctcattttctaaaggaaagactagcttttaaaagctacaaaaacacacctcgttaaactaagcaaacaactacttattgcagccagagatttgtcaggaaaattatattctcttagctcgggtctcttctcatccaaaacactactagcaatatcacaaaaatttaaaaagcaatgtgagtggatctatttccacttaaaaaacaacacattctgcaaaagtgataattctagcaataatacatcattgccctaataatcctgtattactttgggcacttacaactggttttcggcccattttcaaattcacgtactgctcttgctctcaacttttaaaatacaattaaaaacacttgaactcggaacacttacgtttcaagatctctttcctacttctgtactttaaagaaatgagtatcttatacaaaagcaaatatcgagagacaaccgctgaacatgacacactattttcctaagtaaacaaccatttctttaacaatctcttcgccttcaaattttgtgaagccaagcgcaaattatgtaaagtctaccagcaatgacaaaaatagcgtgtcaactggggcaggggtagcaagaaaataatagacctacacacaaagtccactttcacttgctgtaattaatcgcaaccatttcaaagtccccttccatctttatctcgagtattttaacaaactagcaagtgcatcagtttgagttcgttttaattgaaacatttaactatcagaacggctgacagatactacaggacactaggccccgaataatcttattaatagatccagacccccaagcggtctgaagctcgcaataataaagaggatttaagattaaccaagaaacggccgttagagaccctttccggtcataggcaccggccggcaaaatccgcggaggcgagagggggaggggatacgcggcggcggaggaggagctgaggaaggaactaggcccgtccctggcggacaaccgggcctacgagtagctaaacggcaggggggacccaaacaggggagaagggtgaacatcttaactcggttctgaaacagggagtcttgggttacctcggaaaaggcgaagttcctcgagggaaaaggaagggagcggctgggggggcggttggggggggcccggaaaatggatcccaggcccaggcggggccctagcggggcctgagccggggaacgactgcgtctccgaagaaaggtgccaaagaaggctaggtgagggcctaacggtccgttgggagcagaagaatctgggaggcgtttacctggaaagctcctgttgaatttcccggaatttactgaccacgaaagacctaaaaatctgctcgatgttggtcgccatggcgtccgctccgttctctcaactcctcctcgctagtcctccaggctcccagcatgcctcgggaggaggcgcacgggccaattcggtctctcgccttcctgattggctccaaagggaatgcccggtccggcccgctccaccgagggaccaatcagtgagcacggccctgctctcctctgctgtttctgagcggctggggtagaggtgctgacgtttgcgccgcgcacgactatgtccgccatgttagtgtctgacgcaggcgccattacaggagccgtctctcttgaggcgaccgtgtccgcataagttgtcagtccccagcagtgtttgggagccttaacaggcttgctaagtgcctgagattaaaggcgaagaggaagaagagcaagaagggcaacccggtgtttaacacacggctttcaggcgctctcaggtggcgccaagttcagtttcgacagggatatgcatccgggagagaatttttcagcccccgcccccactggcatgtgagaggaggaactcgctgttgccctgtgtcttccccagtgcgttctataaccagcctcatttttttttttagcaataggccggatgtcctaagcgaccggcattcaaagcccggtgcattttagtctcatcaggagtcaggcgtgtcacgagatttttccgcggtagctgctcagctctgactcgtgagcggcgcacaattggctaagaatgggtttagcattttggcgctcccccccggcgctcctggaaacactgcgtggcaccccgtaccactgtcacattataaacgtgctaaggcttgggtgtctcggctggggagcagtcaggcagcgcccagggcgggagggaatcagactagattctcgccgcggagacccagggccgcgcggaccaatggggcagggaagccgtcgtagggcggggcagtgaggggcggtgccgcgctggtcccgcgccggtcccggtgggccgacttccggcgagcgggcaagcgggaaccaggtggccacccggtgtcggtgcgtaaaccccctccgcttttacacggagcgcgcttaggctttggtttggggatttaagatcgcgaactgagtgaaaccatagaaactgatttgtagaaattttcctgttgtttgtaaatgcggtgggtgggggttggccatgtgcttttcacttgctactgttagctggtttctatttgctcttttacttttcctgttttctaagatgtcaaggcctttttgtgtctttatacatttttaggacataac

SEQ ID NO: 994 - DNA, 6000 bp, Homo sapiens
aaaaaacaaaaaattagctgggtgtggcggcatgcacctgtagtaccagctactcgggaggctgaggcagaagaatcgctttaactcaggagccagaggttgcagtgagctgagatcacgctactgcactccagtatgggtgagagtgagactctgtctcaaaaaaaaaaaaaaaaaaaaagtcagagagagataagggttgagatctattagagtaacaactgttaaaaactttgttttgtgagacaggttctcatcttactctgttgcccaagtagctggcactacagatgtgcaccaccatgcctggctaatttttgtattttttttttgtagagatcgggtctcactacattgccctggctagtctcaaactgctgggctcaagagatccttctgccttggcttcccaaagtgctgggattgtaagcgtgagccactgcacgtggccgcaagttgtatttaatagcaatactaaactttccatttacaaaaatacacaacaaaatgcctttaatctgtattaggcacttactacttttccaatggatgtgttttatcaggtttaaaacagtttaagataaggaaatgccatattctgaacaataggttaccttaagtttataacatattggcaagcattcaaattaccaaataaattttaaggtcaaggaaagcactcaaccctgaatagtagtctatattttattttattttgagatggagtctcattctgtcgcccaggctggagtgcagtggcatgatgtcagcttactacaagctccaccccctgggttcaagccattctcctgcctcagcctcccgagtagctgggactacaggcacccgccaccacgcccggctaattttttgtatttttagtaaagacggggtttcaccatgttagccaggatggtctccatctcctgacctcatgatccgcatatctcggcctcccaaagtgctgggattacaggcattagccactgtgcccagcctatctttattaacataaagtacagatatggttgacagcataccattaataacaaataataactattactccccactttaaaacatgattaccggtatttgaaatcttttcagagcaggcagtgcctgcgtttcctggggcaaccaacacttgtttgacatgatgagactgtgcaagtttccaggccagcgtatgttcccttcctccactgccaattataagtactcgggctgccattgttctgtctgtaaagcagaaattccaaaggaaaatgaaacctgcagaaagaaaaccacagtttatatcttaggatgcacattttagaaacccagggacgggcacagtggctcatgcctgtacccccagcattttgggaggccgaggcaggtggatcacttgaggtcaggagtttgagaccagccttggccaacatggcaaaacctcatctctactaaaatacaaaaattagccaggcatggtggcgggtgcctgtaatcccaggtactcaggaggccaaggcaggagaattgcttgaacctggtaggaggagatcgcagtgagccaggatcacgtcactacactctagcctgggaaacagagcaagaccatctcaaaaaaaaaaaagaaatccagatttgtaaatataatttaagtaatcatttgtactcatacaaatgacattttcatccaatgattcatttttgaaaaactgggattcataatttgagaaatatgactgtcgtcataagcataagggaggtatttcaaaaagaaggcaggctggcctagagagctaggttaaggagtcaaacgatgactctcagctccttatgtgataatctcccttctctgggcttcacttcaaaaagatttaataatcatcatgccttagttatgaaatgaatcttgttttagactcaaaatgtattataaaatatcaatttttaaaccttgaaatcttacagataattaggttatcataaattaaaggatatactgaaaactggggtaagcaaactttacacaaaaagggccacatagttctgtcaaaactactcgactcggccaccttagcaggaaagcaaccaaagataatacgaagatgaatcaatgtgccaatgtccagaaaaatttaatggacccataaacaggcagtgggtcagagatcactgttgcctatcagtactttaagtagcaggaaaccatcaaaggtttgtaacaaataaacgtgactcgctttcaataaaactttatgtacggatactataatttgaatttcataaaattttcacatgtcacaaaaacctcatttatttcctgttctttttctcaatcattcatatttggtgagctgtacaaaagcaggcagcagaaggatttggtatgtgggccatagtttgctgactcctaattcaaatagcgcaatatgctagaatattggtagagaaggcaaaaatcaaattccaactcatttcactttagttctggcacctgagacttagaaggatggatacaacagcagtgtaacctaggagattaactgaaatgacatttataaataagtacaatctggcactcagcagtagtaaatgttaacttgttacatttacttaccacaagacaaactggtaacaggaaaaagaaaattgaaaacttattttgatgatgttgggattacatattttaagaaaaatgtaagctgacaatatacaaaactaacatttttttgagcacttaaccttgggcagggtactatttaaaatgcttgtcatgaaagaatcctatgagggagatactattactatcaccaatttgcagataagacaaggaggcccagataggtaaataacttgctggaggtcacacaggtaagagggggtggagcctaacagaagcaattttgcttcagattctctcaacaagtgaaacgatgatcattgaaaatttgagaaaggaaaaaaaaaaaccctgttaaattacagtctcggaaggaacagctactttagtgtaacgggaaaacacattttacttgccatgtgtatctgaaataaacagattttttattttatttatttatttatttgtttagacagtctctctctgtcgcccaggctggagggcagtggtgtgatctcagctcactacaacctccgcctcccgggttcaagcgattctcttgcctcacagcctcccaagtagctgggattacgggcgtgcgccgccacgccaggcgaatttttgtatttttagtagcgacggggtttcactacgttggccaggctggtctcgaactcctgacctccaatggtcaacccaccttggcctcccaagtgctgggattacatcacatccggccagaaataaacagatctttaaatctagagcaaatgttacatctttagtttgaatatagcagtagtgtgggaaaattctgtttactctagtggatcactgaaaatagccttactacccagtggtgaggacgcctgggctcctgagtctcacacagcgccttggcctgggtagagacgctgccccatactagcaggaagaccttgggggacttcactaaccttgggcctcattcctcagaatgggtaacataagcagaataagacaggcaaataaagccgtatcagaggatatggagaataaagtagaaaccaactacaaaattaaccaagtaatctgccagagacaacgggtgcataaagagaaagtacaccaatttagggttatgtcctaaaaatgtataaagacacaaaaaggccttgacatcttagaaaacaggaaaagtaaaagagcaaatagaaaccagctaacagtagcaagtgaaaagcacatggccaacccccacccaccgcatttacaaacaacaggaaaatttctacaaatcagtttctatggtttcactcagttcgcgatcttaaatccccaaaccaaagcctaagcgcgctccgtgtaaaagcggagggggtttacgcaccgacaccgggtggccacctggttcccgcttgcccgctcgccggaagtcggcccaccgggaccggcgcgggaccagcgcggcaccgcccctcactgccccgccctacgacggcttccctgccccattggtccgcgcggccctgggtctccgcggcgagaatctagtctgattccctcccgccctgggcgctgcctgactgctccccagccgagacacccaagccttagcacgtttataatgtgacagtggtacggggtgccacgcagtgtttccaggagcgccgggggggagcgccaaaatgctaaacccattcttagccaattgtgcgccgctcacgagtcagagctgagcagctaccgcggaaaaatctcgtgacacgcctgactcctgatgagactaaaatgcaccgggctttgaatgccggtcgcttaggacatccggcctattgctaaaaaaaaaaatgaggctggttatagaacgcactggggaagacacagggcaacagcgagttcctcctctcacatgccagtgggggcgggggctgaaaaattctctcccggatgcatatccctgtcgaaactgaacttggcgccacctgagagcgcctgaaagccgtgtgttaaacaccgggttgcccttcttgctcttcttcctcttcgcctttaatctcaggcacttagcaagcctgttaaggctcccaaacactgctggggactgacaacttatgcggacacggtcgcctcaagagagacggctcctgtaatggcgcctgcgtcagacactaacatggcggacatagtcgtgcgcggcgcaaacgtcagcacctctaccccagccgctcagaaacagcagaggagagcagggccgtgctcactgattggtccctcggtggagcgggccggaccgggcattccctttggagccaatcaggaaggcgagagaccgaattggcccgtgcgcctcctcccgaggcatgctgggagcctggaggactagcgaggaggagttgagagaacggagcggacgccatggcgaccaacatcgagcagatttttaggtctttcgtggtcagtaaattccgggaaattcaacaggagctttccaggtaaacgcctcccagattcttctgctcccaacggaccgttaggccctcacctagccttctttggcacctttcttcggagacgcagtcgttccccggctcaggccccgctagggccccgcctgggcctgggatccattttccgggccccccccaaccgcccccccagccgctcccttccttttccctcgaggaacttcgccttttccgaggtaacccaagactccctgtttcagaaccgagttaagatgttcacccttctcccctgtttgggtcccccctgccgtttagctactcgtaggcccggttgtccgccagggacgggcctagttccttcctcagctcctcctccgccgccgcgtatcccctccccctctcgcctccgcggattttgccggccggtgcctatgaccggaaagggtctctaacggccgtttcttggttaatcttaaatcctctttattattgcgagcttcagaccgcttgggggtctggatctattaataagattattcggggcctagtgtcctgtagtatctgtcagccgttctgatagttaaatgtttcaattaaaacgaactcaaactgatgcacttgctagtttgttaaaatactcgagataaagatggaaggggactttgaaatggttgcgattaattacagcaagtgaaagtggactttgtgtgtaggtctattattttcttgctacccctgccccagttgacacgctatttttgtcattgctggtagactttacataatttgcgcttggcttcacaaaatttgaaggcgaagagattgttaaagaaatggttgtttacttaggaaaatagtgtgtcatgttcagcggttgtctctcgatatttgcttttgtataagatactcatttctttaaagtacagaagtaggaaagag

SEQ ID NO: 995 - DNA, 6000 bp, Homo sapiens
aaaccataattacttttctgattttcaaatttgtcataattatgtataaatgcttaggaaaattgtaaaataaagtgctacagaaggaatatctaaaaataatattagacgaagcagtttattactagaggaatatgcagcttctcttcaacacataatgcgttatcagtctgcaaacaagtttttgattatttgccatttcagtgagctgttttttttctcatctgcttttatgtaaattagagtaatgaggctgacatttagatagttaaaacaagttatcgaacttctgttatagatggtgtgtaagaatatggcctctggtttgagtaccagcttcacctcttagtagctgtgtgaccttcagctaagtttcttcatttataaaagaataatagtggtgatctcagagttttgttaggattaaatgagttaatgtagaacagtatgacactagtagtcaataaatgataattattataactataattatacaattcattgtattagaaagccagatgttccttaataataattaggtaactactgaattttttttggtttttgaccattcagacttttatcaggtagtggagcataattgatgtgttttcatttagctaaaattgaagttaaaatcaaactgttgctgaaagtatttgatttttcaaaattttgcaaattcacacaaaaatagtaaaaattactgggcgaatgatatgttcttacctatttaaaaatttctctggccctgtgaatggaacatgtgttaagccatctatgcttttactgttggtataaatgccacttgttttatgtgagttttataaaccagagttcttgataattgtgtaaaaattacataaattattttcctttttaagttcagtggcatttcagtagcaatgtaagcctggacagaggttacaggttaccctttttattcagtgtgcctgtggctaacttttgtgttccttgatactattgatggtgattgtgatttatgcacagctgtggctttaatgtagccatggtttctaccataatgttaggccacatgtttttcttttgatttgtgaccgggctcttattaatttttctcccctgaaagaaatatgtgggtatcccaaaagcctaaagttagatttctgaaattattttgtttaacaaagagtgtacttagaaacctgttttcttaattttcatagttctgaaaactttaattgtataaaaatgaaatgtccaaaatataagtagatcatggtaagaagcattattagtggtgaatatctaaaataggaaaaaggtaaaacatctgacagtcagtacaacatatgattattgtaattaattggatttttttattaatggtatgataaaatattaatgaatttcgataacttttcatgtcaagtggaaggaatgaaggccagctgaatggtgaaacaaatacacccattgaaggaaaccaggcgggtgatgcagctgcctctgccaggagtctaccaaatgaagaaatagtgcagaagatagaggaagtactttctggggtcttagatacagaactacgatataagccaggtaagttggagataattaactgtctcaaaaattttcttttaagatttttttgaaatttgaaggttaatgttagtttttgacttcagtatttaagatatttattaaattaaaaactttaggctgggtgcgatggctcacgcctgtaatcccagcactttgggaggctgaggtgggtggatcacctgaggtcaggagttccagaccaacctggtcaacatggagaaacccccatctctactgaaaatacaaaaattagccgggtgtggtggtgggtgcctgtaatcccagctacttgggaagctgaggcaggagaatcgcatgaacccaggaggcgaatgttgcagtgcgctgagattgcgccattgcactccagcctgggcgacaagaatgaaactccatctcaaaaaaaaatttttttttcagtaaatttaagcttttgtttaattgatttaatgaagactttcttgtttaaattttccttccatacttccactggaaaacaaacattgatgtacttgtttactctgctggtagaatataatttttatttttgacttagtttcagtttatttgattcagtttctttttcttttcttttcttttttcttttttttgagacagtttcactctttttgcccagcctggagtgcaatggcgtgatctcggctcaccgcaacctccgcctcccaggttcaagtgattctcctgcctcagcctcccaagtagctgggattacaggcgcctgccaccatgcccggctaatttttttttgtatttttagtagaaacggggtttcaccgtgttggccagggtggtctggtctcgatctcttgacctcatgatccgcacaccttggcctcccaaagtgctgggattacaggcgtgagccaccgcgcccggcttgattaagtttcttagtatcaggaatttgagtatggatttttattaaacagttgtgtaaaaatacccatcccacttaaactgcagtggatggagaggaatcattgcttgaatatttagcgtttttggaattgattaattgatgtttagaaatgaaggatttagccacaaaaataacagtcattaccttgatttagttctggaatcaagtttgtaatatggttggtttgtcctcttttttggggggaactttagctgtgcttagattcatgactctcaaacagacttgcttagattcatggctctaacaaccttcattgaagtatgacttatctaacattttgtattatgaaacaaacaattaatagaaaatggtaagttttgctttggcctatgtcaagtgttgatttattttcttctgtagtctttttttttttttttttttttttttttgagacggagtctcgctctgacgcccaggctggagtgcagtggggtgatctcagctgactgcaagctccgcctcccgggttcacgccattgtcctgcctcagcctccggagtagctgggactacaggcgcacaccaccacgcccggctaattttttgtattttttttttttttagtagagacggggttttaccgtgttagccaggatggtcttgatctcctggcctcgtgatccacacgtcttggcctcccaaagtgctgggattacaggcgtgagccacagtgcccggccttttttctgtagtcttaatggctcagatttctgatgagcttttttgggggtccctaagatttatctaatttgatattggcattagagtaaataaatcccatctggttgttaaagttgaatactcccatctctttagggtatgtaaattcaaaccttcttaagttgtaaattaaggactaagaatttcctctctaaaatcagtattcttttctaaaatagaaacatttgaaaagttatttattagtggttttagaatagtattgggggaaaatgttatctctttagggtatgtaaattcaaactttcttaagttataaggactaagaatttcctctctaaaatcagtatccttttctaaaacagaaacatttaaaaagttattttagtggtttcagaatagtattgggggaaaatattatttttattagaatgtaacgtaggcatgataaggtaaaatttgagttctctatgaatattttatatttgttattcagatatttttatactctgtagaagcaatcactaacctttgttgaaagcttattctgtgccaggcattatttgatgtactttgcatgttttaactcactttatcctctaactctagaagacacaagtgtgtcagtaatttggccaagaccattaacctagtaagtgatgaactgattgaggattcaaaagtggcagtctgttccagagccagtgccatgttgcttcctgtataaacaagggttaataatcgcaaaaattatattatgtgggtatttttaatagaaactgtagcaactaataacatgaaatatattcagtgacaaaagtagtttaaaagtaattttgctatgatttgagagctggagggaataattattttaatagaatttagtgaaacatgtcttaatgtaattcaaagtaagttttggtgtttaataatttatttttaacccaggcattagttgtggaaagaattatcagaaaagtagtagtctccaggttaactgttttatgaaaaatagtttatttggtaacttttaatttaacgtgaggtgttatactgtggggtttttttttttttttgagacagagtcttgctctgttgcctaggctggagtacagtggtgcaatttcagctcactgaaacctcgacctactgggttcaagtgatccgcctcagcctcccaaatagctgggactacaggtgcgcgtcaccatgcctggctaatttttgtatttttagtagagatggggtttcaccatgctggccaggctggttttgaactcctgacctcatgatccacctgccttggcctctcagagtgctaagattacaggcgtgagccactgtacttggcctgtactaaggtgttttaacatggaatgtaaatatgggtttatatgatttaatctaactctactttggggaatgtctgacaaaattaatttctattacttttagacttgaaagagggctccagaaaaagtagatgcgtatctgtacaaacagatcctactgatgaaattcccactaaaaagtcaaagaagcataaaaagcacaaaaacaaaaagaagaaaaagaagaaagaaaaggaaaaaaaatataaaagacagccagaagaatctgagtcaaagacgaaatctcatgatgatgggaacatagatttagaatctgattcctttttaaagtttgattctgaaccttcagctgtggcgctggagcttcctacaagagcatttggcccatctgagaccaatgaatcccctgcagttgtgctagaacctcctgtagtatcaatggaggtatcagagccacacatcttagaaactctgaagccagctacaaaaactgcagaactgtcagttgtatctacatcagtaatctcagagcagtcagagcagtctgtggcagtaatgccagaaccatccatgacaaagattctggattcctttgcagcagcaccagtgcctactacaacactggtgttgaagtcatctgagccagttgtaacaatgtcagtggagtatcagatgaagtctgtgctgaaatctgtggagagcacatctccagagccatcaaagatcatgttggtagagcccccagtagcaaaagtgttagagccttcagaaacccttgtggtatcatcagagacacctactgaggtgtaccctgagccaagcacatcaacaacaatggattttccagagtcatctgcaattgaagcgctaagattgccagagcagcctgtagacgtaccatcggagattgcagattcatccatgacaagaccgcaggagttgccggagctgcctaagaccacagcgttggagctgcaggagtcgtcggtggcctcagcgatggagttgccggggccacctgcgacctccatgccggagttgcaggggccccctgtgactccagtgctggagttacctgggccctctgctaccccggtgccagagttgccagggcccctttctaccccagtgcctgagttgccagggccccctgcgacagcagtgcctgagttgccagggccctctgtgacaccagtgccacagttgtcgcaggaattgccagggcttccagcaccatccatggggttggagccaccacaggaggtaccagagccacctgtgatggcacaggagttgccagggctgcctttggtgacagcagcagtagagttgccagagcagcctgcggtaacagtagcaatggagttgaccgaacaacctgtgacgacgacagagttggagcagcctgtggggatgacaacggtgg

SEQ ID NO: 996 - DNA, 6000 bp, Homo sapiens
ttatacaattcattgtattagaaagccagatgttccttaataataattaggtaactactgaattttttttggtttttgaccattcagacttttatcaggtagtggagcataattgatgtgttttcatttagctaaaattgaagttaaaatcaaactgttgctgaaagtatttgatttttcaaaattttgcaaattcacacaaaaatagtaaaaattactgggcgaatgatatgttcttacctatttaaaaatttctctggccctgtgaatggaacatgtgttaagccatctatgcttttactgttggtataaatgccacttgttttatgtgagttttataaaccagagttcttgataattgtgtaaaaattacataaattattttcctttttaagttcagtggcatttcagtagcaatgtaagcctggacagaggttacaggttaccctttttattcagtgtgcctgtggctaacttttgtgttccttgatactattgatggtgattgtgatttatgcacagctgtggctttaatgtagccatggtttctaccataatgttaggccacatgtttttcttttgatttgtgaccgggctcttattaatttttctcccctgaaagaaatatgtgggtatcccaaaagcctaaagttagatttctgaaattattttgtttaacaaagagtgtacttagaaacctgttttcttaattttcatagttctgaaaactttaattgtataaaaatgaaatgtccaaaatataagtagatcatggtaagaagcattattagtggtgaatatctaaaataggaaaaaggtaaaacatctgacagtcagtacaacatatgattattgtaattaattggatttttttattaatggtatgataaaatattaatgaatttcgataacttttcatgtcaagtggaaggaatgaaggccagctgaatggtgaaacaaatacacccattgaaggaaaccaggcgggtgatgcagctgcctctgccaggagtctaccaaatgaagaaatagtgcagaagatagaggaagtactttctggggtcttagatacagaactacgatataagccaggtaagttggagataattaactgtctcaaaaattttcttttaagatttttttgaaatttgaaggttaatgttagtttttgacttcagtatttaagatatttattaaattaaaaactttaggctgggtgcgatggctcacgcctgtaatcccagcactttgggaggctgaggtgggtggatcacctgaggtcaggagttccagaccaacctggtcaacatggagaaacccccatctctactgaaaatacaaaaattagccgggtgtggtggtgggtgcctgtaatcccagctacttgggaagctgaggcaggagaatcgcatgaacccaggaggcgaatgttgcagtgcgctgagattgcgccattgcactccagcctgggcgacaagaatgaaactccatctcaaaaaaaaatttttttttcagtaaatttaagcttttgtttaattgatttaatgaagactttcttgtttaaattttccttccatacttccactggaaaacaaacattgatgtacttgtttactctgctggtagaatataatttttatttttgacttagtttcagtttatttgattcagtttctttttcttttcttttcttttttcttttttttgagacagtttcactctttttgcccagcctggagtgcaatggcgtgatctcggctcaccgcaacctccgcctcccaggttcaagtgattctcctgcctcagcctcccaagtagctgggattacaggcgcctgccaccatgcccggctaatttttttttgtatttttagtagaaacggggtttcaccgtgttggccagggtggtctggtctcgatctcttgacctcatgatccgcacaccttggcctcccaaagtgctgggattacaggcgtgagccaccgcgcccggcttgattaagtttcttagtatcaggaatttgagtatggatttttattaaacagttgtgtaaaaatacccatcccacttaaactgcagtggatggagaggaatcattgcttgaatatttagcgtttttggaattgattaattgatgtttagaaatgaaggatttagccacaaaaataacagtcattaccttgatttagttctggaatcaagtttgtaatatggttggtttgtcctcttttttggggggaactttagctgtgcttagattcatgactctcaaacagacttgcttagattcatggctctaacaaccttcattgaagtatgacttatctaacattttgtattatgaaacaaacaattaatagaaaatggtaagttttgctttggcctatgtcaagtgttgatttattttcttctgtagtctttttttttttttttttttttttttttgagacggagtctcgctctgacgcccaggctggagtgcagtggggtgatctcagctgactgcaagctccgcctcccgggttcacgccattgtcctgcctcagcctccggagtagctgggactacaggcgcacaccaccacgcccggctaattttttgtattttttttttttttagtagagacggggttttaccgtgttagccaggatggtcttgatctcctggcctcgtgatccacacgtcttggcctcccaaagtgctgggattacaggcgtgagccacagtgcccggccttttttctgtagtcttaatggctcagatttctgatgagcttttttgggggtccctaagatttatctaatttgatattggcattagagtaaataaatcccatctggttgttaaagttgaatactcccatctctttagggtatgtaaattcaaaccttcttaagttgtaaattaaggactaagaatttcctctctaaaatcagtattcttttctaaaatagaaacatttgaaaagttatttattagtggttttagaatagtattgggggaaaatgttatctctttagggtatgtaaattcaaactttcttaagttataaggactaagaatttcctctctaaaatcagtatccttttctaaaacagaaacatttaaaaagttattttagtggtttcagaatagtattgggggaaaatattatttttattagaatgtaacgtaggcatgataaggtaaaatttgagttctctatgaatattttatatttgttattcagatatttttatactctgtagaagcaatcactaacctttgttgaaagcttattctgtgccaggcattatttgatgtactttgcatgttttaactcactttatcctctaactctagaagacacaagtgtgtcagtaatttggccaagaccattaacctagtaagtgatgaactgattgaggattcaaaagtggcagtctgttccagagccagtgccatgttgcttcctgtataaacaagggttaataatcgcaaaaattatattatgtgggtatttttaatagaaactgtagcaactaataacatgaaatatattcagtgacaaaagtagtttaaaagtaattttgctatgatttgagagctggagggaataattattttaatagaatttagtgaaacatgtcttaatgtaattcaaagtaagttttggtgtttaataatttatttttaacccaggcattagttgtggaaagaattatcagaaaagtagtagtctccaggttaactgttttatgaaaaatagtttatttggtaacttttaatttaacgtgaggtgttatactgtggggtttttttttttttttgagacagagtcttgctctgttgcctaggctggagtacagtggtgcaatttcagctcactgaaacctcgacctactgggttcaagtgatccgcctcagcctcccaaatagctgggactacaggtgcgcgtcaccatgcctggctaatttttgtatttttagtagagatggggtttcaccatgctggccaggctggttttgaactcctgacctcatgatccacctgccttggcctctcagagtgctaagattacaggcgtgagccactgtacttggcctgtactaaggtgttttaacatggaatgtaaatatgggtttatatgatttaatctaactctactttggggaatgtctgacaaaattaatttctattacttttagacttgaaagagggctccagaaaaagtagatgcgtatctgtacaaacagatcctactgatgaaattcccactaaaaagtcaaagaagcataaaaagcacaaaaacaaaaagaagaaaaagaagaaagaaaaggaaaaaaaatataaaagacagccagaagaatctgagtcaaagacgaaatctcatgatgatgggaacatagatttagaatctgattcctttttaaagtttgattctgaaccttcagctgtggcgctggagcttcctacaagagcatttggcccatctgagaccaatgaatcccctgcagttgtgctagaacctcctgtagtatcaatggaggtatcagagccacacatcttagaaactctgaagccagctacaaaaactgcagaactgtcagttgtatctacatcagtaatctcagagcagtcagagcagtctgtggcagtaatgccagaaccatccatgacaaagattctggattcctttgcagcagcaccagtgcctactacaacactggtgttgaagtcatctgagccagttgtaacaatgtcagtggagtatcagatgaagtctgtgctgaaatctgtggagagcacatctccagagccatcaaagatcatgttggtagagcccccagtagcaaaagtgttagagccttcagaaacccttgtggtatcatcagagacacctactgaggtgtaccctgagccaagcacatcaacaacaatggattttccagagtcatctgcaattgaagcgctaagattgccagagcagcctgtagacgtaccatcggagattgcagattcatccatgacaagaccgcaggagttgccggagctgcctaagaccacagcgttggagctgcaggagtcgtcggtggcctcagcgatggagttgccggggccacctgcgacctccatgccggagttgcaggggccccctgtgactccagtgctggagttacctgggccctctgctaccccggtgccagagttgccagggcccctttctaccccagtgcctgagttgccagggccccctgcgacagcagtgcctgagttgccagggccctctgtgacaccagtgccacagttgtcgcaggaattgccagggcttccagcaccatccatggggttggagccaccacaggaggtaccagagccacctgtgatggcacaggagttgccagggctgcctttggtgacagcagcagtagagttgccagagcagcctgcggtaacagtagcaatggagttgaccgaacaacctgtgacgacgacagagttggagcagcctgtggggatgacaacggtggaacatcctgggcatcctgaggtgacaacggcaacagggttgctggggcagcctgaggcaacgatggtgctggagttgccaggacagccagtggcaacgacagcgctggagttgccggggcagccttcggtgactggggtgccagagttgccagggctgccttcggcaactagggcactggagttgtcggggcagcctgtggcaactggggcactagagttgcctgggccgctcatggcagctggggcactggagttctcggggcagtctggggcagctggagcactggagcttttggggcagcctctggcaacaggggtgctggagttgccagggcagcctggggcgccagagttgcctgggcagcctgtggcaactgtggcgctggagatctctgttcagtctgtggtgacaacatcggagctgtcaacgatgaccgtgtcgcagtccctggaggtgccctcgacgacagcgctggaatcctataata

SEQ ID NO: 997 - DNA, 6000 bp, Homo sapiens
aaaatataagtagatcatggtaagaagcattattagtggtgaatatctaaaataggaaaaaggtaaaacatctgacagtcagtacaacatatgattattgtaattaattggatttttttattaatggtatgataaaatattaatgaatttcgataacttttcatgtcaagtggaaggaatgaaggccagctgaatggtgaaacaaatacacccattgaaggaaaccaggcgggtgatgcagctgcctctgccaggagtctaccaaatgaagaaatagtgcagaagatagaggaagtactttctggggtcttagatacagaactacgatataagccaggtaagttggagataattaactgtctcaaaaattttcttttaagatttttttgaaatttgaaggttaatgttagtttttgacttcagtatttaagatatttattaaattaaaaactttaggctgggtgcgatggctcacgcctgtaatcccagcactttgggaggctgaggtgggtggatcacctgaggtcaggagttccagaccaacctggtcaacatggagaaacccccatctctactgaaaatacaaaaattagccgggtgtggtggtgggtgcctgtaatcccagctacttgggaagctgaggcaggagaatcgcatgaacccaggaggcgaatgttgcagtgcgctgagattgcgccattgcactccagcctgggcgacaagaatgaaactccatctcaaaaaaaaatttttttttcagtaaatttaagcttttgtttaattgatttaatgaagactttcttgtttaaattttccttccatacttccactggaaaacaaacattgatgtacttgtttactctgctggtagaatataatttttatttttgacttagtttcagtttatttgattcagtttctttttcttttcttttcttttttcttttttttgagacagtttcactctttttgcccagcctggagtgcaatggcgtgatctcggctcaccgcaacctccgcctcccaggttcaagtgattctcctgcctcagcctcccaagtagctgggattacaggcgcctgccaccatgcccggctaatttttttttgtatttttagtagaaacggggtttcaccgtgttggccagggtggtctggtctcgatctcttgacctcatgatccgcacaccttggcctcccaaagtgctgggattacaggcgtgagccaccgcgcccggcttgattaagtttcttagtatcaggaatttgagtatggatttttattaaacagttgtgtaaaaatacccatcccacttaaactgcagtggatggagaggaatcattgcttgaatatttagcgtttttggaattgattaattgatgtttagaaatgaaggatttagccacaaaaataacagtcattaccttgatttagttctggaatcaagtttgtaatatggttggtttgtcctcttttttggggggaactttagctgtgcttagattcatgactctcaaacagacttgcttagattcatggctctaacaaccttcattgaagtatgacttatctaacattttgtattatgaaacaaacaattaatagaaaatggtaagttttgctttggcctatgtcaagtgttgatttattttcttctgtagtctttttttttttttttttttttttttttgagacggagtctcgctctgacgcccaggctggagtgcagtggggtgatctcagctgactgcaagctccgcctcccgggttcacgccattgtcctgcctcagcctccggagtagctgggactacaggcgcacaccaccacgcccggctaattttttgtattttttttttttttagtagagacggggttttaccgtgttagccaggatggtcttgatctcctggcctcgtgatccacacgtcttggcctcccaaagtgctgggattacaggcgtgagccacagtgcccggccttttttctgtagtcttaatggctcagatttctgatgagcttttttgggggtccctaagatttatctaatttgatattggcattagagtaaataaatcccatctggttgttaaagttgaatactcccatctctttagggtatgtaaattcaaaccttcttaagttgtaaattaaggactaagaatttcctctctaaaatcagtattcttttctaaaatagaaacatttgaaaagttatttattagtggttttagaatagtattgggggaaaatgttatctctttagggtatgtaaattcaaactttcttaagttataaggactaagaatttcctctctaaaatcagtatccttttctaaaacagaaacatttaaaaagttattttagtggtttcagaatagtattgggggaaaatattatttttattagaatgtaacgtaggcatgataaggtaaaatttgagttctctatgaatattttatatttgttattcagatatttttatactctgtagaagcaatcactaacctttgttgaaagcttattctgtgccaggcattatttgatgtactttgcatgttttaactcactttatcctctaactctagaagacacaagtgtgtcagtaatttggccaagaccattaacctagtaagtgatgaactgattgaggattcaaaagtggcagtctgttccagagccagtgccatgttgcttcctgtataaacaagggttaataatcgcaaaaattatattatgtgggtatttttaatagaaactgtagcaactaataacatgaaatatattcagtgacaaaagtagtttaaaagtaattttgctatgatttgagagctggagggaataattattttaatagaatttagtgaaacatgtcttaatgtaattcaaagtaagttttggtgtttaataatttatttttaacccaggcattagttgtggaaagaattatcagaaaagtagtagtctccaggttaactgttttatgaaaaatagtttatttggtaacttttaatttaacgtgaggtgttatactgtggggtttttttttttttttgagacagagtcttgctctgttgcctaggctggagtacagtggtgcaatttcagctcactgaaacctcgacctactgggttcaagtgatccgcctcagcctcccaaatagctgggactacaggtgcgcgtcaccatgcctggctaatttttgtatttttagtagagatggggtttcaccatgctggccaggctggttttgaactcctgacctcatgatccacctgccttggcctctcagagtgctaagattacaggcgtgagccactgtacttggcctgtactaaggtgttttaacatggaatgtaaatatgggtttatatgatttaatctaactctactttggggaatgtctgacaaaattaatttctattacttttagacttgaaagagggctccagaaaaagtagatgcgtatctgtacaaacagatcctactgatgaaattcccactaaaaagtcaaagaagcataaaaagcacaaaaacaaaaagaagaaaaagaagaaagaaaaggaaaaaaaatataaaagacagccagaagaatctgagtcaaagacgaaatctcatgatgatgggaacatagatttagaatctgattcctttttaaagtttgattctgaaccttcagctgtggcgctggagcttcctacaagagcatttggcccatctgagaccaatgaatcccctgcagttgtgctagaacctcctgtagtatcaatggaggtatcagagccacacatcttagaaactctgaagccagctacaaaaactgcagaactgtcagttgtatctacatcagtaatctcagagcagtcagagcagtctgtggcagtaatgccagaaccatccatgacaaagattctggattcctttgcagcagcaccagtgcctactacaacactggtgttgaagtcatctgagccagttgtaacaatgtcagtggagtatcagatgaagtctgtgctgaaatctgtggagagcacatctccagagccatcaaagatcatgttggtagagcccccagtagcaaaagtgttagagccttcagaaacccttgtggtatcatcagagacacctactgaggtgtaccctgagccaagcacatcaacaacaatggattttccagagtcatctgcaattgaagcgctaagattgccagagcagcctgtagacgtaccatcggagattgcagattcatccatgacaagaccgcaggagttgccggagctgcctaagaccacagcgttggagctgcaggagtcgtcggtggcctcagcgatggagttgccggggccacctgcgacctccatgccggagttgcaggggccccctgtgactccagtgctggagttacctgggccctctgctaccccggtgccagagttgccagggcccctttctaccccagtgcctgagttgccagggccccctgcgacagcagtgcctgagttgccagggccctctgtgacaccagtgccacagttgtcgcaggaattgccagggcttccagcaccatccatggggttggagccaccacaggaggtaccagagccacctgtgatggcacaggagttgccagggctgcctttggtgacagcagcagtagagttgccagagcagcctgcggtaacagtagcaatggagttgaccgaacaacctgtgacgacgacagagttggagcagcctgtggggatgacaacggtggaacatcctgggcatcctgaggtgacaacggcaacagggttgctggggcagcctgaggcaacgatggtgctggagttgccaggacagccagtggcaacgacagcgctggagttgccggggcagccttcggtgactggggtgccagagttgccagggctgccttcggcaactagggcactggagttgtcggggcagcctgtggcaactggggcactagagttgcctgggccgctcatggcagctggggcactggagttctcggggcagtctggggcagctggagcactggagcttttggggcagcctctggcaacaggggtgctggagttgccagggcagcctggggcgccagagttgcctgggcagcctgtggcaactgtggcgctggagatctctgttcagtctgtggtgacaacatcggagctgtcaacgatgaccgtgtcgcagtccctggaggtgccctcgacgacagcgctggaatcctataatacggtagcacaggagctgcctactacattagtgggggagacttctgtaacagtaggagtggatcccttgatggccccagaatcccatatattagcttctaacaccatggagacccatatattagcatccaacaccatggactcccaaatgctagcgtccaacaccatggactcccagatgctagcatccaacaccatggactcccagatgttagcgtctagcaccatggactcccagatgttagcaactagctccatggactcccagatgttagcaactagctccatggactcccagatgttagcaactagcactatggactcccagatgttagcaaccagttccatggactcccagatgttagcaaccagctccatggactcccagatgttagcaaccagctccatggactcccagatgttagcaaccagctccatggactcccagatgttagcaaccagcaccatggattctcagatgttagcaaccagcaccatggactcccagatgttagcaactagctcaatggattcccagatgttagcatctggcactatggactctcaaatgttagcttctggcaccatggatgctcagatgttagcgtctggtaccatggatgcccagatgttagcgtctagtacccaagattctgctatgttgggttcaaaatctcctgatccctataggttagctcaggatccttacaggttagctcaggatccctataggttgggccatgacccctatagatta

SEQ ID NO: 998 - DNA, 6000 bp, Homo sapiens
agtagctgggactacaggcgcacaccaccacgcccggctaattttttgtattttttttttttttagtagagacggggttttaccgtgttagccaggatggtcttgatctcctggcctcgtgatccacacgtcttggcctcccaaagtgctgggattacaggcgtgagccacagtgcccggccttttttctgtagtcttaatggctcagatttctgatgagcttttttgggggtccctaagatttatctaatttgatattggcattagagtaaataaatcccatctggttgttaaagttgaatactcccatctctttagggtatgtaaattcaaaccttcttaagttgtaaattaaggactaagaatttcctctctaaaatcagtattcttttctaaaatagaaacatttgaaaagttatttattagtggttttagaatagtattgggggaaaatgttatctctttagggtatgtaaattcaaactttcttaagttataaggactaagaatttcctctctaaaatcagtatccttttctaaaacagaaacatttaaaaagttattttagtggtttcagaatagtattgggggaaaatattatttttattagaatgtaacgtaggcatgataaggtaaaatttgagttctctatgaatattttatatttgttattcagatatttttatactctgtagaagcaatcactaacctttgttgaaagcttattctgtgccaggcattatttgatgtactttgcatgttttaactcactttatcctctaactctagaagacacaagtgtgtcagtaatttggccaagaccattaacctagtaagtgatgaactgattgaggattcaaaagtggcagtctgttccagagccagtgccatgttgcttcctgtataaacaagggttaataatcgcaaaaattatattatgtgggtatttttaatagaaactgtagcaactaataacatgaaatatattcagtgacaaaagtagtttaaaagtaattttgctatgatttgagagctggagggaataattattttaatagaatttagtgaaacatgtcttaatgtaattcaaagtaagttttggtgtttaataatttatttttaacccaggcattagttgtggaaagaattatcagaaaagtagtagtctccaggttaactgttttatgaaaaatagtttatttggtaacttttaatttaacgtgaggtgttatactgtggggtttttttttttttttgagacagagtcttgctctgttgcctaggctggagtacagtggtgcaatttcagctcactgaaacctcgacctactgggttcaagtgatccgcctcagcctcccaaatagctgggactacaggtgcgcgtcaccatgcctggctaatttttgtatttttagtagagatggggtttcaccatgctggccaggctggttttgaactcctgacctcatgatccacctgccttggcctctcagagtgctaagattacaggcgtgagccactgtacttggcctgtactaaggtgttttaacatggaatgtaaatatgggtttatatgatttaatctaactctactttggggaatgtctgacaaaattaatttctattacttttagacttgaaagagggctccagaaaaagtagatgcgtatctgtacaaacagatcctactgatgaaattcccactaaaaagtcaaagaagcataaaaagcacaaaaacaaaaagaagaaaaagaagaaagaaaaggaaaaaaaatataaaagacagccagaagaatctgagtcaaagacgaaatctcatgatgatgggaacatagatttagaatctgattcctttttaaagtttgattctgaaccttcagctgtggcgctggagcttcctacaagagcatttggcccatctgagaccaatgaatcccctgcagttgtgctagaacctcctgtagtatcaatggaggtatcagagccacacatcttagaaactctgaagccagctacaaaaactgcagaactgtcagttgtatctacatcagtaatctcagagcagtcagagcagtctgtggcagtaatgccagaaccatccatgacaaagattctggattcctttgcagcagcaccagtgcctactacaacactggtgttgaagtcatctgagccagttgtaacaatgtcagtggagtatcagatgaagtctgtgctgaaatctgtggagagcacatctccagagccatcaaagatcatgttggtagagcccccagtagcaaaagtgttagagccttcagaaacccttgtggtatcatcagagacacctactgaggtgtaccctgagccaagcacatcaacaacaatggattttccagagtcatctgcaattgaagcgctaagattgccagagcagcctgtagacgtaccatcggagattgcagattcatccatgacaagaccgcaggagttgccggagctgcctaagaccacagcgttggagctgcaggagtcgtcggtggcctcagcgatggagttgccggggccacctgcgacctccatgccggagttgcaggggccccctgtgactccagtgctggagttacctgggccctctgctaccccggtgccagagttgccagggcccctttctaccccagtgcctgagttgccagggccccctgcgacagcagtgcctgagttgccagggccctctgtgacaccagtgccacagttgtcgcaggaattgccagggcttccagcaccatccatggggttggagccaccacaggaggtaccagagccacctgtgatggcacaggagttgccagggctgcctttggtgacagcagcagtagagttgccagagcagcctgcggtaacagtagcaatggagttgaccgaacaacctgtgacgacgacagagttggagcagcctgtggggatgacaacggtggaacatcctgggcatcctgaggtgacaacggcaacagggttgctggggcagcctgaggcaacgatggtgctggagttgccaggacagccagtggcaacgacagcgctggagttgccggggcagccttcggtgactggggtgccagagttgccagggctgccttcggcaactagggcactggagttgtcggggcagcctgtggcaactggggcactagagttgcctgggccgctcatggcagctggggcactggagttctcggggcagtctggggcagctggagcactggagcttttggggcagcctctggcaacaggggtgctggagttgccagggcagcctggggcgccagagttgcctgggcagcctgtggcaactgtggcgctggagatctctgttcagtctgtggtgacaacatcggagctgtcaacgatgaccgtgtcgcagtccctggaggtgccctcgacgacagcgctggaatcctataatacggtagcacaggagctgcctactacattagtgggggagacttctgtaacagtaggagtggatcccttgatggccccagaatcccatatattagcttctaacaccatggagacccatatattagcatccaacaccatggactcccaaatgctagcgtccaacaccatggactcccagatgctagcatccaacaccatggactcccagatgttagcgtctagcaccatggactcccagatgttagcaactagctccatggactcccagatgttagcaactagctccatggactcccagatgttagcaactagcactatggactcccagatgttagcaaccagttccatggactcccagatgttagcaaccagctccatggactcccagatgttagcaaccagctccatggactcccagatgttagcaaccagctccatggactcccagatgttagcaaccagcaccatggattctcagatgttagcaaccagcaccatggactcccagatgttagcaactagctcaatggattcccagatgttagcatctggcactatggactctcaaatgttagcttctggcaccatggatgctcagatgttagcgtctggtaccatggatgcccagatgttagcgtctagtacccaagattctgctatgttgggttcaaaatctcctgatccctataggttagctcaggatccttacaggttagctcaggatccctataggttgggccatgacccctatagattaggtcatgatgcttacaggttaggacaagacccttatagattaggccatgatccctacagactaactcctgatccctataggatgtcacctagaccctacaggatagcacccaggtcctatagaatagcacccaggccatataggttagcacctagacccctgatgttagcatctagacgttctatgatgatgtcctatgctgcagaacgttccatgatgtcatcttacgaacgctctatgatgtcttatgagcggtctatgatgtcccctatggctgaacgctctatgatgtcagcctacgagcgctctatgatgtcagcctacgagcgctctatgatgtcccctatggctgagcgctctatgatgtcagcttatgaacgctccatgatgtcagcttatgaacgctccatgatgtccccaatggctgatcgatctatgatgtccatgggtgctgaccggtctatgatgtcgtcatactctgctgctgaccggtctatgatgtcatcgtactctgcagctgaccgatctatgatgtcatcttatactgctgatcgttcaatgatgtctatggctgctgattcttacaccgattcttacactgacacatatacagaggcatatatggtgccacctttgcctcctgaagagcccccaacaatgccaccgttgccacctgaggagccaccaatgacaccaccattgcctcctgaggaaccaccagagggtccagcattgcccactgagcagtcagcattaacagctgaaaatacttggcctacagaggtgccatcatcaccatctgaagagtctgtatcgcagcctgagcctcctgtgagtcaaagtgagatttcggagccttcagcagtgcctactgattattcagtgtcagcatcagatccctcagttttagtatcagaggctgctgtgactgttccagaaccaccaccagagccagaatcttcaattacgttaacacctgtagagtctgcagtagtagcagaagaacatgaagttgttccagagagaccagtgacttgtatggtatctgaaactcccgccatgtcagctgaaccaactgtgttagcatcagagcctcctgttatgtcagagacagcagaaacatttgattccatgagagcctcaggacatgttgcctcagaagtatctacatccttgttggttccagcagtaactactccagtgctggcagagagcattctggagccgccagccatggctgccccagagtcttcagctatggctgtcctggagtcttcggctgtgaccgtcctggagtcttcgactgtgactgtcctggagtcttcgactgtaactgtcctggagccttcggttgtgactgtcccggagcctcctgttgtggctgagccagactatgttaccattcctgtgccagttgtttctgcgctggagccttctgtgcctgttctggaaccagcggtgtcagtccttcaaccttctatgattgtttcagaaccatctgtttctgtccaggaatcgactgtgacagtttcagagcctgctgtcacagtctcagagcagactcaagtaataccaactgaggtggctatagagtccacaccaatgatactggaatctagtatcatgtcatcacatgttatgaaaggaattaatctatcctctggtgatcaaaatcttgctccagagattggcatgcaggagattgcattgcattcaggtgaagaaccacatgctgaggaacacctgaaaggtgacttttacgaaagtgaacatggtataaatatagaccttaatataa

SEQ ID NO: 999 - DNA, 6000 bp, Homo sapiens
atggaaccaaaaaaggagcccgcatagccaaagcaaaactaagcaaaaagaataaacctggaggcatcatattacccaacttcaaactatactacaaggctatagtccccaaaacagcatgatactgatataaaaataggcacatagaccaatggaacagaatacataacccagaaataaagccaaatacttatagctgactgaactttgacaaagcaaacaaaagcataaagtggggaaaggacaccctattcaacacatggtgctgggataattggcaagctacatgtagaagaatgaaactggatcctcatatcttgccttatacaaaagtcaactcaagatggatcaaagacttaaatctaggacctaaaaccataaaaattctagaagataacattggaaaaacccttgtagacattggcttaggcaaagagttcatgaccaagaacccaaaagcaaatgcaacaaaaatgaagacaaatggatcggacttaattaagctgaaaagcttctacacagcaaaagaaataattagcagagtaaatagacaacatacagagtgggagaaaattttgcaaactatgcagccaacgaagggctaatatccagaatctacaaggaactcaaacaaatcagcaagaagaaaacaaatactccctcacaaagtgggctaaggatgtgaatagacaattctcaaaagaagatatacaaatggccaacatataaaaaaaaatcaacatcactaattattaggaaaatgcaaatcaaaaccacaatgggataccaccttactcctgcaagaagggccacaatcaagaaatcaaaaaataatagatgttggcattaatgtggtgaaagggatcacttttacactgctggcaggaatgtaaactagtacaaccaatggaaaacagtagagtttccttaaataactgaaagtagatctaccatttgatccaacaatcccactagtgggtatttagccagtggaaaataagtcattatatgaaaaagacacttgcacacacatgtttatagcagcacaattccccaagtgcccaccaatcaacaagtggacaaaatgttatatatatatgtgtatatatatgtatatatatataatgtgatatatatgtatatatatgtatatatatataatgtgatatatatgtatatatataatgtgatatatatgtatatataataatgtgatatatatgtgtatatataatgtgatatatatgtatatatatataatgtgatatatatgtatatatatataatgtgatatatatgtgtgtgtgtatatatataatgtgatatatatatgtgaatactactactactactactactactactaatactcagccataaaaaggaatgaaataatggcattcacagcaacctggatggagttggagaccattattctaagtgaagtaactcgggaataaaaaccaaacattgtatattctcactcataagtgagattatacaagctatgaggatgcaaagtcataagaatgatacaataaacattgggaactcagggggaagggtgagggtggggtgagggataaaagactagacatcgggtacagtatacactgcttgggtgatgggtgcaccaaaatcccagaaatcacgattaaagaacttgtcaatgtaaccaaacaccacctgttcctcaaaaactattgaaataaaaaataaatacataaaagaagttgaggttaaattaatctaagtagggagtgcatttgggccaagcttgaggattgcaacgttggagcacagatttaagttgccctgaatctacactctgataagtggcatttataagtggatttttaaaggcaaaagggggagacagggagagggctgatacaaagctgtttgtcaggaattcttattggtttacagaaataacattgataagtgcttattagtccattttcatgctgctgataaagacatacctcagactgggcaatttacaaaagaaagaggtttattggacctatagttccacatggctgaggaggcctcacaatcatggtggaaggcaaggaggagcaagtcacatcttacatggatgacagcaggaaaaaagagagagcttgtgcagagaaactcccttttttaaaaccatcagatcttgtgagacccgttcaggatcatgagaacagcacaggaaagacccacccccaagattcaatcatctcccaccgggtctctcccacaacatgagtgaattatgggagctacaggatgagatttgggtgaggacacagagccaaaccatatcagagtgattgactatacattgttaagctacagggtgtggattacagcgtccagtgtggcattattaggttaatccatagctattaatacctgtggcaatagtaagaggtttcaagagatgaacacacagctgaaagtggggagtagggagtggttgctgtcttattttaatgtctctctgggcctgataattttaaaagccttgcattcttcggatacaagttcctttctttttttcaagaacaacagagaaaggctgcctggctacctttacctgcagcacctctgatagtggctgcttggcagctggttaggtaaacccaatttctactggataaacttcatggacattcacccatgttagtactggggaatgctctgaaatagcaaacttgtccatacagctcccttgctgctcagagggtctggagaggaacagcagaggcccagccccaaatacttcttgtaccggcttctattatgagaggtgatggcacctttaggcacttatatttcaggtagaaggagcaggaataaagaagagagggccacaatctgaaatatcagttctggatctccctgggggcaagacactggcccttagctgagctattctgtcatcactgtgagccctcatgctcgacctcaccggagcacccctcgatcatgtgctgaatgcctagcacgcgcctggcactgtggggtacagaaatctagagcacagagctgagttttcagggcttagctgtcctcacatctgtgacacaaacaaggatcaaggaaagttttgtttttgttatttttatttttttttaagttggggccttactctgtagcccaagctagagtgcagtggtgcaaacatagctcattgcaccctcgaactcctgggctcaagtcatcctcccaccttggcctccagagtagctggaagcccagctcaaggaaagcattaacatgttctacttttcaccataactcctgtgtattgggaaatggaaaatgagcttttgaagtggcctattcgcttcctccatgagtacttcctgaacactttcctcttggccactgctcccaagaccccctcaaagtctctctcctggacttccagcttctggaatgagccccaagagtggcacttagctccagctcctagtagctcactccttccttgctcacctgtgccccccacctgtctccttaggggcagtggctttgtcttactcatttgcatatcacaaatgtccagcatagaagccagcatggggcccagtaagtgtttgtggagaaagaaagggaagaggtgaagaagggaggagacggagggagaaaaggagggcaagagaggggatgtcatgtcatgtcatgtcatgtcatgtcagttctcccttcctagatctggacaagggaaagaaaagcaagcaagcctgaccgcctcagtgcagaccctctaagatgcaagccttccccaggtaagacagttccgcagggtgcttctgtgggctggctttctgagcagccatctcaaagtatgcgaaagaaatagattttgggccgggcacggtggctcatgcctgtaatcccagcactttaggaggccgaggcgtgtggatcacctgaagtcaggagttcaagaccagcctggccaacatggtgagaccttgtatctactaaaaatacaaaaactagccgggcttggtggcgcatgcctgtagtcccagctactcaggaggctgaggcaggagaatcgcttgaacccaggaggtaaatgttgcagtaagccgagattgccccactgcactccagcctggatgacaagagtgagactccatctcaaaaaaaaaaaaaaaaaaagattttaggggtaaaatattttgctttccttcagtggctgggccacctgtacacaatgcctgaacccaggtcctgcagcccccagcttggctctccaaagctcaccagtatcaaaggatttcagcttctgctcctctccgcagggctctctggtgggccccagacagagatgaaggaaaagtctggccttgaccttgaggaccaaaagcgaccacgtcagacgccagcagtctcgtgcccagttgccaagggatcacctgaggaaggcccttaaaatacaggtggtaatgcaggggtcttgggatggccccggaccgttcatttctaataatttcccaggtgaagccaatgctgctgttccaggaaccaccctttgagaagcacgggtctataccacacgcacagaagaggaaacgaaacgaggcaaaggaaaccagtccctttactcgcgcccaggcaggacaaagcgggcaagggtgggggcgggggcgcgggcgcgggcgcgggcaggcggacggacttgcaggaaatgcagccgggaggatgggcaggttgtgggatgctccgccgttccgcgaccacccgcctccccggcccagcagaaccgggtccaggctgggggaggtgctagcggtgtatgtgagtaacactgccccctcgtcgtggcaccgcccccttcttccctgcccccttccccgccccctggattctgaagtctgaagtcatgcaatttgacttttcctttctggaaaccagcgagcagaaatgaaaccgaaactgaattgtccgggaaattcgcggtgggggcggagagcgcagggagaagtaagcccagtgcaggatcctgaggcccgtgtttgcaggaccagggccggccttccgattccccattcattccagaagcaccgaaccacgctgtgcccggatcccaagtgcagcggcacccagcgtgggcctggggttgccggttgacccggtcctcagcctggtagcagaggccaggccagtgccacaaggtcaggctccactgggccctgcccgcccaggagcctgtggtgtcaggcacctgaaggggtgggttgcccctccacacctgtgggtgtttctcgttaggtggaaggagagacttggaaaagaaaaagacacagagacaaagtatagagaaagaaataaggggacccagggaaccagcgttcagcatatggaggatcccgccagcctctgagttcccttagtatttattgatcatttgtgggtgtttctccgagagggggatgtgtcagggtcacaagacaatagtggggagagagtcagcagacaaacacgtgaacaaaggtctttgcatcatagacagggtaaagaatcaagtgctgtgcttttagatatgcatacacataaacgtctcaatgctttacaaagcagtattgctgcctgcatgtcccacctccagccttaaagtggtttttccctatctcagtagatggaacgtacaatcgggttttataccgagacattccattgcccagggacgggcaggagacagatgccttcctcttgtctcaactgcaagaggcatgccttcctcttatattaatcctcctcagcacagaccctttatgggtgtcggactgggggacggtcaggtctttcccttcccacgaggccgtatttcagactatcacatggggagaaaccttggacaatacctggctttcctaggcagaggtccctgcggccttccgcagtgtttgtgtccctgggtacttgagattagggcgtggtgatgactcttaaggagcatgctgccttcaagcatctgtttaacaaagcaca

SEQ ID NO: 1000 - DNA, 6000 bp, Homo sapiens
aatcgggttttataccgagacattccattgcccagggacgggcaggagacagatgccttcctcttgtctcaactgcaagaggcatgccttcctcttatattaatcctcctcagcacagaccctttatgggtgtcggactgggggacggtcaggtctttcccttcccacgaggccgtatttcagactatcacatggggagaaaccttggacaatacctggctttcctaggcagaggtccctgcggccttccgcagtgtttgtgtccctgggtacttgagattagggcgtggtgatgactcttaaggagcatgctgccttcaagcatctgtttaacaaagcacatcttgcaccgcccttaatccatttaaccctgagtggacacagcacatgtttcagagagcatggggttgggggtaaggttatagattaacagcatcccaaggcagaagaatttttcttagtacagaacaaaatggagtctcctatgtctacttctttctacacagacacagtaacaatctgatctctcttgcttttccccacaggcacctaagtccacctgggcctggagcaggacaggttgcaaaagaaaatatctcgggacccccaaactccttatgctaagggaaacatcgagcctgggaactgagccatcaacgctgccattctttttcccaaacagaaccctgttgtcagaggtacacccagagcaactccacaccgggtgcatgccacagcaactccatcttaaataggagctggtaaaacgaggctgatacctactgggctgcattcccagacgggtaaggcattctaagtcacagggtgagataggaggtcagcacaaggtcataaaggtcataaagaccttgctcataaaacaggttgcaataaagaagctggttaaaactcaccacaaccaagatggccacgagagtgacctgtggttgtcctcatttttacactcccaccagcgcatgacagtttacaaatgccatggcaatgtcaggaagttaccctacatgtatgtctaaaacggggaggcatgaataatccaccccgtgtttagcatatcatcaagaataaccacaaaaatgggcaaccagcagccctcagggttgctctgtggagtagccattctcttactccttcacttcaggcaggggagatgaatttccctttgagcctgtggacagagggcagcctggcagagggacaggcatcaacaaagcctctgagtgtgacctgggtcctgagttcagggatggcaatggggtaactgagactggatcagaagttgcctggaagaagagagggccattatcagagtataagagtgtgaaacttatctggtaggaaaaaaaaaagagtaactgctgttcgtttaatagagcacacatcctctgcaattcaggtgggaggttgtgagcttcttaagtacagaagctgcctcttgatttcagcatagcgaggaggtgctgaagagcgcaggtttggagaatgatcacctggattggaaccatagctctaccaatatggaacccagctccttaggcctcggtcttctcatggagaacatggtgtgataatcctactcctctgggagggtggctgttaaggtgagtgattgcacacgagtccctctagctgatgttaccgagcggtccttgtttttagagctcccaagagggtggcgggccacttccaagatggcggcaagcctcttgttctctgacctggggttcttggcctcacagattccaaggaatggaatcttggggcatgtggtgagtgttctcattaggacgaacccaggcacttagacatgcgggaacaatggcgagcctttagcccgaatgggagcggcaatgggtgcctcgctggatcaggagcacagcggacacactgccggatccagaggggtggacatcagtggtgggtctgtgatggcggcaaacaacagcagacagcaaatggcagtggtggatggcaagcgaaagctcagctccagccataacaaacacggaccagaagagtgtgcagttgcaagatttaacagagtgaaaacagacgtcccatacaaagggagggaacccaaagggggttgccattgctgggtcgaatgcctgggtttctgtctcaatcactgtccctccccctgtgctctcaggcaatagatgattggctatttctttacttcctgtttttgcctaattagtattttagtgagctctctttactacctgattggtcgggtgtgagctaagttgcaagccctgtgtttaaaggtggatgtggtcaccttcccagctaggcttagggattcttagtcggcctgggacatccagctcgtcccgtctctcactgacacctaacacatcctacatgctcagtagacaggagctattattgtatgactgactgctgaattacaccccaaaacaaccacctatactccccaaggccctgccatatcatatgcatattagaggcaatgaagcaccaaaatctaaggccagggaaggactgcggtggacaagggaagtgcctagggcgttaaaacttaaggaggcattgcaccaactgggagtgagctgtgtgtgctgtgtttcctgggcagggcgcctcactgcccttccgagtcctgccctggctgaggttgtgcctctatctggttatcagttgcctgcagctctttctgattttgttcgtgaacaagggcccttagggaagcctcccgctgttggaaacagcagcagcatcacccagagtgaagtctctgttcacatgagtgccagctctgctcacacctaccctgcgttcccaaggcactgttcctgcttcagaaagcatcagcccagcctgctcacagtcccccaggatgtgctgttgcctgggttcttgactaggaagtaaaaggcccagaggggttgagtgtgtgtgtgtgtgtgtgtgtgtgtgtgtgtgtgttaaagtgaggtcattgctaattcctgggagaacttgtgttccccttggatgaaccccttggatgaagaaccccttggatggggttgcccagccctaggagtggatcctgcaaagcaaaatagatttcagcacagggagctggctggggggctcctccccctcttgtaggtgcagcagtattgaatttgattccatccaggtttcccctgaccccaggacctaaagctggggcaggttctgggccttgaggttggttgggggtgacccttcctaatcatggaagtctttagcgggggcttgtaagggactgtgagctgagctaaggagaatggaggtggggtgccaaccgctcccaaagggaaatgccatctcccactcacagccagttagccgagaatgggagctcccaaagggaggaccacccatgggtctgcttgactcagccctccccaacccctttcacctttgcagtaaaactctagccaaggaagacaaagagacctttggagaccaaaacagaacttttaattcgggccaacagcaggctcatgcccaaaatggctgccaaccccaacaaagaaagcagctagcttatatgtcgtttgagatgggaaaaacaaggtaggatacaggtttcagacaaagacagtaaattacttaacccgtgacaattctgaggaaactggcaattcagttatattgactagtcatcctccaagctggactagggttggaggctggggtcccgaggcaggtgataagcttttgagataagcttgcatctgcaacttgttacaatgctgggaggggctgcttaaaattttagcctatgtgttacttctaaatagcttatactaaatgttaactgttttcatgtgcgtccatgtgaagagaccaccaaacaggctttgtgtgagcaacatggctgtgtatttcacctgggtgcaggcgggctgagtccgaaaagagagtcagcgaagggagataggggtggggccgttttataggatttgggaaggtaatggaaaattacagtcaaagggggttgttctctggtgggcaggggtgaatctcacaaagtacattctcaagggtggggagaattacaaataaccttcttaagggtggggaagattacaaagtacattgatcagttagggtggggcaggaacaaatcacaatggtggaatgtcatcagttaaggctgtttttacttcttttgtggatcttcagttactttaggccatctggatgtatacctgcaagtcacaggggatgcgatggcctggcctgggatgcgatggcctggcctgacaactattacctatgttatgtttattattttaagctttattattactattttatttattttattttattttccttccacacacccgtttccaccctggagaggccagatgagccagactccagggaggcctagaagtgggcaaggggaaacgggaaaggaggaagatggtatgggtgtgcctggttaggggtgggagtgctggacggagttcgggacaagaggggctctgcagccattggcacacaatgcctgggagtccctgctggtgctgggatcatcccagtgagccctgggagggaactgaagacccccaattaccaatgcatctgttttcaaaaccgacggggggaaggacatgcctaggttcaaggatacgtgcaggcttggatgactccgggccattagggagcctccggagcaccttgatcctcagacgggcctgatgaaacgagcatctgattcagcaggcctgggttcgggcccgagaacctgcgtctcccgcgagttcccgcgaggcaagtgctgcaggtgcggggccaggagctaggtttcgtttctgcgcccggagccgccctcagcacagggtctgtgagtttcatttcttcgcggcgcggggcggggctgggcgcggggtgaaagaggcgaagcgagagcggaggccgcactccagcactgcgcagggaccggtgagtgtcgcttctgggggcagcgcccagtaaccgcgctaggagcgcggagaagggcattgggagagcggcgttcgtggcggagactagcgctccggagcacgggcacgacgggggcaccttctcggctgctagtaactaacaataataataatcataatcatagcaagggcgctgatgggcgggctcggagcacgcctgattctggttcccaccaggctgcccaggctcctgatgacgcatcagaaacatccccctaacccgcggccttcctgcaggagaggttgggaaggggtgggggacggggctcgggggaggtctccgagggactctagtaagcggggaagggcgccgggaaagtttcagatccacggctgcgcgggccacgagcccacccgaacgccgaccactgctttccgtcgacttctatttcctgggaacgcgcgaaagcaaacccaagtcagactgcggaggtcgctggggagggaaggttcaaggagttctcgccgatcctgctgaataaagggggttccgagctgggccgagatggggcatgcgcgggaagacccctgcccgctgttcccccccaccgccccagtggatgccatgcctggggcctccccggcgcgtggggctgacgcaccctcggggtccatcgtagttggccgggatcgtggagtgggtgcggtggacgaagggaggcaggacagtcccgggggtggcagaaggagcccgggcacagctgagacctgcgctcccatcccaccaacactcacagcaggtgctgccgagctgggcaattgggatggcccaagttatttggttaaattttaaatcacgtttgttactgggaagtagagtccagtgatgctaaccgcgcctctacctccaccaccggtgtcagtcccaaagggctcctaaaatggctgtgtcatctttcagccttggaccgcagttgccggccaggaatcccagtgtcacggtggacacgcctccctcgcgcccttgccgcccacctgctcacccagc

SEQ ID NO: 1001 - DNA, 6000 bp, Homo sapiens
gttacagtttattgcagagccgaccctcctgggtgccagccgctgcccgaggtgggaggatacagacaaaagtcagcaaaggtcaaaggtgcacaggagagaaaccaggcaccagctcccagtgtcccctccctgcaggggtgtgggcggcgctccatcctcccagcgatgatgtgtggcctcatgcacagaacatggtccccaaggaggctcttgagcctcggtgtctactgggggtcagtcacagcggcgcggctgacaccccatggctgacctcagtctctagccctccagaggtcaagctgaaaactgtccagggccccaccccaaatcacactgtgggactatccggtgtgacctgaggccccaggaacaatgacacccccatcgggtaggatgtaccaagggctcagaggctacctctcaggagctcagccggggtctaccactctttggcatgtgtggggtgtggccagccaggcctgctgggtggagccctgactgtgtaacagggattcgctagaaggaaggaaacactgcacgccctcctgaaaggagcctccgcccatagcagcctgcacagtgtgtggccctgaggccacagggacagaaggactgagctggaggaaggaggtggttgtcattgtactttacacagccacgtgccccgttcttcagggtggagctggaggaacgagatagttgtcattgtactttacacagccacgtgccccgttcttcagggtggacagggccctgggtggctcacctcacacccagctctgttacttaccacaggacgccccaggcccttccttaccccgagccctcagtttcctcatctgtgaaaggggtagtggtgcccggcgggcagtgcgtcgtgggtactgagctcacccactcagggaattcacagagcagccgccctaaagggcccgattatcctcatccggacagtgaccgacctgctggccattccagggccatcaccgccatcttcttcaaaatggcacgcaggaaaccagggccccctcttccccctgcctggggctctgcccagctgggcagcctcacagcccctgccctgctgcttaggctgaggagacatactcggggtttggggaaggaaagtgcccgggagggccgctgcttttgtaaagtgaacatttgctgaactacagggatccattgtcaggcccgtatcccagctacaagctcaacctcgtggtgtgttggggccgacagcgagaccagcggttcctgccataggttccccgggctctggagtgggagcaggaccctgcgggagacacgggatgggggcaggtgtctgggggaccctccgagtgggcacccagagctggtcaggctgccgggacagtgggtcagcgcagggcagggctggggccggacatccacagagaccacctgctggtcaggatgtcacagccctgtgtcccatctgtaggtggccatgacggtcccctcctcaccagcagtagcaggtcccaatcctttgccatttgtcatggcagccagactccaggcgatggtgtggcaccagggccaggcactggaggcaggtagagtgcaccccatgcctactgctgagccttggggcacacaagccttcctcagcctttcctggtcaccttcgggggtggtcaaggcaacaggcagcgagtgtggacacacgtgccacgccccctccgagtgtgtttctgcaccaagcgcacagcaggctcagcaggacaggatgtgggagggcccagctctcccaagacagggatggccccagactgggacggatggaagtgggcggtgggcggagggcgcagaggagggtggtggccaggctgtgaccggccccaggagctccatggaagggactgggcccatgcagggcagtcatgggagggtttgggcggggaggtgacccgaccatctgctccgtgttcctggaaggtgaaatgatgccgcaatcttccatgaaagaagctgagcatgtgtgagcatgggggaggctggctgcgcccctgtgcatctggccggccagaaccgatgtcaccgggctgtttaacacccatggaaactcagtagagtgccaagagccgatggcttcctggtgattttactgtgatccaccctcgtggggctacttccgcctaccatctgtgtggtggtaggaattccctacctgtgtggtggaaattctggccaacactggccaccatgcacgtcctcccaacccagtgatattgcgagcttgaaatccaccaggcaggatcactcacaccacaggcaggagtactcacaccacaggcgggagcagtcacaccgcaggcaggatcactcacactgcaggcgggatcactcacaccgcaggcgggagcactcacaccgcaggcgggatcactcacaccgcaggcaggaggactcacacgggcaggcctggacaatgctgcagctcagggctttgctttcttttcttatcctcatgatgcaacagtaattttttttttattttttatttattttattttattttatttatttttttatttcatttcatttcatttcatttcatttcattttattttattgagacagagttttgctcttgttgcccaggctggagtgccatggtgtgatctcagctcattgcgacctccgcctcctgggttctcctgcctcagtctcctgagtagctgggcttacaggtgcccaccaccacgcccagctaatttttgtatttttagtagagacggggtttcaccatgttggccaggctggtctcaaactcctgacctcagtgatccacccactttggcctcccaaagtgctgggatcacaggcgtgagccatcatgcctggcctgggttttttttgttttgttttgtttttttgagacaaggtcttgctctgtcgcccaggctggagtgcagtggtgcgatctcagctcactgcaacctccacctcctgggtttaagtgatcctcctgcctcagcctcccgagtatctggtactacaggcatgtgacgccacaccactctaatatttgtactttttgtagagatggggtcttcttatgttgcccaggctggtcctgaactcctgggctcaggcaatcttcccacatcggcctcccgagtactggtattccaggcgtggcccctgggcagctcagggctttttacccccaagaacctcttaccacacatcactgaccacacactctggggaccaagtgcaaaactgcgttgaggaccgtcccagccattttgcaggtgcagaagcccctggggtgagcccagtgcgtggagatgccgtggcacaggtcctagccgtgccatgtctggtcttcttgcccaacagaaactcaccgagatcatccccaagtcagccgtgggggagctgtctgaggactccagcaatgtggtccaactcattaagaatgcttacaatgtgagtctcccgcaccactcagctgggacccatggggtggccagcaatctccccactgcaggtcagctcctgctgcaggtcagcaggagggtggtctgggaggaaagcccctgccccgtgggccagctgcagcctcccgacctgccctcaggcctccaggacaccctggcccggcacttccacggggagctctgggtcctctctcgttgatgttgtgggcgatgctccctgaaacctgagctccggactcttcattccagactcttctctgcgggtctctatggagaagggaggtggacagctctggtggcaaacagtgcagctggggcaggaggaggccacaggaaacccccacagtggacttgggccctgggaagacaccctggggggtggaattcctcttgctctgttcacctgtcctgggcaagctccagagaagcccttaacccctgaatttctccctggtgcacggcccatcgagctgcaccctgggctgctcccctggggagcccatggccctggtgggcataggtaggcataggtgcgcactaggtgccattcagggccccaggcaccagaggtcccgactgctctggaaatctacccccaggtgagagatgttctcagaattctggcctggatccttctaggccaaaggtcctgctggcttgagggagctcagcacgttagcgcctccgacaaacgttgggtcattgaattaaactgaaggcccgtggaggaggtgccatttgcttctcgtagcctcccgtgagccccaaacccccagagcagaccctcctgggtgccagccactgcccgaggtgtttctgtccttacacagaggatgcaggtgacgccactgccctggccattcacccgatgcccctatgaacctgtccctctgcctcctctcaatttccgtctgtctctcagtctttgtctctctttctctgtctctctctgtctgtctctctctgtctctgccccatctctgtctgtctctgtctctgcctctctctgtttctctccatctctctgtctctggctctggctctgcccatctctgtctgtctctgcctctctctgtttctccccatctctcttatcgcttgaacaatttatgcagctcctgccctgtgctaggtcctggggactcaaggctgaggagcagcagaagctcccacccctgaggctcacaccctggctccatgctagtccctgtggtcaggctgtctcgagggcaggactgtggccctggcagccctgccatcctcagcacatcctgctgtgctctcctctgtgtcattagctgacactggggacttgcactgagaggagaagtggagacgggtctaaaccgctgggccaggcagggccaggacaacagaaacactcgcccccaagagtaaccgctctctgcccgcagaaactctcctccagggtcttcctggatcacaacgccctccccgacaccctgaaagtcacctacgactccttctgcagcaatggagtgacgcacaggaaccagcccagaggtgactgtgatggcgtgcagatcaatgtcccggtgagcctggccacaagggtccccatcccagcttgctgaggggctctggggacagccagaaggagccagggtccccatcccagcacactgaggggtcctggggacagccagaaggagccagggtccccatcccagcactctgacgggggcagggaggggcacacaggcatcagaggctgtctgggagcaggcagcatccactggaaggaccctgtttctttccttcacatcctctctgccgaggccagacgctttccttgtgaagctgatgtcaggaacgtcagtgagagggtgccgagagggtgcttctcagtgagagggtgctgggagggttcttcacacacgccttggcccccaagagtcctactcatcaacctggagcccaaatccctgggtcaggccactgcagactgagggatggagtgatggctgcgccccctgggggcagacgccggacacacagaacaggcgcaaacggcaaacctgggtagggttagttgtcatgattttctgcgtgtttcattctgtttttttgacagaaacattaaggcatgggccacacaggtggttaggaatggacactgagttccttctctaatctttcaggtttaagtttattatccaatcatttgttgtttctttttgttttttgttttttgtttttttttttgctagctgtgaaataatattcagcaagacacttgctttcattgcattttcttaatatgactttggaattccttcaaacatgtttcttggtaaatgttgcctgtggatttttttttttttttttttttttgagatggagtttcgctctgtcgcccaggctggagtgcactggtgcgatcttggctcactacaatccaagtgattctcctgactcagcctcctgagtagctgggactacaggcgtgtgccaccacgctcggctaatttttgtatttttagtagagacagagtttcgccat

SEQ ID NO: 1002 - DNA, 6000 bp, Homo sapiens
caagagacctaagtaactgtttaaaccagtgttgcccaaactgacttgaccagagcacctgtttcgacttgaccagagcacctgtttcagaacacagtcccctgtcagtgctttgagaaacgccctccttatcggtggctcacgcctgtaatcccagcactttgggaggccgaggcgggtggatcacttgaggtcgggggttcgagaccagcctggccaacattctcctgctgcggcaggagaatcacttgaacctgggaggcagaggttgcagtgagccaagattgtgccactgcactttagcctgggcgacagggcgagattctgtctcaaaatgaaaagaaaggaagggaagagaaggggagggaagggagggagggaagggagggaagggagggaaggggaagggagggaagaaacgaagctccctccttgctccaggaaggcaggtgtggtggtgcagcagatgggagaaggaggcctggtgtggccaccgacctgtgacctcccaggccacagtgaggccagggaaggaaggggaagccatctcccagggagagggtgcagacggggccagggtgactttagaggaaccagctggtgtcggacaggctggggctcagagctctgccctcaggggaagcccaggtcagcggccactgagttagccttggggcagagtggcccagggtgcaggcggccaggtgacagccagcagcagccgggagggaggcagctgggagacagtgagggatggggccgagccattggggaggtcctgcaggagcagggcccaggtgtccctgggggcagcaggggacaaaaccccaccctggtggtagggtcaggcctgcccctcgctgccccgtgagcaggcacaagccccttcgtgctggaacctccacctctgacctcaaactcgagggcctggccctgtggcccctggaggcagctctgatgtattttccccacgccccacttcacagtgaggaaactgaggctgacagaggtgttgcctgtggccagagtttgtgcagctctgtggtgctggaggtgtcaggaaggatcgtcctggagggtgggggtgcgcctgagtgggggcatccttgtgccgtggggaagggtgggggagtggctgcccacggcctggcatgcatccccactgtgcagggggcaaatgctgtggcctctgggagggcacaggtgagctcgggtggatgcaggtgagggtaggcaaactcgggtgagcaccagggagagatcttaacagcaccccagggccacaggctcccagagcagggcggcaggatctgggaagggactgtcctctcgcggggtcctggccctacccccgcagcctgctggcccttcgctgagcctctactctggaagggaagggacggggccccttggtcagccaccaaaggcctatgtctgtgccctttgactgcagcatggccacattgctcgtggggacatggtcttggctgcctcctccatgtcgctgcagacgccgcacggcccccaaagccaaacacatttactgtctggcccttcatagaaagtgattggggtccttggcccagaggccaagtgaagcctctgagggctgcaaggcacagcagggcgagggccagggccaggagtgccgggtgtgaatgtgggtgagtgtgtgtgtgtgtgagcgcatgtgtgtgtggtgtgtgtgtatgcatggtgtgtgtggtatgtatgtgtttagcattgtgtggggtgtgtgtatatgtgtggcacgtgtgtgtatgggtgtgaatgcatgtgtgtggcatgtgtatatgtgtgtggcatgcatgtgtatgtgagtgcatgtgtgtggtgtatgtgcgtgagtgcatgtgtgtgtgtttggtgtgtgtatgtgtgtgcgagtgtgtgtgcgtgcatgtggtgtgtttgtgtatatgaacaagtacatatagtatgtgtgctttgtgtctggtgttgtgtatgagtgtgaggtgtgtgtgtatgcgtgcatgtgtggtggttggtgtttgtggtgtgtgtgcatatttgtggtgtgtttgctgtgtgtgggtgccatgtgcgtgtatatgtgggtgcgtgtgtgctacgtgtgactgtgtgtgcatgagttatatttgtgtgtgagtattgtgtgtgtgcatatatgtgggtgtgtatgccatgtgtgactgtgtgtgcatgtggtgtatttatgtgtaggagtgcgtgtgtgtgtgtctgtgaggaggggcacataccctttctcccagggtgtggcagcaggcaggttgggggtggagtgggctctgcacttgtcctgccgcccaggggggctgaaggctggagggtggggcagaggggacaggcttcgtcaccctccctccctgctcattcattaacatgatgtgtgtttatggagagctgacttgtaccaggcacggttctgggagccagggacacaggctggttgcggtgacaggtaaacagacagctacacaaccgcacgtgtgactgagacgcgggcgagcggaagtccagggctgggatggagaaaggggcctcctggggacggcccgcgtgggccttgctgggaagtgccaggttcgtgtgatgcctgtctatgtggctgctgatgagggcgcccgtgggactgcaggcatggggccgggttaggtgtgagcccaggtgagccgctgccactctcaatgaaaggcgtccccaatgtcgctggcgtcaactctaagcaccccaggcgggtttcagtgtcactgcgaggcacatgcctgcgtccgggagtcatgtccttcctctgaaactccagcctgcctggatgtcctgtgtctggtcctcagctctcctgccaggcggggagaggggaggtcaggaggatttgggggctggaggagagggtgccagtgcacagcccgctcggggccacacgcccccagacaccctgtgtgagatgtgaggtgtggctccttttgttctgtccccaccggcaggccaggcagcagcgttcaacgtgaccttccggcgggccaagggctaccccatcgacctgtactatctgatggacctctcctactccatgcttgatgacctcaggaatgtcaagaagctaggtggcgacctgctccgggccctcaacgagatcaccgagtccggccgcattggtgaggcccaggcactgcaggacaaaacccagtcctttcccagaccctggccactcctgcctgtggcccacacaactcctcgcactcaggtccccagggtagatctgggggccccagatgcaggtccccccagggcatccacagggctgcagtcggcctgcctccctgccaggggccacacccagtccctggctccccaacacttgtagacattgtccagccctccacttccccttccatcttctacttcctttatttatttcttggtatgtttaaaagacaaaattctgacagtgccaattattaaacattaaagaccacaacacatatagacggcacagcgacggcagcactgaagaaaccacacagcaagctctgctgggccaagggctccgctctacaccagcactgccttgccacagagcaggtctccagcacacgtgtgtgtcagtcacagcgcatgtcttccccgccggccgtggcttctcacatcggcactctgccaccttccctacatgcggggatgcacacatgcacgataacacacacacacacaagcaaatgcatgctcacacaaatgcacgctcacacacaaatgcacgctcatgcacgtgaatgcacgctcacacacaaatgcatgttcacacatgcaatgcacactcacacacaaatgcatgctcaaacgcaaatgcacgctcacacatgcgaatgcacactcacacatgaatgtatcctcacatgcacaaatggatgctcacacacgcgaatgcatgctcacacacaaaagcacacccaaactcaaatgcacacacacgtgaatgcatgctcacacacgtgaatgtatgctcacacacatgctcaaacacacaaatgcatgctctcacatgtgaatgtatgctcacacatgaatgtatgctcacacgcaaatgcatgctcacacacgcgaatgtatgctcacatgcacaaatgcacgctcacacacgtgaatgcacgctcacacacaaatgcatgctcacacacatgaatgcatgctcacacttgcatgtgcacacacatgcacacacagtcatacacacgtgcaagaccacatgtgcacacagacatgctcacatgcacactcatgatcacccatgtatgtcttcactcacatgtataaatcgtacataaacacacatgcccacatatgtacctggtcacctacgtgaactaggtgtgtccatacctgaacatgctcacatgcatacaggaatacgtgcacacacagttgtgctacgcatgtacacactcatgtttacacatgcagatggctgcacacacagatacacatacgcacctgttcacatgcccacatgtatacctggtcacacacatacatgcaggaacacacatgcatacacttatgctcatccatgtacattgcacactcccaggttcacacacacgcccacatacgttcacatgtgtgcttgcacaacgcacatgctcacacacacactccacatgtgccatcttgctttctccacctccctgctaggagagaggaaacaggcttgccctcgtgcccctttgaagctggccctcccacctgggcccagcctgccacctccccagcccctccatgtgccctgcaggcttcgggtccttcgtggacaagaccgtgctgccgttcgtgaacacgcaccctgataagctgcgaaacccatgccccaacaaggagaaagagtgccagcccccgtttgccttcaggcacgtgctgaagctgaccaacaactccaaccagtttcagaccgaggtcgggaagcagctgatttccggaaacctggatgcacccgagggtgggctggacgccatgatgcaggtcgccgcctgcccggtgaggccgctgcccctgcttgggtccccacgttcccccagtgtggggggctctgtcaggcgctgtgtgggggcaggggggtaccctggccggcaggtcgtctgagggactccagcctgggcctggggagagcagctcctcaccctgctgctgcccatgcaggaaagggcaggaggaagggagggtgaccacgagggctcgaaaatcatgcgctgatttcattgtttgctgtgagttaaatttgtgaccctgggcaaaccttatgaagcctaaacattttgcgagcggccaagggtggaacagggccgctaggcagcaggtcccgtggttcctggggtggaaccaccctcctccctccaggccgggtgggcgctggctgcccagtgtgtgtcgctctccacgtcccgcccacccagtttgtgactgtcagcctaacagagcagccacagtccctgggccatgttgaggccacatgcactgtcctcccctcacaacccaccttagctctcctgcttccctgcagtcccagcgcagacacactgctcacgagtgtgaggtcacagcctaggacacgcacggcccccacatgcgcctgccaggggctgtcaatggtggactcaaggcctgctgggcccctcaggctcgttttcctccatgttgcactcgttctgcgtgtggcccacacgtctgcgagggtttttccccttggggatggtttcctgagggtttgttcccagctctgaagtgcagggaccgcagccgtgtctctctccttgcctttccacacgtgcctccactccctgcgcctcacatgtgcacggggtgtttgagggccgttgtctcctcctgggcgtggcgtctgggggaacacagctgggtccctgagacccaggggaaagggggacccacaccagcctccgggccaccccaccagctctgcatcgtctc

SEQ ID NO: 1003 - DNA, 6000 bp, Homo sapiens
gctatcaggccgggcgcagtggctcacgcctgtaatcccagcactttgggaggccgaggcaggcggatcacgaggtcaggagttcgagaccagcctggccaatatggtgaaactccatctctactaaaaatacaaaaattagctgggcctagtggtgtgcacctatagtcccagctactcaggaggctgaggcagaagaatttcttgaacatgggaggcggaggttgcagtgagccgagatctagccattgcactccagcctggatgacagagtgagactccatctcaaaaaaacaaacaaacaaacaaaactgtgctatcaaacttcacagatagtcaaaccaacagtaggaacacgtctccctgacccttgggaaaatacgcttttgcagggtcgcaggttcagaggcgacatgggctgggttttcctgcatcctctctgctccgacttgttcctatttgatctgacctgtttttgtccctggatttcctggagcctctgtgatccaaggacagtgttccagtccccacctgacggcacttctctccagttctttatcacattcctacaaagcagaaatgagtccatcttgatgctctggcttttggcttaaaaggtggatgcctagtttataatcatcccttgagccttcagttcccagcgcaggggttggctcccatgtcctcttccttccaaccttgtcccctggcggcatcgtccatcacttcccgcgcacctccgagtcactttgatgcgagtgcctctcctctaggacagcgcaaggtgggtttcagcacaggcaggaggaagctctgatgcaaagttccaatgggtctgcggggcctctggttcctcaagcagtctcgtcttagggttttacggggttgcaaaaaggaagcctgagactgggcacggtggctcacgcctgtaatcccagcactttgggaggccgaggtgggcggatcatgaggtcaggagatcgagaccatcctgatcaacacgatgaaacctcgtctctactaaaaacacaaaaaaattagctgggcgtggtcgtgggagcctgtagtcccagctactcaggaagctgaggcaggagaatggcatgaacctgggaggcggagcttgcagtgagctgagatcgcgccactgcactccaggccggtgacagcgcaactccgtctcaaaaaaataaaaaggaagcctgaccccgctggattcctctcccagcataggctctgccctctctctgctgtcttgcttaaagtttcctttctttttcttttcttttttttttgagacagggcctcgttctgtcaactaggctggagttcagcagtgccattagggttcactgcagtctctccctcctgggcgcgagtgatcctcctgcctcagcctcctgagtaactgggactagagatgcatgccaccatgtctggctaatttattttctatttttattttttgtagaggtaggagtctcactgtgttgcccaggctgctctcaaactcctggcctcaagtgattctcctgccttggcctctcaaaacactgggattgcaggcgtcagccaccaggctggcctcttcctttcctgtgtttgctcctgttctcctgtcctcgacttctgtgaaagggtgtgtgtgatttggcccggatctgctgcaggtctcttctgacgccgctttcgtgtctcagagcctgaatgttcagagctttgctcaccgtgaagtgtggttcttgttagctgtgtccatttggtgcccgggagggaagggcgcccggcccctgaggggttctccggggaaggatgacctcgtccccctggtcctgccccctcagccccctgcttcccctgtgcaggggacttggtgacaggtaccacttcctgcagctgggctggggttgcaccagcacttccttctcgggcagggttgaggtcaagggcgactctgatgcaaggttctgagaggcctgtggggctgtggattcctaagcagcctcagctttgggttttgcaccttaggtcttggtaaggggacccgcccgcccttagatgggggatgtccagagctggaggatgaggagggcacccgcccctggtgtggggcagcagggagggccttggagaatgaggagggcacctgcccccagtgtggggcagcagggagggcctcagggtgatcaggctccaggccagagctctggggccagctcaggggctggggtggggggtgtctgtgctcttcctcccctcctgccctgcagctctgccggcttagcctcagggcaccagaggtgacagtggccaggcacctgtttgcccgaatgctgccctacatctgtgccttacccattcccatcccccagggagctggcacaggcccttcgaccacctccaggcacatggaggaaactgaggcagataggcctgatggggtcttggtctctcaggcctcaggtgaggccctggacctccgtgggccatcctggctgctgggcagaggggctgccctgccctgttctcccacagaagggaggctggctgccaggctcagtgcactgccttacctcctggagcggaccttcatccccagctgtttgtctgggctcagccactggcattggggggtggggcagggcctggcttctcttgtgcccccagctccaagccccccagggctgctcatggaggagcaacagtggggagaaggtggctccccaccagcccccttcctgtggtcaaggttggggtgccgtggtctctgagccaatcctgctggaatcaaggtgcaccccctctccctgtgggcaggtgggagtgcccggggtaactgggcaccaggtccatatcttgctgctgctggggccctcagtttccccatttgagggtatgaagtgtttgcatgccactggtcacgactgtgttaggggcggagacctcatgtctgcggccccagggagagcgtggagctggggtgtgagtccttaccagcctggctggggctgccaggggaggtctgcaccccctccccacttggcgcagctgcgacctgggggagtcctgaagccggctggaccctgcaccctgggggagtcctgaagccggctggaccctgcaccctgggggagtcctgaagccggctggaccctgcaccctgggggagtcctgaagccggctggaccctgcaccctgggggagtcctgaagccggctggaccctgcaccctgggggagtcctgaagccggctggaccctgcaccctgggggagtcctgaagccggctggaccctgcaccctgggggagtcctgaagccggctggaccctgcaccctgggggagtcctgaagccggctggaccctgcaccctgggggagtcctgaagccggctggaccctgcaccctgggggagtcctgaagctggctggaccctgcaccctggggtagctccagcacgcacagggcctccgatcagctgaggggctggtgggcactcgtggcaccgaggtcagtccaggcgcaggactttgagggggcccagatggagagctggaactggcctcggcctgaaccacaacccccaacgatcagagatatgggggctttcagacacagggtgggcccaatgtgaaccaaaaccacctcctccaggaagttacagcagggtgcaggttctgtttttgaccccaggacgggaaggatcaagggttcccttttgacatttttgtattctgattataattttgctgggaaccagggaatgaggtcactgccaaaacaacaggaccttggggcttgttggggcgtctaagctgtgggatcctcagatgggcccctggtgggtgttccgttggcctcagagcccccagcacaggtgcagggctttcgggggatggaggggagccagggcctgtggctgagggcacccgagcctcccgggccacagcacagcacccagcgctgtcttcaaagccggcaggccctagtttggggctctgctggcttgggtctgcccactgaaccttgggtggccctgccagcaccacccgagggaagggtgtggggcaggaacgccccagcagcctgggaggccgtgacaggaactggcatttgctggaggaggtgtgttgatctttgcttctgacaacagccccagggtaacggaaatgtcttcctgcccaccatgacaggaaggctcctgggtaccccttctcagtacctctccaccttcttggtgccagataaaagggtcccagccagctataatgttctcaggtcctgggaggtcagacccaggggcccaccccacctaggaagccctaagaccccccaaggagccgacctaggcctggtttgggcacctcccggatggagggaagggaacccaggggtggaacggccctgctgcccgctaggaggtgctgccggcctccagcaccaggctgaggcctgcttccgtcattttgcctctggggccgagggcctgtgagtgaccactgagccgcccctggctgtggatgcgtgggttaaggacggggtgggtgtgtatctggaaacaaaagggcaggaccccggcaactggtggcttgggcaagtcaggtgactttttttcccacctggcagggactgcagggctcctgggcaggcctagcacacagcttggcacccgcgggcatcaagccagctttctcttcctggcacacagcctggcacccgcgggcatccagccagctttctcttcctggctatgtttctgccacagagagacagggccaagcccagctctcctccaagcacaggctctgctcacggaggacctggggcacactggggcagagtgcacacaccgggtgtgtggggttctggtgtttgtgtgcgtgtacatttgcacgtgtgtatggtgtgtgcgtgtggtgtgtgtgtctgtgtggtgtgtatgtgtgtgtacgtgtgcatgtgtatatttgtgtgtggtgtgtagtgtcttgcggggagtatggtgtgggtaaggggtgtatacatctctgtgtgtacatatgtgtggtgtgatgcatgtatatgtgtggtgtgtgcatgcacgtggtgtgtacatgcagtcaggcacacatctgtatgcacgtacacgtgcatgtgtggtgtgtgtacacgtctgcatgtgtgtgtgtgcctgtgttgtgtgcctctgcaggggcccgctgcagctgtcctgggtgcctggctgagcaggtgtgctgcccgcactgctgagcccgggatccctccctccctggctgttggcagctgggcccagtgcagctgtgctggcctgaccctaacccaccccctgcagcagggacagggccccagctccttgtcccaggccagctggaggggagcttcatgggtggtcagccccaggggttgggcctgagaccgtcaccaagaccccttccctccacaggacatgctgggcctgcgccccccactgctcgccctggtggggctgctctccctcgggtgcggtgagttctgtgttccacggaggggactccacgcgtgacattccaatcagggagaacagggcctgccctcactttcccatagacagaagttcccgggaggctggggaaggaccttgccactgggggtaggtcggggactcaggcctcgtctccgcacgtgccaggaggctgtagctgtgctgtttcccgagggcccctctttgcacctgggggtggtggcgaatgcggggtctcctcctggaggctgcctccctgtctttttgggcctcctctgaccttcctgctctactcccccttgggtgtgggcagggcggcccagagcacccactcaccagccggcctcgtccctcagtcctctctcaggagtgcacgaagttcaaggtcagcagctgccgggaatgcatcgagtcggggcccggctgcacctggtgccagaagctggtaagtgcctcctggacccctccccacctgcccagctcctgggtgagggccctttc

SEQ ID NO: 1004 - DNA, 6000 bp, Homo sapiens
cggccccagggccagtccccgccgggtgccatcctgagcagggccacagaacagatgtcccacatggccaggacccctgtggccacctgaccccgggggggctgtggccctcggtgaagcaggtgaccgggcgggctgtggggtttgtcagctccgcagcgtcactgccgctcagcgtatgagtttccactcccagcactcaatgaacagctgagcaactgcaggtgcctccgagtgctgggagaggggaatgctcagctccgagtgctgggagaggggacgctcagctccgagtgctgggagaggggacgcttagccacccaagggcctttgcctcaagggagtaaataggggcatttcctggtgggcgtgggctgggctggagaagcagggcctcctggcaggggctggcatgagatccaaacactgcccaggcagctggacactcctgagcctggagcttctcacctgaaccacagggtggtaacccctgcccctcaggcggcatcgacgtgacctgcctagtgcacagtgagcctgaggcaacacggccaccaccaggagactccctggggaagaggcccccagacagcgaggtgcccatgaaggaagttctgcacaggggccgcggccatccaggagatgggaggggccctatctgcaccctgtctggaaggggcatggggtgagcaggctatttggtcccccgtgactcagtttccccatctgtgaaacaggaggggtggtctggccaattgtgcgcactccagctgtctctatagtcaaccgtgtaacttgaactcacttccccagggctcctgccaggcccaggtctgtccactctggcccaggccgggccccaccaggtaccagggctgtgggacatttgcctctgtggatggggcagcgtgacgcctgtggcgattccatggaacaggtcctgtgtgggccccccttgctgcactcgtgtcctgtgtcagagaaccgtggtcctgcctgaggccatgtcaccggaggctggctcccgttcccggaggagaatgccagctgccacaggggtcagtgacacaggcatttgcccagcaggtacaggccaggtcgctgggaagccccaactcaaggggctctgcagtgggcgcctagcaattatggagctgtgggtgatacccaccccaagccggacctggtgccagcaattatccctcccattctgcttggcacaaactggcactgacacggggcattgattaggtggttgcatttgtcgattccgagcccatgtgtgtggagcccaggccctgagcaagcacagagggccctggtgctgtcctgagctgaggcccctgcccaccccgggctgcgtgttctctccggccattcagggtctgagagtgcagaagagttagccccaggggaacaccttcctgcccagctgatttgtaaacagcctcgctggggacacatgttggtgttgggagtggtggaggtttctgtgtgtgatggaaacttggggtaggtgttggggaaaagaggtgctgagagtctcagcagagggcagagtccaggagtcctggagtgcagctctcagcccctgcgccgtgcctagaggagaggctggcaagcccctgtcccatggatgggtgaatgggtgagtgacagtggcaacaagcccatgccagcagggaggtcccactgccatgaagcagcgtcctcatcaacgtcacagtgggaacaagaaagccagtagctttggaatccgaaggagcaatttcagcataattcgtcggccaccatgaaattccatttttaaaatgtcctttattcatttatcacaaaaagggtggaaaatacaaacaggaataatgaaaattgaaaatactcatagtgccaccacccagagaaatgcagaatattttggaactgtgtctctctttttttccccataaattcacttttaccacgaagccaagctgccctgagcagctgtttgcatgttttcgttgctgtgtgggactccatagcgcaggcaccgaaaccgccaaagcatcttacacgttgacggctacacagggaatcaagatattttggctgaaatccctggttctttcctggggtgactcatatgtttcttagccagttttcttccttcttttgtgaattacctgctcagggtgccacacccttgaaacatccttgaatggagtatttacctttttgttattaatttctaagatctctttagagatgaagattaccatttaccttttgcactagagagataatagctatttcctctatgcaatttgttagtacaacatgtgccatttttagagtctgtcttcttgctattttcccccttagctttttttttttttttcttttgagacagtttcactcttgttgcccaggctggagtgcagaggtgagatctcagctcactgcaccctctgcctcccgggctcaagtgattctcctgcctcagcctcgcgagtagctgggattacaggcgcccgccaccaagcccagctaatttatgtatttttagtagagatggggtttcactatgttgctcaggctggtctcaaactcctgacctcaggtgatccgcctgcctcagcctcccaaagtgctgggattacaggcatgagccaccatgcccggcctccccttagcttttatgctgaggtttccttactcttagatacctattcttctatttcctttattgttttattccctaaaactgaagtcctacacatttgtggccattcttttatgtccacagcaagagtgtccggggcctcggcctcacgtcgccacccaggaacagacagtctccttcatgttagatggaggagtggtgtccccttgtctaaaatgctgtaaatatcatttgatttccctttgacttcaggtatttagcagagtactttagcattccttattaatatgtgtgtgtcgggggggtggggtgtctcattttatttcatttggccagaaattgtggcctttaaaatttgtgctatcaggccgggcgcagtggctcacgcctgtaatcccagcactttgggaggccgaggcaggcggatcacgaggtcaggagttcgagaccagcctggccaatatggtgaaactccatctctactaaaaatacaaaaattagctgggcctagtggtgtgcacctatagtcccagctactcaggaggctgaggcagaagaatttcttgaacatgggaggcggaggttgcagtgagccgagatctagccattgcactccagcctggatgacagagtgagactccatctcaaaaaaacaaacaaacaaacaaaactgtgctatcaaacttcacagatagtcaaaccaacagtaggaacacgtctccctgacccttgggaaaatacgcttttgcagggtcgcaggttcagaggcgacatgggctgggttttcctgcatcctctctgctccgacttgttcctatttgatctgacctgtttttgtccctggatttcctggagcctctgtgatccaaggacagtgttccagtccccacctgacggcacttctctccagttctttatcacattcctacaaagcagaaatgagtccatcttgatgctctggcttttggcttaaaaggtggatgcctagtttataatcatcccttgagccttcagttcccagcgcaggggttggctcccatgtcctcttccttccaaccttgtcccctggcggcatcgtccatcacttcccgcgcacctccgagtcactttgatgcgagtgcctctcctctaggacagcgcaaggtgggtttcagcacaggcaggaggaagctctgatgcaaagttccaatgggtctgcggggcctctggttcctcaagcagtctcgtcttagggttttacggggttgcaaaaaggaagcctgagactgggcacggtggctcacgcctgtaatcccagcactttgggaggccgaggtgggcggatcatgaggtcaggagatcgagaccatcctgatcaacacgatgaaacctcgtctctactaaaaacacaaaaaaattagctgggcgtggtcgtgggagcctgtagtcccagctactcaggaagctgaggcaggagaatggcatgaacctgggaggcggagcttgcagtgagctgagatcgcgccactgcactccaggccggtgacagcgcaactccgtctcaaaaaaataaaaaggaagcctgaccccgctggattcctctcccagcataggctctgccctctctctgctgtcttgcttaaagtttcctttctttttcttttcttttttttttgagacagggcctcgttctgtcaactaggctggagttcagcagtgccattagggttcactgcagtctctccctcctgggcgcgagtgatcctcctgcctcagcctcctgagtaactgggactagagatgcatgccaccatgtctggctaatttattttctatttttattttttgtagaggtaggagtctcactgtgttgcccaggctgctctcaaactcctggcctcaagtgattctcctgccttggcctctcaaaacactgggattgcaggcgtcagccaccaggctggcctcttcctttcctgtgtttgctcctgttctcctgtcctcgacttctgtgaaagggtgtgtgtgatttggcccggatctgctgcaggtctcttctgacgccgctttcgtgtctcagagcctgaatgttcagagctttgctcaccgtgaagtgtggttcttgttagctgtgtccatttggtgcccgggagggaagggcgcccggcccctgaggggttctccggggaaggatgacctcgtccccctggtcctgccccctcagccccctgcttcccctgtgcaggggacttggtgacaggtaccacttcctgcagctgggctggggttgcaccagcacttccttctcgggcagggttgaggtcaagggcgactctgatgcaaggttctgagaggcctgtggggctgtggattcctaagcagcctcagctttgggttttgcaccttaggtcttggtaaggggacccgcccgcccttagatgggggatgtccagagctggaggatgaggagggcacccgcccctggtgtggggcagcagggagggccttggagaatgaggagggcacctgcccccagtgtggggcagcagggagggcctcagggtgatcaggctccaggccagagctctggggccagctcaggggctggggtggggggtgtctgtgctcttcctcccctcctgccctgcagctctgccggcttagcctcagggcaccagaggtgacagtggccaggcacctgtttgcccgaatgctgccctacatctgtgccttacccattcccatcccccagggagctggcacaggcccttcgaccacctccaggcacatggaggaaactgaggcagataggcctgatggggtcttggtctctcaggcctcaggtgaggccctggacctccgtgggccatcctggctgctgggcagaggggctgccctgccctgttctcccacagaagggaggctggctgccaggctcagtgcactgccttacctcctggagcggaccttcatccccagctgtttgtctgggctcagccactggcattggggggtggggcagggcctggcttctcttgtgcccccagctccaagccccccagggctgctcatggaggagcaacagtggggagaaggtggctccccaccagcccccttcctgtggtcaaggttggggtgccgtggtctctgagccaatcctgctggaatcaaggtgcaccccctctccctgtgggcaggtgggagtgcccggggtaactgggcaccaggtccatatcttgctgctgctggggccctcagtttccccatttgagggtatgaagtgtttgcatgccactggtcacgactgtgttaggggcggagacctcatgtctgcggccccagggagagcgtggagctgg

SEQ ID NO: 1005 - DNA, 6000 bp, Homo sapiens
tctcgaactcctgacctcgtgatccacccgcctcggcctccaaaagtgctgggattacaggcgtgagcccccgcgcccggcctctaacagctgttttaatgctccgtgtgatcatttcagcattgggattatctcggagttggcatctattagttatcttttctcttacaagttctcaaggttttctttgttgctgtttgagtacttttgggttgtatcatggacattttgaatattatttaataagactctggattctactaaaatcctctggacaacaatgatctttttgttttgctagcagtcagtctggttagggttagaccacaagtccagacctgcctcttgtgggctgtggttctcatgtgagttcagtttttattttttcttttctttttccttccttccttccttccttccttccttccttccttccttccttccttccttccttccctccctccctcccttccttcttcctttctttctttctgacaggatcttactctgtcacccaggctggagtgcagtggtgtgatcttggctcaccatagccttggcaacgtagcgagacctagtctctattaaaaaaagaaagaaagaaacaacagcaacaaaaagaaaatttacggaattgtgcaatcatcaccacaatctaatttcagagcatttccaccccctgaaagatccttctgctcatttgcagtcacttcctcctagctcctttaaaaaaaaaaaaaagatataaactattttaagaatacagaacagcatggagagcactagtaccaatccccaaacagctacctctcatcttaccaaatcttaacatgttgcctgacttgcccagaactttttcttcctttttagtaaagaaaactctacaatagaactttgaagccctctgcttccatctcccaggcccgtagccttctctgtcttcaggggtaaccactgtcctgctctaggggtgtgtgggtctgcagggacgaggtgcatgttattcttcaatgcctccttctacattttgcttttcagaagaatctcagtgttacggatctgtgggtcacgaggcttcagagcagcacttcaagggctcttattcattaccccgtagcgtgagtgtggcaccatggatgtatgtgatctaggctatatttgggtccacttttcaggagtgctgttttttttctttcatgccatcctttggacagcatctaatttcattcaattgtgtccgtgaatttggcctccttatggtctttgtgctttagaatatgtggttatttcccttgtggtctagtaattatgtgtttatcattgtcccactttgtaacataattgtgtttaagttggagacgaatggttacgttcctcaaattctctacctgccaaatttgcatttctatttgattttttcttgtttgtttgttgttgtttttgtttttgagtaagagtttccttctcatcacccaggctggaatgcagtggcacaatctcggctcactgcaacctctgcctcctaggtttgagtgattctcctgcctcagcctcccaagtagctgggattacaggcatgcgccaccatgcccagctaatttttgtatttttagtagagacagggttttgccatgttggccaggctggtcttgaactcctaacctcaggtgatccgctcacatcagcctcccaaagtgctgggattgcaggtgtgagccaccgcgactggcctgatgtgtttatttctgagagagatctgttagagatatttgctgtttggggctgtgtcagtttgcttatatatttgtcagtctttgttttatatattttgaagttcggcacacaaaggattatggctgctgaactgtctgtggattctgactctcattggctacatcttcctttgtccatttgatgcattttgctttgatttctatctttttgatgttacacgatatcttcgttagtattttctagcacatacgtgtattttccgtttctttattttcagccttcagtgttctcttttaacagtttatctgatagagagcctttcttacactttttactttttaattgtgataaaatatacataacataaattcaccattttaaccatttgaagttatgcatttccgtggcattaaggacacttagtactgtgcaaccatcaccaccaacttctccaaaaccatttcatcttgcaaaacgggaactttatacccgcgaaataataactttacacttccttgaaatgtttttttaatcttactacaaaaaatttcacacatctacagaagtagagagaatagattagtgaagccccatgtccccaacagtggcttcaaaaataatcaactcacaggtgatcttgttgtatcaacacctctcccgactctcccccaacccaacccacccctctttattgggaaataaatctgaaacattatactgcaccatctgcaaatatttcaacatgtaactctaaaagatggggactttttaacataaccacaaaccattgtcacacttaaaacaattaacaatgattttaaaatatggtccatgcattgcaattggttctattaagagattaaatctcttaatctaaagggtctctctcccttcgtctctcctcttgtactgtgctgtttgccttgtgagggtttcttcagcctggattttgctaattgcatccctacgatgtcatctaacacaccctcctgatgcttctttgtagatctaaaaagttcgacctgattcaggctcaatagtaacatttgttctttctatttttcttgatttctattgttatttcatcaagactaattcattaaaggtgtgtgcataacgtctgctgcgtccgtgacgttcgcagcgagggtcattgcttactttaagtcatcagcgggtgtagtagaatggtattctctttctgtccttcttcattattttctaggctaagtctgtaatgagaagatacccttgacagagaacatttcattggaacttgttttgtctctttatttctaaaacccaacgcaagaccttgttgatttaaaacaagaaaatgtaacccattcacaggtgctgtgattcctgatgggtttgaaattattcccaatgttttattgtttggtttttatttacctttcttgtttgttctattttcccttacttttttcttttaaaggatttgcctttttttttttttttttttctcagttacccagactggagtgcagtggtgtaagcatggttcaccgtagcctcaacctcttgggctcaagcaattctcccacctcagcctcccaagtagcctggaccatatcgcgtgctaccatgcctggcgaattcttagaaaatttttttgtagagatgagggtctgggtctccaaatgttgcctaggctggtctcgaactcctgggctcaagtgatcctcccacctcggcctcccaaagtgctgggattacaagtttgagccaccatgcccaaaataaagatttgtcatattttttttcaggtatatacatgctatttttattcttaaggagactcttgaattgttagcatatatacttagatattttctatcaaaatgcccactgacaagcatctatattcctccccagataggatggaacggcaatgtgctccctggcccctcccaacccagtcctctaggcgttttgtttcacagcgttaatattcttaccactattttttaaatcaacaggttatgacatcataatttttacttatttctttgcccaactttgtatcatctgctcttgtatttctcatggatttcttcatgtctatttctgcaagacatctttaaaacagagtttaggagccgggagccatggctcacgccagtaatcccagcactttggaaggcagaggtggatggatcacttgaagccaggagttcaagaccagcctggtcaacatagtgaaaccctgtctctactaagaatacaaaaattacccaggcgtggtggtacatgtgcctgtaatcccagctacttgggaggctgaggcaggagaattgcttgaacccgggaggcagaggttgcagtgagctgagatcacgccactgcactccagcctgggtgacaaaagcaaaactctgtctcaaaaaaaactgaaaacataaaaataaataaataaataaaacagagtttagggtagtaatgtgtctgagtccttgctctgaagatgtctgatttgggttttttttctaggtataatctctttccctcctcttcctcctcctcctcctctcccttctctctctctctgagcctgtagtattttccctttcgtgttctgtggtatcctcctaatgtccctagttaacaggacctcatccatccatccctggggtgttcagtggcctcgcaatccacgtccccgcccagatccgcagccttcctcctgtgacctgagtgtctcctcctcgctgtccctgttctgtcccctcccgccctcacatgcaggtggatgtcaatgcgtgcacgcacccaggttttcttgcctgttcccacctctttatcctccttggctggttcctccgctccattctctggctcaggaatttgctccccagggtttttcattccgctctgtagcagaatgtgctactgttgctttccagcatcaaacttttcactcccatggcctctgtgttcttcttcctaatgggtgccctttctgcctggcgctcctggaggccgggcccctctcccaagtgtgaatctgatggaagcaggtccttctcgccgggacctcatgtgagaaatgacatgtcccacctgtctcaaggggccgctctctgacatcagagctgctgtagagcggagaggggcaggggtgaagggccacggtggtgcaacccaccacttcctccaaggaggagctgagaggaacaggaagtgtcaggactttacgacccgcgcctccagctgaggtttctagacgtgacccagggcagactggtagcaaagcccccacgcccagccaggagcaccgccgaggactccagcacaccgagggtgagtgtgcagaggccccgctatgtccacggtgatttttggagggaagcactctcctgccccagcctggagtgaccctggtggccctgcttatagccccggcccaggggtgtctggcaggaaggggtctccagaccgtctgctccagggtcccctttgagacccggcaaggggaagtgcctgccaccaagagcagagccacatggtgtgctgggagcgcttgcggctgaggatggggccggcatgggaggacaaggggctgtgaggccggcaaggccaggaagaggctgggcccacaagcccctagggggacggctggggggtcctggtgctccgggctgggcaggaggcaggttcccggggcctcctctgtgaacctgctgcgcctgcctgtgttaggccctcctgtctgcatgctgccccgcctggctacagcgattccatctccagatcgactcgcagtgtgtggtgtgtgatatggtgtggtgtggttcgtggtgtgtagtgtcgtgtgtgtagtgtggcatggtgtgcatgtatggtgcacgtgtgtggcatagcgtagtgtggtgtgtgtgtgtgcatgtatggtgtgcgagtgtgcgcatgtgatgtggggagtctgttgtatgtacatgtatggtgcacatgtgtaatgtagtgtggtgtggtgtggcacatgctccatgctcctctgggaccctcgagcttccctgcctcctccgtggggacccctgggtgacgtcttgctgtaggggagcgggcaccgctgtgcgattctggtcgagttggttcagctggtgaccctggcctccccacaacaggctcctggaggccattcccaaggtcctggtgggagggggattgaagccacgcccctgggtcccaggcccacctggcccccttcccccaacactgcactcttggggccagccctcccca

SEQ ID NO: 1006 - DNA, 6000 bp, Homo sapiens
cactaggcccagctaatttttgtatttttagtagagatggagtttcaccatattggccaggctggtctcgaactcctgacctcgtgatccgcctgcctcggcctcccaaagtgctgggattacaggcgtgagccactgcgcccggcctgatagcacaaattttaaaggccacaatttctggccaaatgaaataaaatgagacaccccacccccccgacacacacatattaataaggaatgctaaagtactctgctaaatacctgaagtcaaagggaaatcaaatgatatttacagcattttagacaaggggacaccactcctccatctaacatgaaggagactgtctgttcctgggtggcgacgtgaggccgaggccccggacactcttgctgtggacataaaagaatggccacaaatgtgtaggacttcagttttagggaataaaacaataaaggaaatagaagaataggtatctaagagtaaggaaacctcagcataaaagctaaggggaggccgggcatggtggctcatgcctgtaatcccagcactttgggaggctgaggcaggcggatcacctgaggtcaggagtttgagaccagcctgagcaacatagtgaaaccccatctctactaaaaatacataaattagctgggcttggtggcgggcgcctgtaatcccagctactcgcgaggctgaggcaggagaatcacttgagcccgggaggcagagggtgcagtgagctgagatctcacctctgcactccagcctgggcaacaagagtgaaactgtctcaaaagaaaaaaaaaaaaaaagctaagggggaaaatagcaagaagacagactctaaaaatggcacatgttgtactaacaaattgcatagaggaaatagctattatctctctagtgcaaaaggtaaatggtaatcttcatctctaaagagatcttagaaattaataacaaaaaggtaaatactccattcaaggatgtttcaagggtgtggcaccctgagcaggtaattcacaaaagaaggaagaaaactggctaagaaacatatgagtcaccccaggaaagaaccagggatttcagccaaaatatcttgattccctgtgtagccgtcaacgtgtaagatgctttggcggtttcggtgcctgcgctatggagtcccacacagcaacgaaaacatgcaaacagctgctcagggcagcttggcttcgtggtaaaagtgaatttatggggaaaaaaagagagacacagttccaaaatattctgcatttctctgggtggtggcactatgagtattttcaattttcattattcctgtttgtattttccaccctttttgtgataaatgaataaaggacattttaaaaatggaatttcatggtggccgacgaattatgctgaaattgctccttcggattccaaagctactggctttcttgttcccactgtgacgttgatgaggacgctgcttcatggcagtgggacctccctgctggcatgggcttgttgccactgtcactcacccattcacccatccatgggacaggggcttgccagcctctcctctaggcacggcgcaggggctgagagctgcactccaggactcctggactctgccctctgctgagactctcagcacctcttttccccaacacctaccccaagtttccatcacacacagaaacctccaccactcccaacaccaacatgtgtccccagcgaggctgtttacaaatcagctgggcaggaaggtgttcccctggggctaactcttctgcactctcagaccctgaatggccggagagaacacgcagcccggggtgggcaggggcctcagctcaggacagcaccagggccctctgtgcttgctcagggcctgggctccacacacatgggctcggaatcgacaaatgcaaccacctaatcaatgccccgtgtcagtgccagtttgtgccaagcagaatgggagggataattgctggcaccaggtccggcttggggtgggtatcacccacagctccataattgctaggcgcccactgcagagccccttgagttggggcttcccagcgacctggcctgtacctgctgggcaaatgcctgtgtcactgacccctgtggcagctggcattctcctccgggaacgggagccagcctccggtgacatggcctcaggcaggaccacggttctctgacacaggacacgagtgcagcaaggggggcccacacaggacctgttccatggaatcgccacaggcgtcacgctgccccatccacagaggcaaatgtcccacagccctggtacctggtggggcccggcctgggccagagtggacagacctgggcctggcaggagccctggggaagtgagttcaagttacacggttgactatagagacagctggagtgcgcacaattggccagaccacccctcctgtttcacagatggggaaactgagtcacgggggaccaaatagcctgctcaccccatgccccttccagacagggtgcagatagggcccctcccatctcctggatggccgcggcccctgtgcagaacttccttcatgggcacctcgctgtctgggggcctcttccccagggagtctcctggtggtggccgtgttgcctcaggctcactgtgcactaggcaggtcacgtcgatgccgcctgaggggcaggggttaccaccctgtggttcaggtgagaagctccaggctcaggagtgtccagctgcctgggcagtgtttggatctcatgccagcccctgccaggaggccctgcttctccagcccagcccacgcccaccaggaaatgcccctatttactcccttgaggcaaaggcccttgggtggctaagcgtcccctctcccagcactcggagctgagcgtcccctctcccagcactcggagctgagcattcccctctcccagcactcggaggcacctgcagttgctcagctgttcattgagtgctgggagtggaaactcatacgctgagcggcagtgacgctgcggagctgacaaaccccacagcccgcccggtcacctgcttcaccgagggccacagcccccccggggtcaggtggccacaggggtcctggccatgtgggacatctgttctgtggccctgctcaggatggcacccggcggggactggccctggggccgaggcatgggctcagccgccgccctgcagggacgtagccagggacctcttcccagcagagggactcccccactcatccccagaatactgaggggcacgctgggtgccaggctggcagggaccctggggattctgctgtgagctggatggggaaggagttccttcctaaaatgtggagtctggaggccactcttggtaaagtgctggcccccggggattctgcagtgagctgggcatggattctgcagtgagctgggcttcactcatggtgaaacgctggggtgacggcagacagcccagagcttctagcagctcatttctgtgaagcctccagaatccggcctcagcccccaaacccgcaggcgttgcgccaccgtcacggggaaggcgagtgacagcgagtgtcccctatgcccccacagctcgctcccaggctgagctctccggccatccccccccttccccattgcagccatgccacccctccttctccccacccaggaactgacagaggagaggggccccggatggacagggacagcagggcagaatcccagctcccagatccaggggaggggggattgggtgtggggacggtggtgcaaggggtggtgccaggggtggaggatgcatggggagggctggccccaagagtgcagtgttgggggaagggggccaggtgggcctgggacccaggggcgtggcttcaatccccctcccaccaggaccttgggaatggcctccaggagcctgttgtggggaggccagggtcaccagctgaaccaactcgaccagaatcgcacagcggtgcccgctcccctacagcaagacgtcacccaggggtccccacggaggaggcagggaagctcgagggtcccagaggagcatggagcatgtgccacaccacaccacactacattacacatgtgcaccatacatgtacatacaacagactccccacatcacatgcgcacactcgcacaccatacatgcacacacacacaccacactacgctatgccacacacgtgcaccatacatgcacaccatgccacactacacacacgacactacacaccacgaaccacaccacaccatatcacacaccacacactgcgagtcgatctggagatggaatcgctgtagccaggcggggcagcatgcagacaggagggcctaacacaggcaggcgcagcaggttcacagaggaggccccgggaacctgcctcctgcccagcccggagcaccaggaccccccagccgtccccctaggggcttgtgggcccagcctcttcctggccttgccggcctcacagccccttgtcctcccatgccggccccatcctcagccgcaagcgctcccagcacaccatgtggctctgctcttggtggcaggcacttccccttgccgggtctcaaaggggaccctggagcagacggtctggagaccccttcctgccagacacccctgggccggggctataagcagggccaccagggtcactccaggctggggcaggagagtgcttccctccaaaaatcaccgtggacatagcggggcctctgcacactcaccctcggtgtgctggagtcctcggcggtgctcctggctgggcgtgggggctttgctaccagtctgccctgggtcacgtctagaaacctcagctggaggcgcgggtcgtaaagtcctgacacttcctgttcctctcagctcctccttggaggaagtggtgggttgcaccaccgtggcccttcacccctgcccctctccgctctacagcagctctgatgtcagagagcggccccttgagacaggtgggacatgtcatttctcacatgaggtcccggcgagaaggacctgcttccatcagattcacacttgggagaggggcccggcctccaggagcgccaggcagaaagggcacccattaggaagaagaacacagaggccatgggagtgaaaagtttgatgctggaaagcaacagtagcacattctgctacagagcggaatgaaaaaccctggggagcaaattcctgagccagagaatggagcggaggaaccagccaaggaggataaagaggtgggaacaggcaagaaaacctgggtgcgtgcacgcattgacatccacctgcatgtgagggcgggaggggacagaacagggacagcgaggaggagacactcaggtcacaggaggaaggctgcggatctgggcggggacgtggattgcgaggccactgaacaccccagggatggatggatgaggtcctgttaactagggacattaggaggataccacagaacacgaaagggaaaatactacaggctcagagagagagagaagggagaggaggaggaggaggaagaggagggaaagagattatacctagaaaaaaaacccaaatcagacatcttcagagcaaggactcagacacattactaccctaaactctgttttatttatttatttatttttatgttttcagttttttttgagacagagttttgcttttgtcacccaggctggagtgcagtggcgtgatctcagctcactgcaacctctgcctcccgggttcaagcaattctcctgcctcagcctcccaagtagctgggattacaggcacatgtaccaccacgcctgggtaatttttgtattcttagtagagacagggtttcactatgttgaccaggctggtcttgaactcctggcttcaagtgatccatccacctctgccttccaaagtgctgggattactggcgtgagccatggctcccggctcctaaactctgttttaaagatgtcttgcagaaatagacatgaagaaatcc

SEQ ID NO: 1007 - DNA, 6000 bp, Homo sapiens
ccggtgttcgatagcagggagccatgacctggcaacgattccacgctcaaaggggcacccggggggccctgggtcggggcggatcagctttccctgggcacatctgcctcattccagatctccagggctcatgtctgtgacagggagggaaggctctgccctggccttccgtcagctctgccagtgcaggctgggcagcctgggctttagagctggcttctgcccacactttctccgtgaaaggaaaacaactatgagtctgccaaacgcatctcagatgcgttttaaaaaattctggtccccgctctctgtcccatcatctgcctcggggacttcctctctccgtggttctcaccccatactctgtcactgccacattttcacctgggcctggcctttgtctccacctgaaactcctgaaaatcttgaaatggatttctaggtcactggggactccggcagcacattcggcttcagaataaagggcgcccgcggtcccccagcacctgcccaagccacacccctagcttccctccctatccctgcagcctgagggtcccttcagccacccctaagtccccacctgggctcctgccccgcccctggctagcagcgccttctccaccggggcccctctgctcacagagccccctcacctccctggggatgaggggccaggccatgaccctgaaagcctagccctggccttgacctcccaggagcgccctccccgccctctcccggccccggccccgtcctctgctgctggcctctgggtcgtgccccgcagactgagctgcgcttgggggtcctggcggcctgggccgtcccgcaccgaacccaggcggtcggagcccggcggggaggcgcgaggtccttctgggggctcctccgacgcctgagggcgctgcttccccgcggccgccccgggtttctgcggagccggggcctccgctctcgggagacccggtgagacccccggggaggccgctggggaggcgcgggctctgctcccgggtcccaaatgcaccggctgcccctcaggagggacggcgacctccacccacggcgctggcgcccgcacggccgctcctcccgctcccgcagcctggacgcctcccgaggccgccccgccgggccccacgcgcggccccatccgcaggccaggactgccttcccggagctggcggcccccagcctggaggagccggccccagacgccctcccagccctccccagcccactctggccccgcagcccccgcctggtccgagtgcgggtctctggccccggcctttcccggggaaggaaagctcccttcacgcgccccagggaggcggccaggctcggagcgtggaatccctgcccgccgcggaccgcaggttttgggcaagctctggccttcctgagcctcagtttccccatctctataatggggacggcaggggtttttctgaggacccccaggaaaagctccaggaagcgcctactcacagcgcgtgctcagtggtggccccggagctggcagggagcaaacgcaacggaatacggccggggtcgggcggtgggggtctgggtcggggtcagggtgggggtcggatcgtggtgtccgcggcgggggaggctccgcgcaccggctgagcagctccggacagcgggtgagggaaggcggcttcctcctgcttcgagacccatcctcgtgcccaggggagcgcctcagggaaggaggagccacgttccagggcacctggctgggacctgccgcagcctctgcgcgcagcgggctccatcccccgggccacggattgggagactgaggcaggcgcgaagcccgccgcccagcctccgctagggagaccccggccacctccaggcagttttcctgaagcccggggccaggagaaggtgagcggctgcccgtcgggggtcgcctgcgccgggtggatgcggcggcacttgggtgcggtgggctcccaacctcactgtccgaccaaaggatcgccccggctgggcggggacctggcgcgcctaggccgggaggggacagctggtttcgggcggcctctgccccagtgacctgtagactttggctttggttcagggacgtctggggttaaaaatgatcgtttgggttcccgcagtactgttcgcggtctgagcatctccacaacgcgcacattcccataatgaatttccgagaaccggcacgcgtgcctcccctcttggctcctgggactgcgaggccggatccaatctgtgcgcctctgtgcgcagggacggctgatggcccggttccgcctgtccgtgccccaggatgctacaggaagctcagatgcaaactctttggggctgtgagttcccgcattgggaaactcttgcaataaaaataatcgtgctgtaatccccagggaccattgagaggaagtggtgagggcgggggaggcgcgggaggaagaggctgggggctgaggtgtgctggggtgggtaggagaccggctgagcccagcacggagccgcttcctggtagccctggcggcatcacccttgggtcgggttccagagcccgggggtcctttcagctttccgttccttttccttatacttcgtccctctctccagctagagaggggcaggctctggggtctgggtacttttgttttggagccatttaacttgagttataataacatgcttttctgattataaaattaatgcatggctaccataaacaatttggaaaagacagaaaacaagttaacacgttaaaatctcaatcctgtctggtgaggactgcagtgaagcccagctggccaccccttccggggcctctgttctccccagggccttgcagcctctctgggcttggcattgctatggctaaagtgtgaaagggtcatgcaaggctgtcagccctgcgtcccccacgtgtgactgcatggggtcccacccaaatcggagtaatatacccactcagcctcacccctgctctgctggccccagggaggaaatgctcatcattgcatccgcccaccccacccctgcagtgccacattcaccagcctcgctgggcatcttccccctccccgccctctgcccctggcgcattcaccagcctcactgggcatattctgccctccccgcccctgcggtggcatattcaccagccccgctgggcatgtcccccaccctgcccctgcagtgccacattcaccagcctcgctgggcatgttcccccaccctgtcttctgcccctgcctcattcaccagcttcactgcccctagccttccctcactcagcagcctctgggccccagtccccactgccactccgtgttcccaggctctgcactcccaacccttcatctgctcatccctgggaggcagacctgtcacctcatttacaaatggaaaaaggtgcctttcaggaactgacctgaggctgtgcagccccctgcctagcaggtgcctagcggttgctgctgtttctatcagaaagaaaaactaacagggggagggaggggggagggctgccctccagccttcaggggcttcctgggtggagggggccagacctttctggtcaggtccctctgggttgagaggtcatctccgggacaggactcagaactggaagagggaggggcagcgaggaaaggtccctgcctggcggtgctgccttccatgggggccttgtggggcagaggctggaacacccacttggggtttctggtgggaactggggagcagggtggggagcctgagtcccctcagaggaggagtcattttgaaactggagggagaggctaaaagaggaggctgtggagagacctagtgttgaccagggtccagcgtcagtgtttaggttctctagctcttccccacctccaatgtcctccatgtccgcaccattcccacgtgcctgtgtcccacctcttctcccacacactgtccccactccccatgccccattcctctccagagaatcactggtctagaatagagacctacaaacttgggcccttaggctggccctccacctgtttttgtcaataaagttttattggaacacagtcatactcattcactttcagaaggtctatggtcactctgcagccacaatggcagagctgagtagtcgcggcagagaccatttggccagcaaagcctaaaacacatactgtctgcaggggcttcctgggtggagggggggtgaaccttcctggtcagatccctctgggttgagagctcttccccctccagggaagagcttgcccacctccgcatcgcagctcacttttacggagcactttctctctgttctgtgccacccgagcccatatccaggcccagtgagctctgcacattggtcatcccctcactgcagggggaggcccagataccacccacaggacacatttgtgtgtgaagtgccacactagggcccagaagggacagctccccaccaggtagggacaaagcaggggtaaagggaacacatgggccggcctatgagctggacccttcaggatgggaaatgcgtgggccgggttgcagagggggttggtgaggggctcggggacaacacaggtgtgttcagagacaaggcgggtcattagatttgatggaggcttggggtccctgagcttaggaagcccccatggaaaccaagtcacaggcatccagggtgaggaaggctgcccacaggcatccagggtgaggaaggctgcccacaggcatccagggtgaggaaggcagcccacaggcatccagggtgaggaaggctgcccacaggcatccagggtgaggaaggcagcccacaggcatccagggtgaggaaggctgcccacaggcatccagggtgaggaaggctgcccacaggcatccagggtgaggaaggcagcccacacttttcttggagacacatccccaaagaagtcctcacgtggctccgtttgggcagaaaccatgaattgaacgggaaaagaaatatgtcaagtatcagaaagaagagtggcatgctttgacagcaagtggactccgagtccagggcagagcctcagttagggtaagaggcacccacccgacccaacccgacccgacccgacccgaccctcgggagccctgctctctggtcagttggccttcatgggggtggggaggtgggtggaggaatgaggtttagtggtctgcgaaggtggcagatcttgttttggtagatgagggcattatctcccactgccccaccacattcgagctgctttcagtcggcgtggtgcttttgctctctctgaccatgcaattgtcgttcactgctgggccatgtggacggactggaattacagtttcttcttctccggttttccccctggagtccatcgttgcttaactgttttcctcgttccatctcctttgaacattgagcatcttcccacccccagggggcctggaagacttcccagcataactccccacccagccaaggctaccggtcagtctgtccctggacagggggtgacaggtgagcctgtctggcagcccttgccaggggctgtgaaatcttcctttgggtgagtcagggaagcaagaatgccacctcctcagctctctccctcaaggaggagccacaccacgcagaggaaggcagaggagggaggaactgtgctcccagtgtgggaagctgcgtcggggggttgggggggcacaggcccacccaggccacagggggatggaggctgcccccagcttctcgcagccctccctccttcctacactcacctgccttccccggggcagatctccatttctgcattgcacccagcctggtggcctgggaccagccctgatggtcagcctgtttgtatggatctgtgggggatcccatgagaaagagctcgttggagcaccccacctggggcacccaactccatttcctgccccgagccctccccactcgcctccagggagtgtgtgtcacctcctcccctctgccagccctgcctg

SEQ ID NO: 1008 - DNA, 6000 bp, Homo sapiens
aaaagtgtaagaaaggctctctatcagataaactgttaaaagagaacactgaaggctgaaaataaagaaacggaaaatacacgtatgtgctagaaaatactaacgaagatatcgtgtaacatcaaaaagatagaaatcaaagcaaaatgcatcaaatggacaaaggaagatgtagccaatgagagtcagaatccacagacagttcagcagccataatcctttgtgtgccgaacttcaaaatatataaaacaaagactgacaaatatataagcaaactgacacagccccaaacagcaaatatctctaacagatctctctcagaaataaacacatcaggccagtcgcggtggctcacacctgcaatcccagcactttgggaggctgatgtgagcggatcacctgaggttaggagttcaagaccagcctggccaacatggcaaaaccctgtctctactaaaaatacaaaaattagctgggcatggtggcgcatgcctgtaatcccagctacttgggaggctgaggcaggagaatcactcaaacctaggaggcagaggttgcagtgagccgagattgtgccactgcattccagcctgggtgatgagaaggaaactcttactcaaaaacaaaaacaacaacaaacaaacaagaaaaaatcaaatagaaatgcaaatttggcaggtagagaatttgaggaacgtaaccattcgtctccaacttaaacacaattatgttacaaagtgggacaatgataaacacataattactagaccacaagggaaataaccacatattctaaagcacaaagaccataaggaggccaaattcacggacacaattgaatgaaattagatgctgtccaaaggatggcatgaaagaaaaaaaacagcactcctgaaaagtggacccaaatatagcctagatcacatacatccatggtgccacactcacgctacggggtaatgaataagagcccttgaagtgctgctctgaagcctcgtgacccacagatccgtaacactgagattcttctgaaaagcaaaatgtagaaggaggcattgaagaataacatgcacctcgtccctgcagacccacacacccctagagcaggacagtggttacccctgaagacagagaaggctacgggcctgggagatggaagcagagggcttcaaagttctattgtagagttttctttactaaaaaggaagaaaaagttctgggcaagtcaggcaacatgttaagatttggtaagatgagaggtagctgtttggggattggtactagtgctctccatgctgttctgtattcttaaaatagtttatatcttttttttttttttaaaggagctaggaggaagtgactgcaaatgagcagaaggatctttcagggggtggaaatgctctgaaattagattgtggtgatgattgcacaattccgtaaattttctttttgttgctgttgtttctttctttctttttttaatagagactaggtctcgctacgttgccaaggctatggtgagccaagatcacaccactgcactccagcctgggtgacagagtaagatcctgtcagaaagaaagaaaggaagaaggaagggagggagggagggaaggaaggaaggaaggaaggaaggaaggaaggaaggaaggaaggaaggaaggaaggaaaaagaaaagaaaaaataaaaactgaactcacatgagaaccacagcccacaagaggcaggtctggacttgtggtctaaccctaaccagactgactgctagcaaaacaaaaagatcattgttgtccagaggattttagtagaatccagagtcttattaaataatattcaaaatgtccatgatacaacccaaaagtactcaaacagcaacaaagaaaaccttgagaacttgtaagagaaaagataactaatagatgccaactccgagataatcccaatgctgaaatgatcacacggagcattaaaacagctgttagaggccgggcgcgggggctcacgcctgtaatcccagcacttttggaggccgaggcgggtggatcacgaggtcaggagttcgagaccatcctggctaacatggtgaaacctcgtctctactaaaaatacaacaacaacaaaaataaatcaataaaaataaaattagctgggcatggtggcgggtgcctgtagtcccagctacttgggaggctgaggcaggaaaatggtgtgaacctgggaggcggagcttgcagtgagccaagatcgtgccactgcactccagcctggacaacagagcgagactccgtctcaaaaaatatatatacaataaataaataaattaattaattaattaaataaaggctggtggagggagtgaaggggaggggctagggaccgtggggcttcccagagccgtgaccttgctatggggggacccagacctccattccggggactcactcagcactcatcttactatcccccatctgatgtgcctgttgcacaaggctggaagtcagaggctgtgcacgtttttctttgtggagacaagtgagtaattggtgcgtttagtgtaaaaatatcaggtgtggctgcacggagtgaaaaatcacaggctccacggagccgggaggcctgctgccctgccctcttgctttgatgaggaaatggcgaccgcagaaggaaatgtagcagcaccggcaaccggcatccgtggggccacgccgggctgcttcccagggccctccagccaagcagccacaggaaagagtagatgttgatcccaagctaggactgaggagtccgtccctaagagccgagggagtcaggtgggcgaaactggccgcatgtctgggtacaactgctcagggtttctcatctgctgaatcaccaagctaggttctgaagccaggcgtgagtgagcaggactggagcaggattctgggaacaatcttttccctccagtcagcccagaaattccatttgcagtcactttcacttatgtattccagaaaactacctgctgtcatcaggggttggttggttgagcctttccctgtgcttgcctggcagacctgcgtgctctgaggctgcccgaccctgagctccagaacagaccatcgagttcaggagacaagcatgtcagccatgacacaaggcagatgagagggacccccagcgtccacacgtggaggcagcgggggcagccggtgagcatagatggggaaggagattcagagcctgagggctgctctcctgccctcccatcctggacactggcctgggccccccagcttcccttcgcccagcttccacccccataacacacaaccccagagcttgggaaggaggtctctctgtgacaggtgggattctggaagtttccacggaggagaccccataggagcagggtttgaaggtcaagaaagatgctaaggatggagagggccagtggggagagggtggttccaggctcacttcacagaggtgcttggggagctgcaatattttggcagcaccaagggaagagtcaggtcagtgaggttcataagggatgagaaaggagtctaaccagccctggagacccctggggtctggccccacagggagatgtccaagtggcagaaagtcccttcctgcctggagagcacccccacgaggaccctggggccacccgggaaccgctgctccctcccagtcactcaccacacttccctctcccgcccaccctccaacctgcctgcaaattcccctgcaacccaactctggtctcctcccaaccctgcccccacgtaggcctttttttttctttttcacttcttccccccagtgacttccttctgcagtgttgattcagctccctttgaaggcgggtgagaccttttgcaggctgggggcaggggcgggggcggagaagagggctgcaggcagggctggcagaggggaggaggtgacacacactccctggaggcgagtggggagggctcggggcaggaaatggagttgggtgccccaggtggggtgctccaacgagctctttctcatgggatcccccacagatccatacaaacaggctgaccatcagggctggtcccaggccaccaggctgggtgcaatgcagaaatggagatctgccccggggaaggcaggtgagtgtaggaaggagggagggctgcgagaagctgggggcagcctccatccccctgtggcctgggtgggcctgtgcccccccaaccccccgacgcagcttcccacactgggagcacagttcctccctcctctgccttcctctgcgtggtgtggctcctccttgagggagagagctgaggaggtggcattcttgcttccctgactcacccaaaggaagatttcacagcccctggcaagggctgccagacaggctcacctgtcaccccctgtccagggacagactgaccggtagccttggctgggtggggagttatgctgggaagtcttccaggccccctgggggtgggaagatgctcaatgttcaaaggagatggaacgaggaaaacagttaagcaacgatggactccagggggaaaaccggagaagaagaaactgtaattccagtccgtccacatggcccagcagtgaacgacaattgcatggtcagagagagcaaaagcaccacgccgactgaaagcagctcgaatgtggtggggcagtgggagataatgccctcatctaccaaaacaagatctgccaccttcgcagaccactaaacctcattcctccacccacctccccacccccatgaaggccaactgaccagagagcagggctcccgagggtcgggtcgggtcgggtcgggttgggtcgggtgggtgcctcttaccctaactgaggctctgccctggactcggagtccacttgctgtcaaagcatgccactcttctttctgatacttgacatatttcttttcccgttcaattcatggtttctgcccaaacggagccacgtgaggacttctttggggatgtgtctccaagaaaagtgtgggctgccttcctcaccctggatgcctgtgggcagccttcctcaccctggatgcctgtgggcagccttcctcaccctggatgcctgtgggctgccttcctcaccctggatgcctgtgggcagccttcctcaccctggatgcctgtgggctgccttcctcaccctggatgcctgtgggcagccttcctcaccctggatgcctgtgggcagccttcctcaccctggatgcctgtgacttggtttccatgggggcttcctaagctcagggaccccaagcctccatcaaatctaatgacccgccttgtctctgaacacacctgtgttgtccccgagcccctcaccaaccccctctgcaacccggcccacgcatttcccatcctgaagggtccagctcataggccggcccatgtgttccctttacccctgctttgtccctacctggtggggagctgtcccttctgggccctagtgtggcacttcacacacaaatgtgtcctgtgggtggtatctgggcctccccctgcagtgaggggatgaccaatgtgcagagctcactgggcctggatatgggctcgggtggcacagaacagagagaaagtgctccgtaaaagtgagctgcgatgcggaggtgggcaagctcttccctggagggggaagagctctcaacccagagggatctgaccaggaaggttcaccccccctccacccaggaagcccctgcagacagtatgtgttttaggctttgctggccaaatggtctctgccgcgactactcagctctgccattgtggctgcagagtgaccatagaccttctgaaagtgaatgagtatgactgtgttccaataaaactttattgacaaaaacaggtggagggccagcctaagggcccaagtttgtaggtctctattctagaccagtgattctctggagaggaatggggcatggggagtggggacagtgtgtgggagaagaggtgggacacaggcacgtgggaatg

SEQ ID NO: 1009 - DNA, 6000 bp, Homo sapiens
aaagcacacatgtcccactagaagcaggaatataagccccttcagggaggtccatcacatgcctctttcagagccttcctcgtcaccaattttccaatcctattcctttgaagttgccaaccaaccaaacctttagcaactgctgatgaattaatactgatccatactttcagccacttctcactccaaacatagtaagcaactaagtgtactgctcaaagttctgccctctgagaagatttcccttcaccactgtccttcaagataatccttgactgtggttgcagtgccgcgactgtccaatccagggaagtaccaacatatcaagcccatctgtaaaccagtggtgaacttttttcttccatggtcaactagctataaggtacatcccaggagcccatagacatggattgagagaggggaggcaatgtaacaggagttggtgtcaaaggaatctgagtcactcatgcactttttgcaccttcacatttgcctaagatcagcttcatacatcatttccatgtgacggtaccctgctgttacatgcacacccaactttatggccaggtagaccagatagcacttaggctgcatggtctcctgatgtcccatggttatggcccaaaagcaagccagatgctgattctcaaaatgagatcagttagctgcagaagagaacgtagacttactccaaaatcccagagctctgtgctgtaattctcctatgggtgcttgtcagagggtccacactgcatttcaatgtgccacagacacttcaaatatcactggatctaccgaatcctatgagcaagtggtaaagcagcttacattacagcctaaactttctctgacccccatttgaaacttccagcctcataggctgaaagtagcacatgcaaatataataaacgttgtatctaaaatcctcaaagcccaactgaatattgtgtttctttttcacaggaggtggcgcaaaatacatcaacttgtttttcacttggaggggatatttcaacgtattccacacctctgaacctgctagaaacttcactgaggtggagggcccctaagttttgtggagatcatctcccacctttgctacttcctctttttcagattcaataagcataatattgtcaatattagtggaccagtgtaatgttgcgtgaactgacaagatgactagatctctgcagacaatatcattgcttagagcagaagaactggcatgtccttcaggcaacactgtgagtgtatactgttcaccctgtcaggtaaaagtaaactgcttctggtggtccttgcaaactggtttgagaaaaaagcatgagtaagatcagtacctgcatgcaaagtgccagagaatatgttgattttctccagcagagatttctcatctggtacagcagctgtaattgaagtcaccagctgattacatttgcaatagtccacattcttcataatccatatcgttagggaagcaggcgcctaggagagtcagagtaatgccactttaagttcagctgcattttgagattaacaaggcacatttcttgcagtcaaaacctatagacctaagatgtttatagctgaggaaacagctgaacgatacttgcaaggacacactgctacaacaacagagagtgcagacatcccaatacccaaacactatacgctttcaagataacaagagctatgctttaacgtacgcacacactaaaatcttaaggatagttttctttgaatcaatagaataataaattttgccacgctgtctgctcgcctgcatatagtcacagcttagtttaatctttacatagacaaaacagctatatatgcacttaaagacagtgcattcctctacttgctttctgaggatgccctactctgtaatggaatgtaagagctttcaataaactatctcttctcacttcactctgcaactcaccttgaattccttcctgcgtgagatccaagaatcccctctttacatctggatcgagacccctttttctggtaacaatatgagttctgcacaggccaaagtggccagttaaatgggtttgtaagaagtgtcacagtgcctgcttatttcaaccctttaatggtggcattaatctccaaagctctttcagagattcagtatttctggataagaaggggaagttctgggactttcactaaacttctcctaccatcatggtcctcatctcatacgtaagagagccagtgaggggatttagctagtgtatgtttgtttcaattatacaaccaggaactgaaaaactaactatagggagaatagtgtaccaactgggccccctgtgagtcggtctcatgttagaacctctatcaagtgaagaactgaccatcacaagtttctgctttgactggtgagccacagtgccatttttggttcccaggaatttatgtcaattgaggcaatccctgagacatctaggttacttccttttcattagttgatggctgcaggacacttcagaaaaggtgtggaagagggtttatggtattctttctcactagcacagattctttctcaaggggccttggcttctcccttcaatcaagatgctctaggtctgacccaacttaggtctggaaactcggagagagcccatgatctccactgtggtgattcaagttaggtacttcggtgaccagacctagaggttttcctgttgtgtggattaaagactactctagcgactgtccatctcttcattctaaggaacactgtgagcaattcaccactgccaaaaatctctgtggaccaaggcattctgattatcggtgtgttccttctgctgtttatggctgacatgcccaccttgtcttagcctgctactctgaaatattatcgtcccgctgaaatcagaggtctagtctagcaatccacatggtcatatgtaggctacagaccatggaacttttcaggtgttccactcactcaataatgcatttctcattacttagcgaagggtcttcctgtggaatgtagctgcagggggtgggtgaatgtgggagtcacacatgattggatctggtggctgtccagtctaatgggataagattaaaactgaggggtcaggacaggtaagccagggtgatcaggaagtgtgaaggtcagggaaaaacacccagaacaaccctgcaaagtagggactacggtcacccctttcacagaaaggcttaggaatttatccaaagtcaaaccactgttaaatggtggagccaagattcagacccagcaattgtaggaatctgtgggaagctggtgaggttgtatccacgagctcctggggagcctgggcaaagaataccatcctggggccccagagcgcttgaaagcccttttcctccctgtggcagatcctctctctcagcctgcttccaagacctgggaacagggtggacccacggccccacacttgccatcccaggaagctgcagtgtgcagagggcaggcccggctgggccctcctgctgaacgcagtgccctaagcacaggtgtacggtcattgcatgagtggatttcaaactatttttaacccctgcaggagcaggctagagcgttttctatggacactgaagggttaatccagagctcaggctgccactctggggaagtggtcagcacttacaggaatggtccctccaacatctgagcgaggaaggggcacagagcacagttgtgccttccttgggcctgggcaagctctgtgcttcacagagcaagcctgtgtcagatccttcagcagagaccacagccaggggtggtgaagccgatgaggaagtgagggccaaccacactgctcaggctgttcctcacaggaggctggggcaggctgagccacgcaagaccacagctctcagccctgtgctatttccagggcacacttacagatcctgaatggtagagaacgtcctggataaaacaatgacagcaagacagccatgtacacagatatcttgtgggaaaccctttcacggccactttgaaactgggttgggagaaggacgtgatgctgggtcaggcatccattggggaccatggacatttttggagagtttgggccaatgttcttgtgtaatttgtcagaaggaacacctacttcttcattcttgtgaagaagaacccataaactggcccccgtgttcagaggctccagtcgagcgagttgaggggacagctggacttctccttcctcaggctggctggaggcttcagcaagggggcacaccgtccacacgcctctgtaaaacagcgttcgaacgggacatctctaaggcatcgtccaactctgagagtctgtgaccttccaccctggggtggagggaaaggccttgggatacagtccacacatcacgttttcccctaaaagtaccacccgttttagtccctgcagacactggcctcagcagcttctctgaggcagccccgttgagcccagggctgaccacagacaagcactactgtccacagaacttcacgcccagtggggccagacttggaggatggcagaggagagaagctccaggggcctctccattagaaaccaacttgcaggccacttaatctcctatgctcagcctgtacttggaagctgcttgttcttggctgcacatttgctttgtttgaatcaattaatccaagtctctctcctctccccacccccaaccttgcctttagggtgacatcaatattcatgtaataaagaaatcgcacaaaaagctgactccccacttcctgccctacaggcccttttttcttcctcagcccatgtgcaatcctggctcccagcaagtccccggggctgcttggtcaatgcagccctgtgtgcaggcctggcagccctgccacccccgccttcggctcccattggctgccacggcctgcagtgggctgcaccagggttcatccatcctccctgggcagagggaataagaggctgcctctgcccaccagtcctgccgcccaggacccgcagcagagacgacgcctgcagcaaggagaccaggaaggggtgagacaaggaagaggtgagaaagagccaggccaagaggacgctcaggaagaaatggttcttttcttttgggtggaacggaatggaggggtagaaactaagtggtagcttaaaaagcccctttaggacaattggcagcatttcagaagtgtcaataggatgatgtgttttaatctccacattactgctgctttgtggacacctgactgcatcagccctagacagctagaggtgtgttttgccataaatcagagaaacgtcaggtttcatggcccagaagtgattgttgacattttcccagcggtactacaaatactgcctcttctgtaactatttgaagagtaaagattttgcttcccactggggctaaaaatgatggagaacctaatgctagtttagtcctatatcataaataaatgcttcccttttctccttatatttcttccaccgccctgggtaagtaactcttcagttttccagtttccctcagtttgaagtgccagggtccccacagccccaggacgccactcagaaattacgtaacaattacaaataaattgggtcaaagaaatcggggttttggtgggttttaactttcctcagtctcacagtttctcagggaggtcgaaccccttctttagagggatcctcacacgctaggtaacttgtctttctaaggagttaaagttcaaaagttctcttgttctcaatattaaaagattaatgtaggacattcaaagaatgtgagaaagaaacggacatttatttccatttctcttaaaagataaactataaaccatcaactatttcttaggtcaaagggaaaaatttaacaagaatttaattgatttgtagtgtggttatgaagaaaaccatattttctagtggtttctattagtgttctaatatatgggatacatgttttatgcctttcctttgtaataatcccattagt

SEQ ID NO: 1010 - DNA, 6000 bp, Homo sapiens
cttttcaaattatttgctcaacatttaaagacagatgatttacatttacttctagtctttcgcgctttgtcctcctgagcaaactccagagttagcttatttatcctgctgattcagtatctagtaaacctgcctgggagtaggtgagagcacatgaaccgtccctttctgactaacctgacaggaatctaggccagtgactttggtgaagccacaaataggcttatctaggagggagttttttgaaacttgtctgaaaatatgttttaaagtgtctccacaaggcctaagaatgtaggagaaaattacatttggaaaactaccaactggctcatctttgcatgtattcataacaactttttcccttcagaggttatctctgtaaagcttacattcttttcagacaggacctggcctgttccttggtgaatcagcaaaactgaagaaaattgagttttaaagagaaactaacatgggggagaagtgggtgctgcaaaaggggatagtaactatacctacgatttgtttttcaagtgaagtcttgaagtaaatgtgacaaatgttaattgttaattttgggtagtggtgcatggtatgggaataaattattctttgtacttttttgtattttctaatgtctcaaaataaaaataagtaaatcgtggtcaggcgcagtggctcatgcctgtaatcctagcactctgggaggctgaggcgggtggatcacctgaggccaggagttcgagaccaacctggccaacatggtgaaaccttgtctctactaaaaatacaaaaattagctgggcatggtggcacatgcctgtagtctcagctactcgggaggctgaggcaggagaattgcttgaacccgggaggcagaggttgcagtgagccaagattgcaccactgcactccagcctggtgacagagcaagactcccatctccaaaaaaaaaaaaaaaaaagaagaagaatcataaagattatcacactgttttccaaaaaacaaaagcacggttgatctagacagtgctacatccattccagatattaatttcagaaacaatttgacatgtagaattagactgctgtttctactccccaaatcctgtcatttgcagaacactgtaaaaatacaggagagattgtaatcaaaatgtgttaattccacctcaacctgacctagggatgctagagggtagaatagtcctctagcatattccatactcctgcaatctgttttttaggacaatgaagaatgaggctattaatgcaaaagatgaacaaaattagacaaataatccaatctagtttagctcaatagtgatcaagttaaggtcaattgcatcagtttctcttgccctgtgttattgttctgtgactaaatccttcctttatccagcattatcagtactctcaaatatatataccaatatgtacaccaatctgtcctacaaggaacactgtgcactagtacaaatggaaaaaatggcagcatgtattaataaatatattaataaatggcaacgtttattgtcctgtgggtaaatctttcctttatccagcattatcagtattctcaaatatgtataccaaatatgtataccaatctgtcatacagtacaaggaacattgtacactagtacaaatggggaaaaaatggcagcatgtattaacagccttcaaaatatgtgtaccggccaggcgccgtggctcacgcctgtaatcccaagactttgggatgccaaggcgggcagatcacgaggtcaggagttcgagatcagcctggccaatatggtgaaaccccatctctactaaaaatacaaaaattagctgagtgtggtggcacgcgcctatagtcccagctacacaggaggctgaggcagaagaatcacttgaacccgggaggtggaagttgcagtgagctgagactgcgccactgcactccagcctgggcaacaatagcgaaactccatctcaaaaaaaaaaaaaaaaaaaaaaaaaaaaaaaatatatatatatatatatatatatatatatatatatacacacacacacatacatacacacacgtaccattcctactaaaaggacaaagagctgaggtgggaggatcccctgagcccaggagttcgagactagcctgacaaacactgtaggactctgtctcaattttaaaaataaaattgaaaaaaagggacaaacggacatcatgtactttctgatgtgttgcaaagaggacacaatatcacacatgtagtactcctgctataatgcgtaacctgaatctaattatgaggaaactgtcaaaacccaattgaggctgggcgtggtggctcacacctgtcatcccagcactttgggatgccaaggcaggcagatcatctgagctcaggagttccaagaacagcctggccaatgtggcaaaaccctgtttctaccaaaaagaaaaaattagcggggcgtggtggcgggcgcttgtaatcccagctactggagaggctgaggcaggaaaatctcttgaacccaggaggtggaggttgcagtgagccgagtttgcaccactgcactccagcatgagcgacactcttctgtctcaaaaaaaaaaaaaattgagtgattttctacaactggcctatattcttcaaaatgtcactatcaagaaagataagtctgaggaaactcttccatattaaaggagactaaaaagacatgatcactaatgcagtaagtgaccctggatccaatccaggttataaaggttataaagtaaggttataagaaggttataaaaggttaaaaagtaaggttattaaaaaaaggttatggctgggcgcggtggctcacgtctgtaatcccagcactttgggaggtggaggcaggcagatcacctgaggtcgggagttcaagaccaccctggccaatgtgttgaaaccccatctctactaaaaatgcaaaaattagctgggcgtggtggcagatgcctgtaatctcagctactggggaggctgaggcaggagaatcaattgaacccgggaggcggaggttgtggtgagccgagattctgccactgcactctagcctgggcaacagagcgagactccatctcaaaaaaaaaaaaaaaaagaaaagaaaaagaaggccgggtgcagtggctcacacctgtaatcccagcactctcggaggccgaggcaggtggatcacgaggtcagcagttcaagaccagcctggccaacacagtgaaacctcatctctactaaaaatacaaaaattagccatgcatggtggcaggcacctgtaatcccagctgcttgggaggctgagggaggagaatcacttgatcccgggaggcagaggttgtagtgagctgacaccatgccgttgcactgcagcctgggcgacagagtgagactctgtctcaaaaaaaaaagaaagggttataaagtacattgatggattgatgggacaaaggaatttgttttttttttttttgtttttttgagacggagtctcactcttattgcccaggctggagtgcagtggcacgatcttggctcaccgcaacctctgctcctgggttgaagcaattctcctgcctcagcctctccagtggctgggattacaggcacacaccaccacgcctgttaattttgtatttttagtagagactggggtttctccatgttggtcaggctggtctcgaaatcccgacctcaggtgatctgcccacctcagcctcccaaagtggtgggattacaggcgtgagacaccgcgcctggcccgggacaaaggaaattaatgttcagcctagtaaactaaatttcctgaatttgctacatcctcgttcttatgacacactaaaataggaagtgtgtgtgtgtgtgtgtgtgtgtgtgtgtatgaaaataaagtgttaatgtacatgtagcaaaatgttaacaattgttgaatctaggtgaagggaggtcaatgcagtattcttacaagttactatatctcaaatttcttcaagataaaaagctaataaaaatggtgggtaaccatagcacagtaaaaagaaaaaagtgggtgtaccatttgacctcttattctactattaggagtcagtctatcctaaagataaaggaattttcaaaagtttttgcctttgggattttggggaaaaaaacgggcttgaggtaaatccaaataaaaacaaatgagcctggggggatttctgtcctaatattcctctaaatgggacctgggaaggcttttgaaaaatatataggctatctcagaaaagttccaaataaattatgtagctgctccaccctaataaggaagttgagcatagcttcccactccctaggtgtgggctttgtatagtggcttccttcctaagactacagtatggaaagggggttaaaaaaggtaacttcagagtggagaaacctacaaaccctacactttattcaggtaatcaaggttgacatgaatagtcagaaatcatgtatcccccttttttttttcttttggtagagacggggttcctctatgttgtccagcctggtctcgaacttgaggtcaagcgatacacccgccttggtctcccaaagtctccggattgcaggcgtgagccaccacgcccggccaacaatcatgtacccctaagcccataaccctgtgtaattatgcgaaaaattccaataaaggcacattctccaatatacctaaccagtactcctcaaaacagcccgactaatttcagatagaggaactccttatcttttcttcctcctacccaagatcccagtttaggaaaaaaataccggtcaggtcacgagtcagcgacgtagaaggacccgaggacgcgcccacaggccgggacagggcgggacttcctgggcgtcgctctcttcccattggctgagaagggtcatgaggatgaactgtgcagtcacctggcaggaaccggaacccgcggttataaagtaaaggaacccgagatctgcgcaggggttccctttgccgatttctctcacctcacctttcaaacctaaactcgagcctactgttcaccggcctagcattgctctcgccatggctctcagcgatgctgacgtgcaaaagcaggtgaggggcttggttgggtcttacgaagccgcggcggcagtcccggggagtgggctggagcccgcctagggaaggccgcgggccttgagccgcccagatgccgcaggaaggtcccttgctccaagtcaccagatccaagaggtcggcctgaggacggagatttgccccgcagctcatgtgacttttgctcgggtcttgggcactgcccgcttgcctgcgcgctgccttcttgaacgccctggctctttgcctcccacctcagcattccctgttttccaagggtattcactgtgcctagtcggacagagatctgtgcaaggattgaaaacagccttgtggccaggggcagtggctcacgcctgtaatcccagtattttgggaggccgaggcggccggatcacctgaggtcaggagtccgagactagcctggccaaaatggtgaaaccccggtctctactaaaaatagaaaattagccggacgtggtggcgcgcgcctgtaatcccagctactcgggaagctgaacccggaggcggaggttgcagttagccgagatcgcgcctttgcactccagcatgggcgacagggcgagactccctctggaaaaagaaaaaaaaaaaacaaaccagccttgtcactttttttttttttaaccctgagggaaatgcttaaggctatatgataggaaacagtgcggagggaagagacctgcttccaaccagtgttttgacaaggtcgttcactttatgaactgtgtttttttctttttttcttttttttttttttgagacggagtctcactctgtcgcccaggctggagtgcaagggcgcgatctcggctcactgcaacctccgccccgggttcaagtgattctcctgcctcagcct

SEQ ID NO: 1011 - DNA, 6000 bp, Homo sapiens
taagagttccaagaagagatatagtcaaccctttaaggacatttaactccacccctaaggcagaaaatttgacctttaaaaaaacagtttcttcttcctgctcagtaattaaggtttttagagtcaggtttctttgtaaatttgatgaaataaattaccatactccccaggaaaaaagcaaatatacacaaatattttcatgcaatggagaagtcagaaaattcaggatttattaagcatctactatgggcttggtgcttcatctatttacttatgagaatacagtaaacaacacacactgtcctcatcgagctttcatgtagcatgaaggattataggaaatagacaagattccttctttcaattttacataaataaaaaataggccgggtgcagtggctgacacctgtaatcccaatactttgggaggctgaggcgggcagatcacgaggtcaggagttcgagaccagcctggccaacatggtgaaaccccatctctactaaaaatacaaaaattagctgggtgtggtggcgggcaccagtaatcccaggtactcaggaggctgatgcaggaggatcgcttgaacccgggaggcagaggctgcagtgagctgagatcacgccatggcactccagcctgggcaagagagcgagactgtctcaaaaaaaagaaaaaataactcatgcgcagtggctcacgcctataatcccaccacttcggaggttcaagaccagcctggccaacgtggcgaattcccatgtgtactaaaaatacaaaaaaattatccgggtgtggtgacatacgcctgtagtcccagctactggagaggctgagacaggagaatcgcttgaacccaggaggcagaggttgcagcaagctgagatcgcgccactgcactccagcctaggcgacaaagcaagactccatctcaaaaaaaaaaaatcattttgatctagattccaaggaactatagctttatctttatactagcttttcctatggaagccttagtcttcaatatattatgacaaggagggaagaaagggaacaagagggagagaattagcactgtggccactaagagtatatggagggcattttacttttccactgcatcaagcttttcctatattgaaagaagcagaagaagcagtgaacagaagaagcagtgaaaaaggtttaaaaaaaccctttggttctgtaagaatattgtatgatttcttaaacttctccatagatactaattttgtcatctctatttaccctttggcattagcagaaccacaaaatgaagaagaaatacccactcgtcttagtgcatattaggttaagaataaaatgaaaagacactttcaaggaaatggaaacatccaacgaaaaacttttttttttgagaccgagtttcactcttgttgcccaggctggagtacaatggcatgatctcggcttgctgcaacctctgggttcaagcgattctcctgtctcaggctcccaagttgctgagattacaggcatgcaccacctcgcccggctaattttgaattttagtagagacagggtttctccatgttggtcaggctggtctcaaactcccaacctcaggtgatctcaaactcccaacctcaggtgatctgcccgcctcggcctcccaaagtgctgggattacaggcgtgagccggccaggaaaaaattttattgctcatctcagaagattcataagacagtgagtgtgctttagtaagagaattttcctagcacagtacttcagaaaaaaaaggacttagttctctaaactatgtgcaaattaaaactgcagccttaaacttccttctctgaaaaatctatcggcaatatgattactaaatgcaaggattctgatttgttagttataggcttataaactgctactatattcccctgagagtcttttgcatgacaaaattcttaatacctacagacttgaaggtatggcacttaaaaaaaaaaaaaaagtttcccaggactgattacactttgaaaactgatgtgggttcacgacttccacaacaattttttcccataaactctgatacatctacttggtgccaaacaccgttaggcattgaggctcctaaatgtaagcaaaaggggtcctggccaggcgcggtagctcatgcctgtaatcccagcactttgggaggccgaggtgggcagattacgaggtcaggagatcaagaccatcctggctaatacagtgaaaccccatctctaataaaaaatagaaaaaattagccaggcgtggtggcgggcgcctgtaagtcccagcttctcgggaggctggggcaggagaatggcatgaacccaggaggtggagcttgcagtgagcggagaccatgccactgcactccagcctgggcaacagagcgagacttcgtctcaaaaaaaaaaaaaaaaaaaaagaaagaaaagaaaaagcggtcttccatttgacacaattttgtttatttatttaatatttttagagacagggtcttttgctctctcacccaggatggagcacagtggcatgatcatagctcactgcagcctcgaccccttgggctcaaatgattctcccacatcagcctccctaagtagctaggagcacatgtgtgccccaccacacctggcaatttttttttttttttgagacagtctcgctctgttgcccaggcagcaatggtgtgatctcgcctcaccataacctccacctcccgggttcaagaaattctcctgcctcagcctcctagtagttgggattacaggcatatgccagcacgccccactaattttgtatttttagtagagacagggttttgccacgttggccaggctggtctggaactcctgaccgcaggtgatatgcccacctcggccttccaaagtgctgggattacaggcatgagcaaccatgcccagacagcctggcttattttttaagaaaaaattttttagagataaggtctatgttgcccaggctggtcttgaactcctgggatcaagcgatcctcccacctcagcctcccaaagtgctgggggctacaggtgtgagccaccacacctggcgtgtatttgtgtttattaatattaaaattttttgagatggagtctcactctgtcacccaggctggagtgcagtggcacaatcttggctcactgcaacctccgcctgccgggttcaagcgattctcctgcctctgcctcctgagtagctgggactacaggcgcaccccactaggcccagacaatctttttttttttatttttttgagagggagtctcgctctgccgcccagggtcgctcggcctcccgggttcacgccattctcctgcctcagcctcccgagtagctgggactacaggcgcccgccaccatgcccggctaattttttgtatttttaatagagatggggtttcaccatgctggccaggctcgtctcgaactcctgacctcaggtgatccgccctcctcagcctcccaaagtgctggtattacagacgtgagccaccatgcccggccccagcctgtatctcacaaatgttaacacacacattagtgggagaccaatcattacaatccattatgatagaggggacttccccaaaatgaagattaacagtacatacaggcctggcgcgttggctcatgcctgtaatcccagcactttgggaggcccaggtgggaagatcacctgaggtcaggagttcaagaccagccaggccaatatggtgagaccctgcctctactaaaaaaaatacaaaaattagccgggcttggggcgcgagtctgtaatcccagcttctagggaggctgaggcaggagaatcacttgaacccggggcggaggttgcagtgagccgagatcgcgcccttgcactccagcctgggcgacagagtgagactccgtctcaaaaaaaaaaaaaagaaaaaaagaaaaaaacacagttcataaagtgaacgaccttgtcaaaacactggttggaagcaggtctcttccctccgcactgtttcctatcatatagccttaagcatttccctcagggttaaaaaaaaaaaaagtgacaaggctggtttgttttttttttttctttttccagagggagtctcgccctgtcgcccatgctggagtgcaaaggcgcgatctcggctaactgcaacctccgcctccgggttcagcttcccgagtagctgggattacaggcgcgcgccaccacgtccggctaattttctatttttagtagagaccggggtttcaccattttggccaggctagtctcggactcctgacctcaggtgatccggccgcctcggcctcccaaaatactgggattacaggcgtgagccactgcccctggccacaaggctgttttcaatccttgcacagatctctgtccgactaggcacagtgaatacccttggaaaacagggaatgctgaggtgggaggcaaagagccagggcgttcaagaaggcagcgcgcaggcaagcgggcagtgcccaagacccgagcaaaagtcacatgagctgcggggcaaatctccgtcctcaggccgacctcttggatctggtgacttggagcaagggaccttcctgcggcatctgggcggctcaaggcccgcggccttccctaggcgggctccagcccactccccgggactgccgccgcggcttcgtaagacccaaccaagcccctcacctgcttttgcacgtcagcatcgctgagagccatggcgagagcaatgctaggccggtgaacagtaggctcgagtttaggtttgaaaggtgaggtgagagaaatcggcaaagggaacccctgcgcagatctcgggttcctttactttataaccgcgggttccggttcctgccaggtgactgcacagttcatcctcatgacccttctcagccaatgggaagagagcgacgcccaggaagtcccgccctgtcccggcctgtgggcgcgtcctcgggtccttctacgtcgctgactcgtgacctgaccggtatttttttcctaaactgggatcttgggtaggaggaagaaaagataaggagttcctctatctgaaattagtcgggctgttttgaggagtactggttaggtatattggagaatgtgcctttattggaatttttcgcataattacacagggttatgggcttaggggtacatgattgttggccgggcgtggtggctcacgcctgcaatccggagactttgggagaccaaggcgggtgtatcgcttgacctcaagttcgagaccaggctggacaacatagaggaaccccgtctctaccaaaagaaaaaaaaaagggggatacatgatttctgactattcatgtcaaccttgattacctgaataaagtgtagggtttgtaggtttctccactctgaagttaccttttttaaccccctttccatactgtagtcttaggaaggaagccactatacaaagcccacacctagggagtgggaagctatgctcaacttccttattagggtggagcagctacataatttatttggaacttttctgagatagcctatatatttttcaaaagccttcccaggtcccatttagaggaatattaggacagaaatccccccaggctcatttgtttttatttggatttacctcaagcccgtttttttccccaaaatcccaaaggcaaaaacttttgaaaattcctttatctttaggatagactgactcctaatagtagaataagaggtcaaatggtacacccacttttttctttttactgtgctatggttacccaccatttttattagctttttatcttgaagaaatttgagatatagtaacttgtaagaatactgcattgacctcccttcacctagattcaacaattgttaacattttgctacatgtacattaacactttattttcatacacacacacacacacacacacacacacacttcctattttagtgtgtcataagaacgaggatgtagcaaat

SEQ ID NO: 1012 - DNA, 6000 bp, Homo sapiens
agatggcatcaagtcactccccaatttacaactctgtcatggcttctgcttgctcctgaagccttccgctggctctagtagatgagaccactggatctggccctgtatgcttgcctgccctcattacccctcctccctttgcacaccacctcaaagctttactggttgcctttcagtttttttgaaaacatctatttttctgcttgagaagttattttcctccacttaccacttaacttgtttttcatcctttaggtctcaaaatctctttgaggagagcttatcctggtcactctctcaccttcttctctattccagtcccttgtctgtttcaggacatgccaccaccttttttttgtttgtcttgttttgtttttttgagacggagtctcactctgttgcccaggctggagtgcagtggagtgatctcggctcaacacaacctccacctcccaggttcaagccattcacctgcctcagtctcccgagtagctgggaccacaggcatgagccaccatgcccggctaattttttgtatttttagtagagacgaggtttcactatgttagccaggctggtctggaacttctgaccttatgatccacctgcctcaggctcccaaagtgttgggactacaggcgtgagccatcgcacccagcccatgccatcatcttaaattatttttacttttttctgtttcaatgtttttcttttctggttttccaactaagatgttagcttcacaagagggaccgcgtctgatgtactcatcattgcttttgctagcacccagcaccctgcctggttaatggcagggattcaataaacaattgattggccaggcgtggtggctggcacctgtaatcctagcactttgggaggctgaggcaggcggatcacttgagcccaggagtttgagaccagcctgggcaacatagtgggacacctgcctctacaaaaaaaaattaaataaattagccaggctttctggtgcatgcctgtagtccttgctacttgggaggatgaggccagaggattgcttgagcctgggaagtcaaggctagagtaagtcatgatcacatcactgtactctagcctgggtaacagagtggaagtggagactctgtctcaaaaggaaaaaaaaaaaaaaagcaacaaacaactgatgaatgcaaatgaataaaatgagtagagtctagtttagagtcgataaccacattagcctgtaggctagagatctgtagcgcctattaaaatctgtccaaaactcccccgaaaactgaccaggtgcagtggctcatgcctataatcccagcacttcaggaggccaaggcaggtggatcacttgaggccacaagttcaagaccagcctggacaacacagcaagacgctatctctacaaaaaaaaaactaaaaaattaaataaaaaagggccgggtgtggtagctcacacctgtaatcccagcactttgggagactcaggcgggcggatcacaaggtcaggagtttgagaccagcctagccaacatggtgaaaccccatctctactaaaacaaaagcaaattaaataaaaaaactccaaataccataaactgctgtgattaaagtcaaatgatttctataaaagggctatattattttatgcaatttgctgaaaagacaatctctttcctcattgaaatgccttagcacttctgttgaaaattagttaacaattctaggttttctgttctgttccattgacctgtatgtctagtctcaaaatatatattcaaaaaataaaattaaaaagggaaggccaggaactttaggaggccaagatgggagaattgcttgaggctaggagtttctgagcagcctggggaacatacccatttccacaaaaacaatctttttttttttttagacagagtctcactctgtcgcccaggctggagtgcagtggtgcgatctcggctcactgcaacctccgcctcccgggttcaagtgattcttctgcctcagcctccccagtagctgggactgaaggtgcgcgccaccatgcccagctaattttttgtatttttagtagagacggggtttcactgtgttggccaggatggtctccatctcctgacctcgtgatccgtcccccttggcctcccaaagtgctgggattataggcgtgaaccaccacgcccggcctacaaaaacatcttttaaaaagtagccatgtgtggcctggggcggtggctcacgcctgtaatcccaccactttgggagtctgaggtgggtggatcacttggggtcaggagttcgagagcagcctggccaacacactgaaaccccgtctctactaaaaatacaaaatgtagccaggcatagtggtgcacacctgtagtcccagctactttggaggctgaggcaggagaatcacttgagcccaggaggctgaggttgcagtgagccaagatctgccactgcactccagcccaggcaacagagggagactccgtctcaaaaaaaagaaaaaaaaaaaaaaaagctacatgtggtggcacaagcctgtggtccttgatacttgggaggctgaggtggaacaattgtgagcccaggaggtccatgatgcagtgaggtatgattgtaccactgcactccaggctgggtaacagaagcgacaccttgtctctaaaaaaataaataagaccaggcatggtggctcacgactgtaatcccagcactttgggaggccgagaggggtgatcacccaaggccaagagttggagaccagcctggccaacatggcgaaaccctatctctactaagaatacaaaaaaaaaatattagccaggtgtggtggtgggtgcctgtaatcccagctactcaggaggctgaagcaggagaatcgcttgaacccaggaggtgaggttcagtgagctgagatcgcgccattgcactacagcctgggtgacagagcaagactctgtctcgagaaaataataataaaaaataaataaataaataaaggaaaagactgagagcaatgtgaaagaaatgaacttaagtatgtaccaaattggtaacataagtacctcccaaaataaattattgcatgttacatttttgaaagtttttttaggtaaagtgtacatacagtgaactgcacagaccttaaaagtaaaattagggccgggcgcggtggcgcacccctgtaatcccagcactttgggaggctgaggcaggcggatctcttgaggtcaggagtaggagactagcctggccaacatggtgagaccccgtctctattaaaaatttttaaaaagccaggcacggtggctcacgtctgtaatcccagcactttgggaggccaaggcgagtggatcacctgaagtcaggagttcaagaccagcctaaccaacgtggagaaactctgcctctactaaaaatacaaaaattagctgggcatggtggtgggtgcctgtaatcccagctacttgggaggctgaggcaggagaatcgcttgaacccgaaaggcagaggttgcagtgagctgagatcgcgcccctgcactccagcctgggcgacagagtgagactctgcctcaaaaaaaaaaaaaaaaagtcttcatttttggttacccatttcactgcaacctttgcctcccaggctcaagcgattctcctgcatcggcctcccaagtagctgggattacaggcgcgtgacaccatacctggctaattttttgtgtttttagtacagatggggagtttcaccatgttggccaggcaggtctgaaactcctgacctcaagtgatccgcccaccttggcttctcaaagtgctgggattacaggagtgatccaccacacccggcctgtactattagttttccaaggtcactaagcctttcctttgcaaaactttatgtccctattaatggcaccatcctttcctcagtcactcgggcttaaaaagcatcctgtggcaccagccccacaatagcagttcaactcttttatcacttcctttagaatagccttgttgagatatagatctcataacatagaattcacctatagtgtacaattcagtagttttcagtatttcaaagagtcgtgccaccatcaccccaaaaagaaactctgtatccactggcagtcactccccatcaggattttatcacttctgatctggctcagtcttctaactccttattgtcaatgccctccttgttccaattcagtacacacaccacgggcaatttgatctccctaaaacacactgtatcctctctcctagataccttccgatactcctccaaagaactctcggattcaagtaaacaaacatccattaatacaagttaagtatgttccaggcgctgtgtgttccaggtactgttaacaaaagcgggttactagttaagacttccttcatgccctggcgcctctgctcagccagttcccttcgcctaggaggacctctctacaccaccccgctatattccctccccggaattccttcccaaccttcaaggaccatctgccccaactagtggcgaacatcgaggctgtcgtgactgtgtagatacttatttgacctgctcccttggcaaacacttgaaacgcaatacatgtttgtggaactgaacatagcctgtgcatgcagcaaggcttctttccctggaatcgcctgcccttcctccaacacagcgaccagccggtcagaatcccaacccctcgactccggaaatgatctgagagacggaacttccgaacgtcgcaatcagatttgggcgggctaggagggtttgggtcttcaggtcacatctggacggagagacctccggggcctccgttggtcggtccttccgctccggataccgttccggatgtcaggtagttcaggtcccgccccgacgccggccgtgacgaaggcacgccggggtgacctcaccctccaacatggcggcggcggtagattagggccgcgggtcggagcactcaccgccgctgggggaccctgtcggaagcaactgccgccgccgcctctttcatctcttctggggcaggggccagggccaggtgaggggagtggggttccgggaaggctgagctgggtgaggaggtggttttcacctgggtaggaaagtgcccagagaccgtatcgagccaccgactccccagtggttccgacgacgcgtgagtttgagtgtgtgtgtctacaccggcgctccttcgcccgaaggtgctcggagcttaggggtccgcttcaccgtgaccggacctggccgcgcggccccgccgctgagcaggcttcttccggcgtggggtgccggaggcggaggagctcggccctggctccacgccgctgtccttccccacagacagcttcacgtggaaaacccgggtccatttttagggctaaactggggaacggcgacttctttttggttgagggaaaggttttcctgcgattcacttagaacactggaagattagctttgccagtcttagtcgtttcttctcagagattgttagaagtcttgtttcttaaccttaattcactgctgttctgacacctattttttcagaaaaaaactgccttcttgcccttggaggcagtacagttcacacggagtcattttccccctttgatttatcctcccaacattctgtaaagatcctatttcttgccttcataaccgactttctgagtggaggctctaacctagcgttgaaaatcggacggatctggccagttgttcacatgctgttgactgctggctttggttagctcttagccactccctgcacaagtgtttgtttattcaaaatagctatctcactgtctctgtttagaagtttgaactaagctgagagccctccctccttacttttatttttttgttgttgttgcgtaaaacaaaacaaaaacttctttggcgaaattataagatttcctctggaggtttagtataaagcagaatgttgctctctgccctgactagtgtgaccttgga

SEQ ID NO: 1013 - DNA, 6000 bp, Homo sapiens
actgtgttagccaggatggtctccatctcctgaccttattatctgcccatgtcggcctcccaaagtgctgggattacaggtgtgtgccaccgcgcctgaccaatatgtggtcttttgtgtctggcttctctctttttttttttttttttttttgagacggagtctcactgtcgccaggctggagtgcagtggcatgatcccactgcaacctcggactcccaggttgaacctaactcagtcccaaagtagactgagactgtaactcagtctcagtaactgtaactcagagtagctgggattacaggtgcgtgccaccacacccagctaatttttgtatttttagtagagacggggttttgccatgttggctaggctggtctccagctcctgatctcaggtgatccacctaccttggcctcccaaagtgctgggattactggcgtgagccaccacgcccggcctgtctggcttctttcacttagcataatgttttcagagtttatccaagatgtagtgtgtatcagtactttattcctttttattgctgcattctattccattgtgtggacataccacattttaaaaataagttgatgggcatttttttttttttgagatggcatttcactcttgttgcccaggctggagtgcaatagtgccatctcagctcacctcaacctctgcctcctgggtttaagcgattctcctgcctcagccttccaagtagctgggattatgggcacacaccaccatacccagctaattttttttgtattttttgtagagatggggtttttccatgttgctgaggctggtctcaaattctttgactcaagtgatcctcttgcctctgcctcccaaagtgctgggattataggcatgaaccaccacacctggtctgtaatgctgctttgagcattcatgtgcaaatttttgtgcagatgcgttttcatttttctctggtatatatctggaagtggaacagagtaactgaattttatgtcctccatttacacaagccatatacaggaagcctaattattgtgaaagtcagattatctaggacgggatgaaagtaaggcagttctctgaattatctgcaaatgccaactgctgagtgaaaatatttttgggtagctctaacacaagattgaacaattaggcctgttttaattggaaagggggtagtgtctacactagagttttagtgtctgctgagttttaaaaatgatacttgtccagttgcatttttcagatgggtggggtgaattttttaccatttgataatttttttttttgagatgcagtttcactcttgtgaggtcttcactcccgacctcaggtgatccgcccgccttagcctcccaaagtgctgggattacaggtgtgagccaccgcgcccggccatttcataatttttattagaattattttactctctttcagagaaagtcttacaattcaataggagctggcaaagcatggattagaaaatagctttggactccatgttaacttgtggaacttaaaaaaaattccctgttcaagccaccagtgagtcatgagactaaagagctgatagccaagaaacttaatgttttgttgttgttgtttgcttttttatttttattttatttatttattttttgagatggagtctcactctgtcgcccagactggagtgcagtggtgcgatctcggctcactgcacgccccgcctcctgggttcatgccaggaggtgtgtagctgggactacaggcactcgccaccatgcccggctaattttttgtatttttagtagagatggggtttcaccgtgttagccaggatggtctcgatctcctgatcttgtgatccgccctccttggcttcccaaagtgctgggattacaggcgtgagccacggcgcccggccaacttttttattttgagacagaatctcactctgttgtccaggctggagtgcagtggtgcaatctcggctcactgcaaactccgcttcctgggctcaagcctgattctcctggctcagcctcctgagtagctgggaatacagatgcacaccgccacacccagctaatttttgtatttttggtagagatgggatttcaccatgttggccaggctggtctcgaactcccgaccttaggtgatctgcccatctggtctcccaaagtgctaggattacaggcatgagcaactttgcctggtcttttaatgtttaaaattacagctttttgatttgtgatggatttatctgtgaatttttatttttctctttataaactgggattatagttgtgttcaactctgtattactggagcatttaataattctttttttttttttttgagacagattcttgctctgtcacaaggctgaagtgcagtggcactatctcggctcactgcaatctttgcctcctgggttcacgccattctcctctctcagccccctgaagtaactgggactacaagtgcgtgccaccacgcccagctaatttttgtatttttagtagagacagggtttcaccacgttggccaggatggtctcaatctcttgacctcgtgatccgcctgccttggccttccaaagtgctgggattataggtatgagccaccacgcccgactgcatttaataatcttataatattttagtggaaggaaatttagaaacaggtttttgaaataatttattaaaatgtgttaaactatagggtgttttggttttcgttctgtgaggttagagaatacagtataagtgtgatactctaaattagtatatctaatgtgagtgctaggaatttcttttttttttttttttctttttgagacggagtcttgctctgtcatcaggctggagtgcagtggcacaatctcagctcactgcaacctctgactccctggttcaagggattctcccacctcagcctcctgagtagctgggattataggcacacgccaccatgcctggctaattttttgtatttttagtagagacgaggtttcaccatgttggccaggatggtctcgatctcctaacctcgtgatccacccacctcggcttcccaaagtgctgggattacaggcatgagtcaccacacccagcctaggaatttctttttaaataggcatccaaagtaatttgatgggacaagtttgggaaacaaatacaaaagactgtcatgttgctgcatatttgctttacataagaactaatagtaggatttttttttttttttttttttggaggcagagtctcactctgtcacacaggctggagtgcaatctaggctcaccgcaacctctgctttctcggttcaagcgattctcatgcctcagcctcctgagtagctgggattacaggcacacaccatcacgcctggctaatttttttatttttagtagagacagggtttcaccatgttggccaggctggtctctaactcctggcctcaagtaatccacccaccttggcttcccaaagtgctgggaagtataggcgtgagccaccatgcctggtttatagtaggatttaatagctgctgtgtaccttctgattatgtttcataaaatgtgtctaattcctacaatataatcagcactggtagcattctggaacttggactggtacttgtaatagaaatctggtttagaaaagaaaatgaaccatatattgtagaattgtggatatacatttgttgttaaaggttcatggatgttttatttgtggctggttttggagatgacaccaaatgaatacataaacacagcatgaagttagtctaggtttccttaggctgtttggctagcaaccacagttggccctctttatccagtttccatatctctgcagattccaccagtcttgattggagaatatttagggaaaaaaacacaaataacaataaaaacaatacaaatgataccaatacagtataacagctatttaatggcatttacattgtcttaggtattataagtaatctagaaatgacttaaaagtatatgagagggaggaagtgagtaggttatatacaaataccacaccattttgtataaggaacttgagcatctgaggattttggtatccacaggtatcctggaaccaatcccacatgggtaccaagggacaattctacttgaaacttaatagaggaacaaagtaaaaagattaaggcacagaaagaaacaggtgggttacatattatgtttaatagtttgaatcgtacaaattatagcaggttttttgtttgtttgtttgagacagagtttctcgctcttgttgcccaggctggagtgcaatggcacgatctcagctcactgcaacctccacctcctgggttcaggcgattcacctgtctcagcctcctgagtagctgggattacaggtgtgcatgccaccacgccaggctaatttttgtatttttagtagtgacggtgtttcatcatattggtcaagctggtctcaaactcctgacctcaggtgatccgcccaccgcaccctcccaaagtgctgggattacaggcatgagccactgcgcctggccaagatagcaatttttatagttaagatcatctatgtatttactcacttctggataccaagaacacttgtactaacttgaattttaagaggtcctattagataaaattcaatgagtaaaggtaactatatgtccctctcatcatttgaaaagaatcttgaaatatctgtctttttttttttttttttttttgagatagagtctagctctgtcgcctaggctggagtgcagttgtgcaatctcagctcactgcagcctctgcctcccaggttcaagtgattctcctgcctcagcctccagagtagatgggattacaggtgcctgccaccacgcccagctaatttgtgtgtgtgtgtgtgtgtgtgtgtgtgtgtgtgtataaactacatatatatatatatatatatatattttttttttttttttttttttttctttttctttttgggatggagtcttgctctgtcacccaggctggaatgcagtggcacaatcttggctaactgcaagctccgcctcccgggttcacaccattctcctgtctcagcctcccaagtagctgggactacaggcacctgccaccacgcctggctaatttttttgtatttctagtagagacggggtttcaccgtgttagccaggctggtttcgatctcctgaccttgtgatccgctcgccttggcctcccaaagttctggggttacaggcatgagccactgcacctggcctaatttttgtatttttagtggagacggggtttcactgtgttggccagactggtctcgaactcctgacctcgtgatccgcctgccttggcctcccaaagtgcttctacaaaagctttaggtgatggtcccgcgtcataattacctttcatccaatctagcttttttttccccccgtccattctcaaaactgacaaatttgcttctttcagtactctggatctgtgatactacaaaaaccaccttgttttgctaccgtatccttccgtattactagtgttagtgttttcacctctgcattcctctcacctagtacattacctggcatatagtaaatatgtgttgaataaatacagttaaggtctaagaggaagtgaagacggtgtacccaattaagtggttgtgctgttacctagctgtatgattttaggcaaataaattgttcttgtttctccatctataaaattttcattcaagtatagaggattactgtgacaacacatagaaaaatgctttagaaacagatgtcacgaagatgtaatttatatatgatgtttattagaaatgccaaagtccctccgggcgcagtggctcacgcctgtaatcctagcactttgggaggccaaggtgggcggatcgggagataaggagatcgagaccatcctggctaacacggtgaaacccccgtctctactaaaaaatacaaaaaattatccgggcttggtgg

SEQ ID NO: 1014 - DNA, 6000 bp, Homo sapiens
tgtaatcccagctactcaggaggctgagcagagaatcgcttgaacctgggaggcggaggctgcagtgagccaagactgtgccactgcctggatgaaagagcgagactccatctcaaaaaaaaaaaaaaaaaaggaaaaagaaattaattaattaataatgcatcagtgaatttccttctatatatgttatttctgtcacacacatacatgcacacacatgcctaattattttcaataactatttctacctgcctattgtataaaacctacatgcagtattcagaaaaatcctaatagaagttactgttttatttcctttatataatgaaaataaaaataccttaatgatgcatttaaatataattttctagtagttgaacatataaaacacattataagaatttcagtgtggttttttattctctcatctttgcattgaagattttggtgcctctggttttgctacgacaaatgcttttggaattgacaagacgtggtcaagaacctttgagcgcactgctgcagtttggcgtgacatacctggaggactattcggcagagtacatcattcagcaaggtggctgggtatgagctgttatatattaaaaatattttcttgaaaaaaaattaggtttgttgtttttcttaagagatgggttcttgctgtgttacccgggctggagtgcagtgtctaattgctggcactatcatggcaggcttcggtctcaaactcctgggctcaagtgatcctgcctcaggtcctgaatagccaagagcacaggctgggactataggtgcccaccactgtgccgtgctctatcccgtactttttgatatgtaattattattattattcagttggttcagttgtttataaattttccttatatgttctttgacccttgaattacttagaaatgtattttttaatttctaaatacttacaggtttaaaaattttgttttcaattactaatttaattctgtttcatcagaaagcacgaccatcgtggcattgaaacttgagttatagcctactatcatgatcaatttaaaaaatatatatatagggctgggtgcagtggtgcacatctgtaatcccagtgctttgggaggctgaggtgggtgaatcacctgaggtcaggagttcaagaccagcctggtcaacatgacaaaaccccatctgtacaaaaaaatacaaaaaattaactgggcttggtggcatgtgcctgtaatcccagctactcaggaggccaaggcaggagaatcacttgaacccgggaggcagaggttgcagtgagccaagatggcaccactgcattccagcctgggcaacagagcaacaacaacaacaacaacaaaatatatatatacacacacacacacacatatgtatatgtatatacacacatgtatatttttatgtatgtttcagaacatgtattctctaatggttggtgcagaagtctgtacgtgtccatttacatttaatcagtcttaataatacgtattttaaatctttcagtcatttccaattattttgtctaattatttactaagagagacatgttctatttgctactatggtggtagattttccattttccctttagttctgtcaattgtaggtgactaaaagttgtaattattgacccctggacatttatgcggactctctttctttctttgggcctagaaatggtttttaagtttatttgttgtaatttgcccaacagtcagtgattctgtagagagagtacttttcataaagtatactactcattattgttttttagccactatgcatctgagggtttgagttaatttttaaaatatgtaaatttaattactatggatactaatatcgaacatcctaggtttacgtgcttggtaaatgcttactgaataaaatcctgaacatttgtcttaggaaaataaaaatattttttgagctgttcttaaaaataagaattgcgacaatttattgttattgttgtcttcctacttaagtactttttaaaacctttggctattgtagtgtatggtttgtatgatagccaggagacatcccaggttaactgccatttatcccatatggtgctttacaacaagggaagaaaaatgcagggaatattatgcactcccttctcaactttcagttttatgatgatgtagtacatcaaggtttgtttggtgattgtaattggttacagagaaagtaagtatattactcaactccagtatctgtgccaaaagaaaagatctactgcatggataactagttcattaatacttcttttttttttgaaacagtcttgctctgtcatcctggcttgagtgcagtgcgcaattgcagcccactgcagcctccgcctcccaggttcaagctattcttgtgcctcagcctcctgagtagcagagattacaggtgtgtgccaccatgaccagctactttttgtatttttagtagagatagggcttcgccatgttggcaggctggtctcaaactcctggcctcaagtgatccacccacttaggcctcccaaagtgctgggattacaggcatgagccactgcacctggccttcattaatatttcaaatgtgttttatctctaaatttgaatgtccaatctgtatttcacattgttcggtctaagctctccatttgcttgtgtttaaaactaagatattaggccgggtgcagtggcttatgcctataatcccagcactttgggaggccaaggcaggcggatcacctgaggtcaggagtttgagaccatcctggccaacatggtgagacctcatctctactaaaaatacaaaaatcatctgggtgtggctgaagatgatgtggaatgagaaacaaatgtcaacataataaaatctcagttaaagtattttaaaaattcttagttgagcagctctgggggaataagggcaaatatgcttgttatgaactgcactgaaatctaccaaagttaatgtttactttgtgtagatccatttgtctattttatttatttttcccagtgaaaagtgtgttttgatagagaacttttcattctataaatacactgtgagttactaaaatatcatgaattttgtttattcctgaaacatagttaaactgtacatatgacatggcttatgttaaaaatacccagtgctcagttttgaaagataggcaaaaaaaaaaaaaagtataggagaaactgaagaatgtacacttttttagggggcacattttgctgtaaatctggaaatttgatagacttgattgtgaaaactgagcattaaaggttttgattgattaaaaaaaaaattatctgggtgtggtggcaggcacctgtaacaccagctacttgggaggctaaggcaggagaattgcttaaaccagggaggcagaagtttcagtgagctgagatcgtgccattgcactccagcctgggcaacaagagcgaaactctgtatcaaacaaacaaaaacccaagatactgcatttttttttttttttcagatgtagtctccctgtgtcgcccaggctggaatgcagtggcactatcttggctcactgcaagctccgcctcccaggttcacgccattctcctgcctcagcctcccaagtagctgggactacagatggctgccaccacacccggctaattttttgtatttttagtagagatgggttttcactgtgttagccaggatggtctcgatctcctgacctcgtgatccacccgcctcagcctcccaaagtgctgggattgcaggcgtgagccaccgcgcccggccgatattgctttttttttaatgccagttggtgaaaatgtatcctgtgacataagctgtcaacatgaatctccttaagatactgtgtgctgaacattacattgacagctcttaaaacccttccagaagagaatcatttgaccacatgatatcgcatgtctgttatataaagcctgtggtatgatttccacggggaatgtatttgtcattagtcacttgaacacaacatcaagtgaaacaaactgcctacctctcaaggtgcagctacttttgaaaacctgcagcagaggaggtggtgccagcagccataatctgttggatgaatggagtgatatagcacatagtcagttaggaacaggcaggctttggacatatagatttgaaggagaaaaataatattttgttttctgaattattaacagaaatggctaggacttagaaacagggtcttgctttgttgccctggctggagtacagtggcatgatcatggctcatttgcagcctcaacttcctgggctcaagtgatcctcccacctcagcctccctagtagctgggaccacaggtgtgcatgcactaccacacttggcttattttttgcagagagaggtttcactatgttgcccaagctggtctcaaactcctggcctcaagcaatcctccccgcttggcctcccaaagtgctgggattacaggcatgcgccaccttgcccagcctgttttctctttctaccttgtttttttttttttttcactctgcctttttacccggcgaatgatgaactgagaaaaggattagaaatcacaagatttgtttcttgccccagctctgccaaatactagccctgtgttttggaaggattcatttaacttctctgaacctcagtttcaactacaaaaagggaagaatagcttctctgtctcacaaaaataatgatgtgaaagtgttttgtgaaaatgtcacacttttacaaatgccaggttttcacatgcgtctctgaagagtgtggtttttttccctctccttaagtctgatcaccatttcctcttagtttcagttttgacttttatttgccctgcagcccggtgagggcacagactggttcatgtgctgtgattctccctgagtcatccttgctccctccctcctcattctcttttcatttcctgggcttgtgttgctacgttagaagtctgtctgtctcctggaaagggcagagcaagtccactgtggtaaggcttgtattttactttctccgtcgtcacatgataaatacttcttgtgaaagatttacttttagattccataaaagattactggagggaatgtcatctgtctattgtaatatttaagtattttgaataaaattaatctttgtcattttctcttgacatgaagcttctgattttagaataggtttttgtttgtttaatctaggatatttaaagactatctcttggaagcttttaggttaataatttgttagaatagttttcatattgtgggaggtgacacacagggatgatctgaaattaatgaagtgggttgcagctaaaatcaatttagtaagagtaagtactgttttgggaaaatctgcctgctgtatatgtgggtgtggatgtttactgtgttgtactctgaaatgtgttttttgtggatcttcctcatcaagttgggtggaaaattacttctctgtaatttcttcagcactctccattttcttattttaggttaataatgatctgagaggcgcatttggttataagggtccaaagcagtgatctgtttccattttgcgacttcgaggcctcagaaatataaaactagctggttgatcccggctagttttatatttttgagccctcaaagttacaaaatgtcagtggagcctttgtgtgttttgtgtcagtggagccaaagagatggatactcccaacaatacaaatattttatatgaagaatgatttagattgtcagaatcgttctaagactacttgtagatgttattctaatgtaagttgtaactaacgtattatccaaaacagctctttttcttgacagatatatatataaagtctgagaagtaatgatagaggtttgttggcataaatcttaagggaaatgagtccttagaaaatttaccaacgtagatgggctttggaattttgccaaagcttcttcagatggaaaagttaagttcataggagc

SEQ ID NO: 1015 - DNA, 6000 bp, Homo sapiens
gtgtgtgtgtgtgtgtgtgtgtatgtagagatgatgtcttactatgttgctcaagcttgtcttgaactcctggcctcaaatgatcctcctgcctcagcttcccaaagtgctgggattacaggtatgaaccactgtgcccagccaggtctaattgcctatttttaagctcttaccatgcttatacaatcagtgtgcctttgtaatgggttgagtagatacctggtagtgtcagctctcaaactgttgtttttcaagatcagcttaaattccttggcctttttaaattgctatatagattttagaattaattagttgtcaatttccataagaaaaaacctggtaggattttatattggagattgtattgaaccaaagggttaatctgggaatagctgacatctttacaatagttttccaatctatgagcatgatatatatatccctttaggatatctttaatttctttcaataatactttgtagttttttatgtagagttattgtacaatatgggcttccttccacattggacttaaaaatgtacttcttttttaatagtagttaaatagtttggatgaaccatatatatttttaaactttcctgagggtattgaagactgtttgaaatccttctgtattaaaaatgatgctaatgaaaatccttgcaaaatgtgtaagcttgagacctgattacagcttccggttaggatctccatgtctttgcttacttagctgaaccaaaccctccctgtgtctctctctatctgtccctctccctctctccctctctctttctccctctcctgaatgcatcctcttctggaccattccagtggtccttaccctgaggctggggcaagctgtcatcctcaaaagctgggaggcctagaagccctctcttccaagccaatgggccctccaattttcctaattgtatactgcagtactgtaatttttaaagacagattttactttacagttttgtgttatctctgcttagaagagatggaggaggaaggaaaagtttgtaaattaccttctttagccaagggagggtattgtttccatttgttttcacttccttattgtcccatccagttggtattttagaatagctctttgtcctaccaccataccaccaaaaacaacaattaaaatgacaacacaaacaatagcaagttatgaaatagcataacttactgattacttcctatgtacaaagtactaatctaagcactataaatactatacctcgggccgggcgcggtgtctcacgcctgtaatcccagcactttgggaggccgaggtaggtggatcacgaggtcaagagattgagaccatcctggccaacatggtgaaaccccgtctctactaaaaatacaagtattagctgggcatggtggcgtgcacctgtagttccagctactcgggaggctgaggcaggagaatcacttgaacctgggagacggaggttgcagtgagccaagattgcaccactgcactccagcctgatgacagagtgagactccgtctcaaaaaaaaaacaaaaaaaaacaaaaaacaaactatacctcattttaaaaatgaactcaagtccaggtgtggtggctcacacctataatctcagcactttgggacactgaggtgggagaattgcttgaagccaggagtttgagaccagcctgggcaacatagagagacccgtctctacaaaaaataaaaaaacttagctgagtgcagtggcccatgctgttattcccagctactcaggaggctgaggctagaggatcccttgggaccagaaggttgaggctgcagtgagctgtgatcctgccactgcacttcagcctgtgtgacagagcgagaccccaactctaaaaatacaacaaaaacaatcttatctagtcagtcatccccattttatttgtgaagaaattgaagtctaaaagtttaagcaaggtatccagattcgcacagctggtacacagttggagctgggatacaagccagttgtttttgactgtgaattttgtggtcatactgtattattttaaccccctgattattccatactcatagaacatccttgatgcttaccagggcctctgaagtggctggagcaagggtcgaggtagaaagtggtgcagtatgatgccgacatcatggtcgtgtgatttatttgtatttcttatttccttttttatggggctgatagacttttgatttatgttagatccttgatgtatgtagaaagtttttggttttggttgaagaatgaaattatcctacttcagttgaatagcaaccataatcataaaatgaagtagaaattaatttgctttacatattccattcagattccctgtagcttttacgagtgttgtctagcctttgtatgacaatttctgtacatctctgtgacattccattccattggttctcttcctgtccttttattgcgccttaccctctgggttggcctagccccttgtgcatacacctgtcataaagctttctgtatcatattgaagttagttattcatatgtcaggcttcacagctgcctagtaaattctgtaagaatagacccattctttctcgtagcccttgtgcctgacacaaccctgataagcagtaggcacacggtggcctgttattaatagacatggacacaaggcctgtgctgtagggctttattgctttcactcagacttcctgacaaaagaagcaagagtctccgtgtctgcagcatttctccattctgtctctgccatcagaggaattttaaagcaaagctctgattataattttgtacctcagagatgtcagtgacaaaccatcgcctgttggataaagtccatatttcttagctgtcattcaggttcctccatggtcctgtcctcactgaccttctattcttcatgggcactctgcattaattaaacagggctctgtccttatcttcttttttttctgtctctgtgcttttgcctgcattgtgtcttctgtgtacccttcgcctgccaaaatcttacccattcttcagatgtctgatagaaatgctagtccctccgtgaggctttctgtgatctccctgctttctctgacctctacccaaagaggtctttttcccatctgaactttttttcttcttcttctaaggaaagcaacactgccatatgaactcttaatggcacttggactatgacatagcattatttgtataccctactaagtgataaattccttgagcacaaggtcttgcctttgttttctctgctgttttgcattaattactgcattgaacatacagggtgagtatcccttatccaaagtgcttgggatcagaagtgttttggattttaatttttttttttttgattttggaatgtttgtgtgtatgtgatgagatgtcttggggatgggaaagcccaaacatgacatttacttctttttgtatgcaccttatacatatagcgtgaaggtaattttatataatattaatatattaatttacaaatatacaatatttataacataaatatatataatattttgtgtgcatgaagcagatttttgactgtgttttgcctgcaacccaccacatgaggtcaagtgtggaattttccacttgtgatgtcatttcagcactcaaaaagtttcggattttgggccgggcacagtggctcacgcctgtaatcccagcacttttgggaggccaaggcgggtggatcactgaaggtcaggagttccagaccagcctggccaacatggtgaaaccccatctctactaacaatacaaaagttaactgggcgtggtggcaggtgcctataattgcagctactgggaaggccgaagcaggagaatcgcttgaacctgggacgcggaggttgcagtgagctgagattgtgccactgcactctagcctgggagacagagcaagactccatcttaaaaaaaaaaaaaaaaaaacctcagattttggatcatttcagatttcaggttttcagattaggatgctctcagcctgtgtgtgaattacactgaatgtatattaacttaggattttttagtttcaaggagactgctcagaagactgtcaaaaattctttctctgcattggcctacaaatacatgcattccattcggaaactatgtaggtttaaacagtgtttcattcctagaacttcagtttaggaaagaatttgctttccagattgatgtttatgttttaaatagttaccattctttattattgacgcttgtccttcgtttctagggcactgtgtttagtcttgagtcagaggaggaggaataccctggaatcactgcagaagatagcaatgacatttacatcctgcccagcgacaactctggacaagtcagtcccccagagtctccaactgtgaccacttcctggcagtctgagagcttacctgtgtcactgtcagctagccagagttggcacacagaaagcctgccagtgtcactaggccctgagtcctggcagcagattgcaatggatcctgaagaagtgaaaagcttagacagcaacggagctggagagaagagtgagaacaactcctctaattctgacattgtgcacgtggagaaagaagaggtgcccgagggcatggaagaggctgctgtggcttctgtggtcttgccagcgcgggagctgcaagaggcacttcctgaagccccagctcccttgcttccacatatcactgccacctccctgctggggacaagggaacctgacacagaagtgatcacagttgagaaatccagccctgctacatctctgtttgtagaacttgatgaagaagaggtgaaagcagcaacaactgaacctactgaagtggaggaggtggtccccgcactggaacccacagaaacgctgctgagtgagaaggagataaacgcaagggaagagagccttgtggaagagctgtcccctgccagcgagaagaagcccgtgccgccgtctgagggcaagtctagactgtcccccgccggtgagatgaagcccatgccgctgtctgagggcaagtctatactgctgtttggaggggctgctgctgttgccatcctggcagtggccatcggggtagccctggctctgagaaagaaataggaggcttttcagaagagaaagacagaaggatgtaaggttggagttgtattggctggaatttgaacctccagcagctgtctggacatttgtggaacactctgggataattggggacttctgctcaacatggcagtggcatgttaggcatgttagggcttgaggtggggcattcacattcatctgactgtaaatcccaagggcctccgctcatgctaaattgagaatcttaggggtaaagcaccccctccaggaccgggtttctcagccttggcactagtgctgttctgaccattctctgtgttggggctgtcctgtgtgtggtgggctccacccactagatgccagtggcaccccctcccagagatgacaaacgaaaatgtctctagacattgccaaatgtcccgtgtgaacatcccctattgagacccactgctttagcgagagagggtttacttaggaagaattgggatagaaattcccagctgagagaacttagctgtgggctcctcagctactgacttcttagctcttaatccccttagaatttcatctttctcgatgagcaggctctgcacccactctttttttgccccccgccctcatcctggagtgtgagggtgctcgcccgtactctcagctgcctctcagggactgcactgttcctcttcacccccaggttcctgctaagatcccacgggcgagggcttgctctggactcagtctgtcaagtccccgaagcttcctgcagctccaccttgtaaaaatgctgcctttgggaatcttcgaaatatgtacacagagaaaatcacatgaaggagacctggggtccccacttgtgagtgcaactgcaagtaactctggcta

SEQ ID NO: 1016 - DNA, 6000 bp, Homo sapiens
ccatcttcgtgtccatgggcacccattgtttagctcccacttataagtgagaacagtcagtatttgattttctgtttctgagttagttcacttagggtaatggcctctagctccatccgtgttgctgcagaggacatgattttattcttttttatggctgcagcaatacacaagctccttatttttatttatttatttatttatttttgttgtttgtttgtttgttttgagacggagtctggctctcgtcccccaggctggagtgcaatggcgcgatctcggctcattgcaacctccacctcccgggttcaagcgattctcctgcctcagcctcccaagtagctgggactacagacgcccgccaccaggcccggctaatttttgtatttttagtagagacaaggtttcatcatgttggccaggctggtctcaaactcctgacttcgtgatccgcccgcctcggcctcccaaagtgctgggattacaggcgtgagccaccgcgcccggccaagctccttattttaagcattttttttttcttttttgagacagggtttcactttgtcacccaggttggagtgcagtggtgtgatcatggctcattgcagcctcaaacttctgggctcaagtgaccttcccgcctcagtctcatgagtagctgggactgcaggtgcatgccaccttggctaatttttattttttgtagagatggggatcttgttgccaggctggtctcaaattcctgggctcaaacgatcctcctgcctctgcctcccagagtgccgggattacaggcatcacctagcaaagcattaaaacaatttgctgctgggtgcagtaggtcacacctgtaatcccagcactttgagaggccaaggagttggggggagttggggggcgggcggatcacgaggtcaggagttcgagaccagcctgaccaacatggtgaaacctcgtctctactaaaaatacaaaaattagccgggcgtggtgatgcacacctgtaatcccagctactcaggaagctgaggcgggagaatcatttgaacccaggaagcggaggttgtagtgagccgagatcacaccactgcactccagcctgggtgacagagcgagactccatctcaaaacaaaaacaaaaacaaaaaaacaatttgccctgtaagaactgtcctctaaaagtttttggtttttctaatgaaaaatattatggacttagagaatagaaataaatttctgcctacacttccatcttccctcccacccttctctggcagcccaggaggtctttttgtgtgaatctgcgcagatctcagcgtccctgcccttctttgtgttttgttctctcttccaccttaggtctttctctggtctgggcacacccagctgcagggctcacctttgcctgtaagaatacagcccccaaacacagtcagtaccccaagaacagtccctgccatctctggcggcacagatgctggccaagctgcagctgccagtgctgcccagggagctggagagctgccggccaagagcccagcccctctgggtagagcaggagccagtgccaccactccctgtgggattcggattaaggacacacccacccaaagtaaaccaagcttggccaaaggcaggtgcccagctgtggtcaccactccgcagtagttactgaaaatcttccatctgcccaataccctcctgagcccgtgaaggagatgagcggaaagaggctccgcctgttggaagcacagccaggaaaggtgggctcagattgctgaagcctgcaggggaacttgaagaaagcgtgccagcacaggatggcggatgatgcccgcatgacactcgctcgcctccccggaacagcctgtggccttctcacctagtgggaagctccccagccgcgtgtttcaggaggtccagcagattcctctgcagaggaatccctttctgcagagtcggggctcgctccctgccatctacgggcagtgctgcttaaagctgtggctgcagaccttgcctctgcctgttgagacctcctgcagggccctccagcccacagggtccctcagctctctgggacctgtgaggctctttgggccagctgcaactggagctctttgcaggaggggcctctggcctggctgaagtcccggcttcctgactcccctttcccctcaggtcaacaacggttccagcctcagggatgagtgcatcacaaacctactggtgtttggcttcctccaaagctgttctgacaacagcttccgcagagagctggacgcactgggccacgagctgccagtgctggctccccagtgggagggctacgatgagctgcagactgatggcaaccgcagcagccactcccgcttgggaagaatagaggcaggtaggcggccggccccacctccttccccaaagctgggcttctctgtcgccagtaacattcagggagcctcagggctggaagggacccccgggatcactctgcctctgcagtttcagctgccacgtacgctggtatcacttaatcacttgactggtctctacttgattccctccagtgctgctgaactcactgcctaccatttttgggtgactctgttagaaagttcttcctttctgttgagacagaatctcatgtactggtcttgagtcccttgtctggaccaacatagaatggtgtttttatccaattttccaaatgtgattctgatacaaagattgcagaccacttgtctggattatataacccaaggggttctcacacttggccttgtatcatttcaaggacctggagctttaaatgctggtgcctgcatctcacctccagagattctgattggttggtctgggcattgctgggtctgggcaaagcccccaggtggcactaccggtgcggcccctgcctccccaagcaggcctggctgactgtcccattgattgaggcccactggtttcacagtgacttttgcactgtctatacctgacatatttcctttcatacattatgctccgtgattacctatacaagaacacagaagtatttggaacctcatttccaggtgaggaaacccaggtccagcaaagggtaaatgactagctccagatcacacagcttgtggccatgttaccactgggacatggggccaggccccttcttgaggtgggcctcagccgccctcccactgtagggcactgactccaggtcaccatggtttccagactgttcacctttcctgttgctgatccctgcactctcctccagcctccagctccactcccctttgccaaggggctgcttctatggacaggggctgtcccgagtggaggctgggggcgagtggaggctcacccacttccagatccagccctgcgacgctggctttcagtagtgtgcacattggaattacacgagaaaccttttccaaatgcaggccttgggccctactccagctgcctgcatcaggctgttttagggcgggagactgcccagaggattctgacgcaggtagaatccctgccctgaaagcctgcagggatccccggaccctggtccaggccttccaagctcaagggttgcactgccctctggtggctgtgggggagaccaacagctgacccagccttctgcctcccgcctgtcttagatcaggtgcttgaggacgtggctggagttccccactagaccggggtgggggtgggggtggggggtggggggaggtgtctgagaatgtctctgccttctaatccagccagcatatcttctggctcgccctgaactgaggagaaaccccagatccctttgggaaggtccaggaagggcaggagtggacaggcacagctctgctgtcagcactgctgtgggggtgactgtagccccagtctgccctggtgtttttctctcgctcttctccatgccggcctttgcctctagactgagaaaccggggttgactcaagtggcacctgcaaaagtgatcatggcagttcacttagcctgcaggtgacagggactgtgaatctagtccctggcgagcctggaaagaggggcaaggtagaggctctggctgccggggtttctttggtgagtccgttcactcggctggacacagacggatcaggaaagattcctgttgctactcggctggtggccagagggagagaggacgtgtccgtaactgaagcaaggtggataagcttcgggaacgagcgaggcacagattcggtgctgggggagtgatgaggtgctggaggagctgggtgctctgctctgcagggaatcaggaaaactttggggctgcagctccaattgagctgggccttgggggttgggtatgtttggttccttggaaactgggaagagggaatggccatcttttaagcaaaagcccagcggctataaatgctacagtgaggctgggtgcagtggttcacgcctgtaatcccagcactttgggaggccaaggcaggtggatcatgaggtcaggagttcaagaccaccctagccaagatggtgaaaccccgtctctactaaaaaaaatatataaaaattagccaggcggggtggcgggtgcctgtaatcccagctacttgggaggctgaggtagagaattgtttgaacccgggaagcggaggttgcagtgagctgagattgtaccactgcactccagcttggggaacagagtgagactatgtcttgaaaaaaaaaagaaaaaaaaaagctacagtgagtagttgagtttgcctaggaagcgtggaagttaagtcagacgtactttcaggctgggtcatgacttgtcacttaagcagagatgagcacttgagaggttttgaagagaagtgatgtggcagccttactgcatgttccatggacagactccagggaggccgtgaaacccccagagcacagcttctaagaacgtgcccactccttagcacgtcacttctcccaaccctgccctgctctgaggtctgtgctgtgaaggtggccgagtagactggacggcagggagtggggctgtcatcatcagatgagagctaaggggacccccaccagggtggcggcaatggcagagggtaggcaaaacgcttgtatttgcaacataaggtgagatttgacagctgaccgagggtgggagcagcagccaaaaccaaaaaagccagagggaagttgcaagcacagaaaaaatagaagatttaatgggagaaataacaatagctggcatctattgaacacttactgggagctaggtacagggcccattcattcattcatgcaattaaaactttttttaagaaacggggtcttgctctgttgcccaggctggagtgtagtggtatgatcacagctcactgcagccttgaattcctggcctcaaggagtcctcccacctcagcctcctgtgtagctgggattataggtacgtgcggtacacctggctccctttaaaagttttttgtagaggcagggcacagtggctcacacctgtaatcccagcactttgggaggccaaggcaggaggatcacaaggtcaggagttcgagaccagcctgaccaacatggtgaaacccgtctctacttaaaatacaaaaattagccgggtgtggtggcgggcgcctgtaatcccagctactcaggaggctgaagcatgagacttgcttgaacccaggaggcgaaggttgcagtgagccgagatcgcgccactgcactccagcctgggtgacagagcaagactccgtctcaaaaaaaaaaaaaaagtttcttgtagaggcagggccttgctttgttgctggtgcaatcacggctcactgcatcctctaactcctggccttaagcaatcttctgtcctcagcctcccaaagcactgggattacaggcatgcatgaccacacctggtccctgccattgtttattgagcacctactgagtgccatgtattaagtgctgggtatttgtcagtggacaaaacagattaaaaaaatcacagcccttagg

SEQ ID NO: 1017 - DNA, 6000 bp, Homo sapiens
ggagctctgtccctacagtttggtccccagatatctctctaaagaaaccctcattcgggctcagagcaccgtgtttgaggatatgaatgagagtggctcgtcatggcggcaagttggaggtcactggggttccatggtttgggaggcagttgggcaaaatgcagggctgcccacagtggggaccccatggcactggaggcacacgcgcagcaatgtggagggacccagcagatggagccgggtggagaaaacgcgccagctcacatctcagttaaaacacacgtgcacgagcaacagcacacttgctcgtgagactgcctaggagccagtccacggcgcggagagagccggcagcgctgtctcattcactgtctcagtccagcttccagccctgcgccatccttatgcgagagtccctcaggtgtgtggcaacctcagctctgcacacccagccttggacacccacagcgcaaacagggaccctcccagagctgcccccaagccctcccctggcctgtgtgcgggcgtctgagcgggtggaggccagccatgggctctgcttccctgtgagccagggtctgggctgagtctaacctagaggcccagggtgagcgccggggaggtcacatcattcccggagtttggagggatccaacacagctcccctgaagttggctgtgacttgggcctgtcagaagcagcctgagaggagggtcgcaagtgacccagacctgggaaggagggaaaggtttgaattttgcaaaaaaaaaagataactttgcccttttcgcttgatcttggggggacaagatgggggtgacgcctcccgagaccgggagaggaaggccacctggcgaagctgcagtcccagcattatctgtatgttaaattgatgttttaaatcagagttgatatccaagtaattaaagaataactaacaagcacagggactagtgaggggctgggccagattctctgcaacccatatggcttcacctactttccaaacccccggttctgtgaggaccgaaaatgaccatcccagactattccagaaacagcctggggattctgaaagtttcccagagcataggcagtgaaagagagagaagctcagcccttctggaggggacgggtggctcagaacagaaggtggaaagggagagaagctcagcccttccagaggggatgggtggctcagagcagaaggtggggatgcagttctgggggcgccatggccgagcaccacagacccgggacttgcacaacagaagcgggtttcctcacaattctgagccggaaggcggagataaatgcgtgggcacggctgggttccccggacgcctctctccctggcgcagagacgatgtgttgttctccccgggtccgttcctgtgtgggtgtccgcgtccccatcaggacaccagtcagataggaggagggccatccagtgacctcacttcaccttaatcacctctggaaagtccctgtgtccaagcacagtcacgttctgaggtcctgggggtcagggcttcaacttacgaattttgagagcattcaagtcagcccacaacagtggactctgaaataatcttttaggaactggactcctcaaggacgctttagaaaatgccggcctcgttctgttgcaaaggggtaactgaggaagaggggctgaattttcacaggaagacgagcccggtggcaggaagtgacagtgagaaactgcagcataaagcggaagcaaaggccgactgtgactatgtggtcgccagctcgccttccccgtcaaaccttgctggattttgtgtttcattttcattgccaaaaacatcattcaggtcgggtgcagtggttcatgcctgtaaccccagcactttgggaggccgaggtgggaggattacttgagcccaggagttcaagaccagcctggggaacatagcaagaccctgtcccaaaaaaaaaaaaaaaaaaaaaaaaaaaaggccaggtgtggtggcacacgcctgtaatcccagcactctgggagtctgaggcgggcagatcacctgaggtcaggagttcgagaacagcctggccaatatggtgaaaccccgtctctactaaaaatacaaaaattagccagccaatcatggtggtgggtgcctgtaatcccagctacttgggaggctgaggctggagaatcacttgaacccgggaggcagaagttgcagtgagcggaaatcacaccattgcactccagcatgggtgacacagccagactccgtctaaaaaaaatttttaaaaaattagccaggcgtggcggtgcatgcctgcagtcccagatacttgggaggctgaggcaggaggatcactcgagcctgggaggtcaaggctgcagtgagctgtgatcacaccactgcactccagcatgggtgacagagctagatcctgtttcaaaaaaaaaaataaagtcatcattctctcatgtatgtgtatattgtttcatttgttaattaaggtataattttacatacagtaaaactcaccattcttcgtgcagagttctcacaaaagtgtacaattgtgtggcatccaccacaatccctgtatagaagaatcccatcatccccggaatttccctggacccttccatagccccccagtccgtcaccccctgaattgttttctggcaccccgcccccctttctttttgaagtggttgttttgcaggaaacatcaccctctctcattttacaaatactgcagacagattttgaagcccaaagcatcatagaggcagcagatcaggacagggaggattgaggcggggaggctctaccctgactgtaagaagcacttgagagacctgcaaaaagccaacaggagaggcagagactgtgggggccaattggtacaggtcctgccctgcatgacagggccagtggcccccacagtgctgaggataaaatccaactgctcatccaggctgctggagcctcctgccttcaggccaccccactggcctcttgcccactgtgccccactgtccaagctctcgcctgccctgggaggggcccctgcagcttcttgtgcccaggtgcacgtccctctcttttcccatctgggcgcctgctgacattgtaccatgaatttgaacaccaccctgcagatgacctggcctcagtccatgaagtttccctttcgtcttctgcagggcaccggcccctaatgccatctgacggtttccctgctcacaggatcttccatttgttagccccccagagtgcccagcccgagtgaagagcatgcaggaaacaagcccctgtcctcgtggaggctacattccgagaggggaggtaggcaacacacacacaaacgactccgtggtatgtcatgctgcgatgctggctgtggaggaaaatgaagtgaggcctggtgaaagccagaggccatggggctgccgaggaggaacagggacagggtaggatttgcttagagcagggcaggtcgcgtgggactctgcgggccactgaaaggaacttggcttttattcagaggatgttaaagcgtgagtgacatcctctgaccttttataaaagaggcaagagtctagggagcccgggtagaagtgagggcgtctggaggagccacagtgggctcagggagtgagcccacgcgagggcgcagagcaactggacgctccaacagggctggtggaagtgccgaacggtgtgcatcaccttggaaagcaggcagtttttaataccatgaagctcgtccagccctatgattcgcatttccactcctaggtatcacactcaagagaagtgaagacgcccacaaagggctctgcagcagcactgccggtgagagctgcatccggggatgcatggactggcctgtcattccagcaccttgggaggccgaggtgggaagcatcgctggagcccaggagttcgagaccagcctgagacctccagaggtggagaccccccccccaccacctccactaaaaactgaaaaagaaattagttgggtgtggtgtgcgcctgtagtcccagcattatctatatgttaaactgatgttttaaatcagagttgatatccaaataattaaagaataaacaacaagcacagggactggtgaggggctgggccagattctctgcaacccacatggcttcacccactttccaaacccctggttccgtgaggacctagaatgaccaccccagactgttccagaaacagcctggggattctgaatgtttcccagagaatcattaggaattatcccagcggcgctggagtaagtggccaacttaaagttggacgacactgtctgaaacagtcgcgtaaggggtaagggtggaaagcctggttctcactgcgctgccggctccccgccccgctccacagccccgcgccggcgcgggctccccgggtccccgcaagccgccgggggcgggccggggcgggccggggcgggcccgggcgtggggggccgaaggaggaagcgcgcggggcgccataaggaggaagcgggtagtcgaccgtgtccgcgcgcctgggagacgctgcctcggcccggacgcgcccgcgcccccgcggctggagggtggtgagtgcacccgcgcccctcccggggtacgcgccgagccccagcccgtgacccctgcctgccgcctgccccggcgtggagctcagggcccgccgcccgccctgggcccgaccgcggtgggagccagaggaggggaggcggggggtcagagccccaggcctcagcagcgacctgagggccgggtctctcccgcctcccctccgcccgggcgccctcctcggcgcggccggcaggtcggtgctgagggtcgggtccgcctcggaggcggggaaggctttgttgtgtcctctccacgtggcctggggattcaggggaggggtgcggggcgcggggagggggaggggccgaggccagccccggagaggagaaaacccgcgggcctggccgggtgcaggccacccttgccggcggatcggaatccccgcccacaccgtggtctttccagcaccgcagacacctgccggctcctcccgagcggagctcagggctgacaaagcgcggtcagagcggccgcttactggggctcgcccgctccttagagcactggcaatgatgtgcggatcctcgctgctgctgctgggaaactgttgagtggctgaatgaccccaggggaccctgggagagctctgaagccctcagccaccaagtggctgggctggcaagggttcattcattcattcaacaaatacgaatgtgcagcggtgctggggtcatgatggctcggtgggcagcgaggggccgggccggctggaggagcacagtgcggattctgtaagtgggctgggggctgggccttctgcggctggaccggccttcacctgcaggcagggttggggcaggtgaggagcagatggacccacccagagctcttccaccttctcaggcttgcacccccttcctggagccttatccacaccctcagtcctcgctctcactgtgggggagctgcagaggatgcggtttttccacattccatctccacccacaggaggctttgagatggggggagctctcctgggcctgaatgtgtgccgtcctggggccctgcagtcccctgggagtgatgaccgagaccagattccctgagctggggtcttaagggtgtggggagcgcagagggatcctctggcatcaggagttgaggtagacagagctccagggaggcactgccgggaggacgaccctggccaagcctctgcctgcggcccagggtgtgcgtccctgccccttctgcccctcttgcccagggagggaagaggaaatgcggggtcagcagttcgtggctggggtttaaaggcagggatctcccaggacgggcacagggagcatgaggaagcagctcgtgtctctgttcatgagatgtgagagtggtgactgagacgaggggtgcagagacc

SEQ ID NO: 1018 - DNA, 6000 bp, Homo sapiens
ctgttgcccaggctagccgtgcactgacacgatcacaactcactgcagcctccacctcccggggtcaagccatcctcccacctcagcctcctgaggagctgggaccacaggcacacacaaacatgcctggctaattttttatctttcttattttttgtagagatgaacatctcactgaattgcccgggctggtcttgaactcctggtggcccagtctggtctcgaactcccaaaggacttttgaacaaaaactctcaaactcattgttcaccatggaaatgcaaaaccaaaatagcaccgagctatcattttatactattagactggcaaaggtttggaggctagatcctgcccagtgttggtggggatggagcagggcggcctgcaagccctgctgtgggattaaagtgtaccactggggagacctcaccacaggcccaccttagacgggagctctgtccctacagtttggtccccagatatctctctaaagaaaccctcattcgggctcagagcaccgtgtttgaggatatgaatgagagtggctcgtcatggcggcaagttggaggtcactggggttccatggtttgggaggcagttgggcaaaatgcagggctgcccacagtggggaccccatggcactggaggcacacgcgcagcaatgtggagggacccagcagatggagccgggtggagaaaacgcgccagctcacatctcagttaaaacacacgtgcacgagcaacagcacacttgctcgtgagactgcctaggagccagtccacggcgcggagagagccggcagcgctgtctcattcactgtctcagtccagcttccagccctgcgccatccttatgcgagagtccctcaggtgtgtggcaacctcagctctgcacacccagccttggacacccacagcgcaaacagggaccctcccagagctgcccccaagccctcccctggcctgtgtgcgggcgtctgagcgggtggaggccagccatgggctctgcttccctgtgagccagggtctgggctgagtctaacctagaggcccagggtgagcgccggggaggtcacatcattcccggagtttggagggatccaacacagctcccctgaagttggctgtgacttgggcctgtcagaagcagcctgagaggagggtcgcaagtgacccagacctgggaaggagggaaaggtttgaattttgcaaaaaaaaaagataactttgcccttttcgcttgatcttggggggacaagatgggggtgacgcctcccgagaccgggagaggaaggccacctggcgaagctgcagtcccagcattatctgtatgttaaattgatgttttaaatcagagttgatatccaagtaattaaagaataactaacaagcacagggactagtgaggggctgggccagattctctgcaacccatatggcttcacctactttccaaacccccggttctgtgaggaccgaaaatgaccatcccagactattccagaaacagcctggggattctgaaagtttcccagagcataggcagtgaaagagagagaagctcagcccttctggaggggacgggtggctcagaacagaaggtggaaagggagagaagctcagcccttccagaggggatgggtggctcagagcagaaggtggggatgcagttctgggggcgccatggccgagcaccacagacccgggacttgcacaacagaagcgggtttcctcacaattctgagccggaaggcggagataaatgcgtgggcacggctgggttccccggacgcctctctccctggcgcagagacgatgtgttgttctccccgggtccgttcctgtgtgggtgtccgcgtccccatcaggacaccagtcagataggaggagggccatccagtgacctcacttcaccttaatcacctctggaaagtccctgtgtccaagcacagtcacgttctgaggtcctgggggtcagggcttcaacttacgaattttgagagcattcaagtcagcccacaacagtggactctgaaataatcttttaggaactggactcctcaaggacgctttagaaaatgccggcctcgttctgttgcaaaggggtaactgaggaagaggggctgaattttcacaggaagacgagcccggtggcaggaagtgacagtgagaaactgcagcataaagcggaagcaaaggccgactgtgactatgtggtcgccagctcgccttccccgtcaaaccttgctggattttgtgtttcattttcattgccaaaaacatcattcaggtcgggtgcagtggttcatgcctgtaaccccagcactttgggaggccgaggtgggaggattacttgagcccaggagttcaagaccagcctggggaacatagcaagaccctgtcccaaaaaaaaaaaaaaaaaaaaaaaaaaaaggccaggtgtggtggcacacgcctgtaatcccagcactctgggagtctgaggcgggcagatcacctgaggtcaggagttcgagaacagcctggccaatatggtgaaaccccgtctctactaaaaatacaaaaattagccagccaatcatggtggtgggtgcctgtaatcccagctacttgggaggctgaggctggagaatcacttgaacccgggaggcagaagttgcagtgagcggaaatcacaccattgcactccagcatgggtgacacagccagactccgtctaaaaaaaatttttaaaaaattagccaggcgtggcggtgcatgcctgcagtcccagatacttgggaggctgaggcaggaggatcactcgagcctgggaggtcaaggctgcagtgagctgtgatcacaccactgcactccagcatgggtgacagagctagatcctgtttcaaaaaaaaaaataaagtcatcattctctcatgtatgtgtatattgtttcatttgttaattaaggtataattttacatacagtaaaactcaccattcttcgtgcagagttctcacaaaagtgtacaattgtgtggcatccaccacaatccctgtatagaagaatcccatcatccccggaatttccctggacccttccatagccccccagtccgtcaccccctgaattgttttctggcaccccgcccccctttctttttgaagtggttgttttgcaggaaacatcaccctctctcattttacaaatactgcagacagattttgaagcccaaagcatcatagaggcagcagatcaggacagggaggattgaggcggggaggctctaccctgactgtaagaagcacttgagagacctgcaaaaagccaacaggagaggcagagactgtgggggccaattggtacaggtcctgccctgcatgacagggccagtggcccccacagtgctgaggataaaatccaactgctcatccaggctgctggagcctcctgccttcaggccaccccactggcctcttgcccactgtgccccactgtccaagctctcgcctgccctgggaggggcccctgcagcttcttgtgcccaggtgcacgtccctctcttttcccatctgggcgcctgctgacattgtaccatgaatttgaacaccaccctgcagatgacctggcctcagtccatgaagtttccctttcgtcttctgcagggcaccggcccctaatgccatctgacggtttccctgctcacaggatcttccatttgttagccccccagagtgcccagcccgagtgaagagcatgcaggaaacaagcccctgtcctcgtggaggctacattccgagaggggaggtaggcaacacacacacaaacgactccgtggtatgtcatgctgcgatgctggctgtggaggaaaatgaagtgaggcctggtgaaagccagaggccatggggctgccgaggaggaacagggacagggtaggatttgcttagagcagggcaggtcgcgtgggactctgcgggccactgaaaggaacttggcttttattcagaggatgttaaagcgtgagtgacatcctctgaccttttataaaagaggcaagagtctagggagcccgggtagaagtgagggcgtctggaggagccacagtgggctcagggagtgagcccacgcgagggcgcagagcaactggacgctccaacagggctggtggaagtgccgaacggtgtgcatcaccttggaaagcaggcagtttttaataccatgaagctcgtccagccctatgattcgcatttccactcctaggtatcacactcaagagaagtgaagacgcccacaaagggctctgcagcagcactgccggtgagagctgcatccggggatgcatggactggcctgtcattccagcaccttgggaggccgaggtgggaagcatcgctggagcccaggagttcgagaccagcctgagacctccagaggtggagaccccccccccaccacctccactaaaaactgaaaaagaaattagttgggtgtggtgtgcgcctgtagtcccagcattatctatatgttaaactgatgttttaaatcagagttgatatccaaataattaaagaataaacaacaagcacagggactggtgaggggctgggccagattctctgcaacccacatggcttcacccactttccaaacccctggttccgtgaggacctagaatgaccaccccagactgttccagaaacagcctggggattctgaatgtttcccagagaatcattaggaattatcccagcggcgctggagtaagtggccaacttaaagttggacgacactgtctgaaacagtcgcgtaaggggtaagggtggaaagcctggttctcactgcgctgccggctccccgccccgctccacagccccgcgccggcgcgggctccccgggtccccgcaagccgccgggggcgggccggggcgggccggggcgggcccgggcgtggggggccgaaggaggaagcgcgcggggcgccataaggaggaagcgggtagtcgaccgtgtccgcgcgcctgggagacgctgcctcggcccggacgcgcccgcgcccccgcggctggagggtggtgagtgcacccgcgcccctcccggggtacgcgccgagccccagcccgtgacccctgcctgccgcctgccccggcgtggagctcagggcccgccgcccgccctgggcccgaccgcggtgggagccagaggaggggaggcggggggtcagagccccaggcctcagcagcgacctgagggccgggtctctcccgcctcccctccgcccgggcgccctcctcggcgcggccggcaggtcggtgctgagggtcgggtccgcctcggaggcggggaaggctttgttgtgtcctctccacgtggcctggggattcaggggaggggtgcggggcgcggggagggggaggggccgaggccagccccggagaggagaaaacccgcgggcctggccgggtgcaggccacccttgccggcggatcggaatccccgcccacaccgtggtctttccagcaccgcagacacctgccggctcctcccgagcggagctcagggctgacaaagcgcggtcagagcggccgcttactggggctcgcccgctccttagagcactggcaatgatgtgcggatcctcgctgctgctgctgggaaactgttgagtggctgaatgaccccaggggaccctgggagagctctgaagccctcagccaccaagtggctgggctggcaagggttcattcattcattcaacaaatacgaatgtgcagcggtgctggggtcatgatggctcggtgggcagcgaggggccgggccggctggaggagcacagtgcggattctgtaagtgggctgggggctgggccttctgcggctggaccggccttcacctgcaggcagggttggggcaggtgaggagcagatggacccacccagagctcttccaccttctcaggcttgcacccccttcctggagccttatccacaccctcagtcctcgctctcactgtgggggagctg

SEQ ID NO: 1019 - DNA, 6000 bp, Homo sapiens
ctctggggagagacactgaggccaccgccccaaattaaggccatggcaagtggtgctggccgtgagaggcccagggaggatggaggcgtctgagtgcatggcaaagtgagtcccagcagtgctcccgagaaagaaagaggaggtgggagcctggaggtgcaggagggcaatgcccacccggggggggggtggaccatgcttcccagaggccagggccccacccaaccccaggagaggagtcccagggatccccgaagcaggctgagggcttggggatggggaaggggccaaggcatcttcctgatgattgggctgtgagggaacacctagggggtggatgggggcattggtctggctgtgcaggcccagggctggctggaggcaggatatgtgtgcagtgagtgtcctgagcgaggggctggggaggcagagggttggggagctggggaggggggtacaggtaggaagcggcttgccaggcttccctccaggagagagttggacaagggcggggtgtggacccccatgctctgcttgtttcaataggcatcacgtccccagggacagccacccagagctgaggtggaggctgagggggtggtcagggtcttcctgctgtctctgaagaccccctggggacacgtgcttgtcctcctctgccctatgtccccttgtcgctcttccctcctctgttgtcccaggtcgtgcccatgtgtgcgatcatgtgcccttcaacagactatgccctgggcatgatgaggggtgggactgggggagcacgaggcaggtcctggctttaaggaggcattgggatgtggtccccaccctgatcagggccccacatccactggttcacccttcctcctctaacaccccacagctgccagtgccatgtgcccccctcttccctgtggtgccttgagccaggacgtggcaacgtcccaggtggcgaaagccagatttcctgtgtggcacccgcagttctgaatcagctgctcccagggtgctttcttcctcttctccagtggaaataggacccctgacctgcctgggaaccaccatttgtgtctccttgtgacttatccatgatgcctgttggagagtgtggccctgtccttgctgcgtagccatccactctgagacctggctgcccctctggccactgcacgtgctgtgtggtcatcttggccactgcttggctgtgtcagcctggtctgtgctctggaagttcacggagaggagcagcggtagcctatggtgttctgcctctgagtgtgtcagagcaggagagggagcagccctggcttccccagcctctcctgccaggcccacctcagaggatgaacacagcagctgtgggaatgctgagcgggaactcatctgcctggggacctgtcagataatgatcctgtttcatgaaggtgagctgcctcacaggcagacacctgtgtggttaagtcccgtgttatccaaactgtgggctgtgtggtttcaggatgggaccttctcttcagggtcatggaggcccctgaggccctgtccccactgtctgctgttacttgccatgagggtttctgccctgggcagggccctggctgccaccccggccttaacatagacagtgagtcccccttggggatggcttttcctggctgtacctaagccttggcgtgaaggtcttagggctgatctcatgactggtcttgaggtgcccaagccaggggcccaggagctccctgtctcaggcaggggttcacgtgctgcctgcctgttccctagtcacatggtgacattccaccctcttctgtcacatctctgtcagcataaggtggccagagcatatctgcctgccagctcccatcactgggctgcagcctcaggggccctggcagcacatgtggagtccctggcccatgtggggctgcccaggagtgggtgggagggaaggcctcctggcgggggctcctggcccagggcttgctccttgagcagccaggtggaaagtgggcagctgaggccccttgacatggaggcctctgggatgcggctcactgaccactgctctgcctttccccttcccggcatctgagggggaccctctcctttcctgtgagtgtgggcagagctgcccctgagggtccgagcgcctctggggagcttcaggaaggctctgggtgctgttggtcatgcagctgagctctctccgtggtcactgacttgatcaggtttgaatataaagtcaggtgaccctcagagctgctccgggggccagggagaccatggtcgctttgtcacagcagacttaacggccgcagcaactcttgctagcctggatgacacagcactgaaaccaagtgccagaagcagattgtggctgtggggaggaggaggaagaagaggaggctctggcaggggtgcagggctggtgggggaggggagccaggtaccctagagaagggaggggccagggggaatgggggtgctggccaggcggggatggagaggcttctgcaggaaggacaggggcttggctgagcagagtgtggccagcctagcgggggacagcctgcatcctggcctcactggtcttgaggtgcccaagccaggggcccaggactttgggcattactaggaaatgatgggaaccctgggtggggtggcgtgaaacaagatgagatggtaagatctgctttcactttaaaggaacatttctggttgttgcttggaaaagaagtgtcggggcaagaatgctacaggagggccggcctggaggacagggcgggactgcagggctggctgtgcgggggcaggagcctgtgcttgcatcagagctgcctgggagaccctggctctggggtggaggcctgagtaagggggcctcgctggggatttggggacctctgtgtgctggtgccttcccgcctccgttcctctcagccctgactggctctgtcttggaaccaggtaactacctttatttgagaacctgctgcaagccctgggctgttctgagagctcaggaatatcgttctgatttctccacccacaaggagccccgggcttcctgagcccttgggacacagcagccccataaactgctgcccctcccaggcccaagtgttccaccccaggctaggggtggggctggggctgcaccttggaatctaccctccaccggggttgtggtggggccctccgtgcagcctcagtgggaacgtgcctgtcacctgaggctcaggtggcgtgaccctgacctttgctctccccctccttcccacaggtcctgcacctcagctgcggagagggatggcagtggtgagtgagaggctgccgcgcaggaacagactccctcccgactccgcacaccccttggtggctcaggagagtctaggctggggcacaagtgggccttggggtgacgtcggagcccgggctcctccctatgtccagggcacctgccctgtcgctctgggctctgacatactcgcaagtgtctggggagacgccctgctcctttttcatggcctcctggtggacctaggcctttgttaaggagactgccgtcctggcctcatgaggaggcttagccagggggatgcagcactccaggtggaagagccgcggtgtagacaggagggtgggcttggggatgggaaccatggggcagtgcagtgccagggccaggctggcaaggccactatgcttggagccctcctgagggcaggggccctgggctattggtgtgtgggtgctgggggtgggtgtttggagctgtgctcaggccgtgcattcgctattccaggcacgaataagcgggacaagcaataccaggcccactgggccttcggggaccgcaggaatggtgtcatcagtgcccgcacctacttctacgccaatgaggccaagtgcgacagccacatggagacattcttgcgctgcatcgaagcctcaggtggggccccctctttgctggctatacccctgccatgtcccagcctgagcggacccctgggctcatggaggtgccggtgggtgaacactaagctggggcaggagccagagggctgggttctgaccacacttgggtccctcactgttcagccccttcctgaggggccccactgcctcccagaaggcatctcctctcctgccccagctccctgttccctgatcccgcctcatgccccccacccttctccctggctcagggccaggatcgggagctgcaggaagttggtccatgtcagctgccgagccacacttagcccagggtggaggttccattcagggagctggtgccgcatcttctgtccttccctgacacagcctctgggggccagcggtgggggcagcaggtgtttccagggatagagaagccagaggtcagcaaggcccaatgtccttcagtgttagaaacatccgacctgcacagccccatgctggccccagcagccctccgtcaggggcagcgggtcccaggcctgtttatgtttttgtttgtttgcttcaaatgagactggatcttgctctgtcacccaggctggagtgctcacgcctctaatcccagcaatttgggaggccaaggcgggtggattgcctgagctcagttcaagaccagcctgggcaacatggtgaaactccgtctccactaaaatacaaaaaattagccgggcgtggcagcaggcgcttgtaatcccagctacttgggaggctgagacaggagaatcacttgaatccaggaggcggaggttgcagtgagccaagattgcgccactgcactccagcctgggcgacagagtgagactccatctcaaaaaaaaaaaaaaaaaatgaggtctcactatgttgccctggttggcctggaactcctgggctcaagtgatccctccaccttggcctcccaaagtgctgggattacaggcacacactaccacacccagctaattttcatattttttgtagagatggtgtttcaccatgttgcccaggctggtctcaaactcctggcctcaagcgaaccttacactttggcctcccaaagtgctgggattataggtgcatgccgctgcacctggcacttctgagcagtgcttggaagccgcctcctgatgggggctgagggtcagagtggccagctgaatgctgggccatcagggtgaggggcgtcttctcctcgtccattgcctgttctcccagggcaggtggaaggggaaggccctgcattggggtggcgtgaaacaagatgagatggtaagatctgctttcactttaaaggaacatttctggttgttgcttggaaagaagtgtcaggggcaagaatgctgcaggagggctggcctggaggacagggtgggactgcgggctggctgcacgggggcaggagcctgcgcttgcgtcagaggttcctgagagactcggtctctggggcagaggcctgagcaaggggacctcgctggggtgtctctgtcttagccacgctcggtgtttctgggtcctgtgacccacgtgtgagcagcctgtggtgctggtggcacagggaaggaaaccgaggcagggagcctgtgggggctgcttggcaggggacaggcagctcctgtgcccactgctgtcccacacctgcatggaaacagaaaccccgccacggagccccctcccatctccacagggcctctagagcgccatgtgcaaggacttcatgggcggggtggggtggggtcaggagcctgctgtgggctggccaggccctggccctccctgtcgcaccctgcgctgcctccatgcacctctcagggctgtcatggcttttcctgtggcttctgacaggtagagtcagcgatgacggcttcatagccattaagctcacagcactggggagaccccagtttctggtaagtgctagaaccttccacctgcagagtctggtgctgtgcgagatctcagggcagctgtgggcatccaccaaaaacacaggtgcccatgccttagaggcctgagctggcc

SEQ ID NO: 1020 - DNA, 6000 bp, Homo sapiens
attgacactcaggattggcgttttcatatgccatcaactccactatgaccttacgggctttttcatcggcaattgacttttgagcaacatcttggagccttgccacaaaatcaggatagggctcttttgaaccttgtcttactgtattaaatgaggggcaggcacttcctgggtcttggattttttcccaggctctaaggcagatagctctaacttgctcaatggcctcattttgcattaatgcttgttgactaatagtactccaattttgacctattcctaatagttgatctgcatctatgttaactggaggattggcagccctatttcttcggacctgttcttgtaccccatcaatccaccaagtcttaaattgtaaaaattgagagggtgagagagacgattttgccagaatctcccaatcataaggaatgagtctatgtccataagcaatggaatctaataatgtcctcatataaggggagttgggtccatactgttttactccctctttcatatcttttagcatttttatcgaaaaagacttgtatctggcctcaactgtgggaggctctccctcttgggctccttctccaggtggcatcggttctaacgttactgggaattgccatgcctcagtatctccttcctttcttgatttatcaataatttcatgtaattcactaccctgtctactaggtggtgccgtaggattaagtctcctagtgggcggctgagggtatggcgccctgccctgtggtgctgggggcattcctggatatccatactgactttctgggggtggccgatactgaagttcagccggaggccagtattgataggctactggcggttgggtcttattttctttaacctgcttttgaggttgtaatgttacgggcacctgacctgctggaagaggacttgtccctcgtggtttagactctgatggccccactaattctggaccttttccttctaattttaacgtttcaggatatatcacctcctgtaattgattatagtcaacattttgcgttgactgagccattaccggctctgctacatattcgcaatgtaaactttccgtttctttctgggattttttccttgtcttttcattacaatctattaaacagcttccaggggcatcagaaactgaaacgctatcttcttctgtttgaaatggttctaaagctgctttaataatggcccaatcattccatactgtaagtggaatgatattacccttcctacctgcttgttttagttccttaccaattcttttccaatcttttagatctaaagttccttgttctggaaaccatgggcaaaattgttctattatttgaaatagcttgattagattttttgtagatactttaactccccctctttttaaaagaattttaataaagctgagataagaggcatatttacttttaattttacttttagtttgccccattatcaccctagcttcttccgagcgcacaagcttaccgtaaggctgactgtagacgtactcgggatctctcgtcgacttgtcctcaatgaccacgctcgagcgtaccttcaccctagagaaaagcctccatgttgggcaccagatgtaggggtgggttgcccctacacacctgtgggtgtttctcgtaaggtgggacgagagatttggaaaagaaaaagacacagagacaaagtatagagaaagaaataaggggaaccggggaaccagcgttcagcatatggaggatcccgccagcctctgagttcccttagtatttattcatcatttgtgggtgtttctcgaagagggggatgtgtcagggtcacaagacaattgtggggagagggtcagcagacaaacacgtgaacaaaggtctttgcatcatagacaatgtaaaggattaagtgctgtgcttttagatatgcatacacataaacatctcaatgctttacaaagcagtattgctgcccgcaggtcccacctccagccctaaggcggtttttccctatctcagtagatggagcatacaatcgggttttataccgagacattccattgcccagggacaggcaggagacagatgccttcctcttgtctcaactgcaagaggcattccttcctcttttactaattctcctcagcacagaccctttacgggtgtcgggctgggggacggtcaggtctttcccttcccacgaggccatatttcagactatcacatggggagaaaccttggacaatacctggctttcctaggcagaggtccctgcggccttccgcagtttttgtgtccctgggtacttgagattagggagtggtgatgactcttaaggagcaggctgccttcaagcatctgcttaacaaagcacatcctgcaccgcccttaatccatttaactctgagttgacacagcacacgtttcagagagcacggggttgggggtaaggttatagattaacagaatctcaaggcagaagaatttttcttagcacataacaaaatggagtctcctatgtctacttctttctacacagacacagtaacaatctgatctctcttgcttttccccacactgggtaacacagccagaccctgtctccacaaaaaaatattttttaaaaattagctaggtgcagtccagcctgtagtcccagctacttgggaggttgaggcagggggatcacttgagcccaggtgtcaggcctctgagcccaagctaagccatcatatcccttgtgacctgcacggatacatccagatgggctgaagcaactgaagatccacagaagaagtgaaaatagccttaactgatgacattccaccattgtgatttgtttctgccccaccctaactgatcaatgtacttcataatctcccccacccttaagaaggttcttggtaattctccccacccttgagaaggtactttgtgagatccacccctgcccccagaacattgctcttaactccactgcctatcccaaaacctgtaagaactaatgataatcccaccaccctttgctgactccttttttggactcagcctgcctgcacccaggtgaaataaacagccttgttgctcatacaaagctggttggtggtcccttcacagggacacatgagacaccaggagttcaaggccacagtgagctgtgatcacatggctgcactccagcttgggcaacagagagagaccctgtctcttaaaaaaaaaaaaaaaaaaagccatcagctggctcagggtagccacctgccaagggtccccagctgagcctaagacctgcttcctaggatttacagagctcctgtgaaactcggttgtttcattgattgtcacatggagccagtgactttcaggccagccttgttcccacaggtgccctcacaggtgggctctcccgtgggcctgggcacccagcgctaggcctgctctgctatggtctggacgtgagtggtgatctctgtgatccctgcacccctcgcttctccccctgccctctctgcagccctgcccctggcagcccctgcccacctttgcctctgtgcagggccacaggcttccttgaagcaaatgctagaactttgcttttttaaaaaaatataacagctttattgagatattgaatggttttttagtctatacacaaggttgagcaaacatcaccactctctagccccagagtatttccggaccccaaagaaactccgtgggccttggcagcccctcccactcctcccgtcctccacctccaggcaccactgccagtgccatactcaccaggctccactatgggcttgtcttcgtgtgacttctgtctctatcgatttgtctattctgaactcttcatataaaacgaaccatacaacttgtggccgtttgtgtccggaatctttctttaaaaaaaaaaattcaccgggcgtggtggctcacgcctgtaatcccagcactctgggaggcggaggcgggcggatcacaaggtcaggagatcaagaccatcctggctaacacggtgaaaccccgtctctactaaaaacataaaaaattagccaggcttggcaggcgcctgtagtcccagctactctggaggctgaggtgggagaatggcgtgaacccgggaggcagaggttgcagtgagctgagatcatgccactgcactccagcctgggagacagagcaagactccatctcaaaaaaaaaaaattcacttttatttttgagacagggtctccctccattgcccaggctggagttcagtggcacaatcagctcactgcagcttcaacctcctgggctcaagcaatcccctcacctcagcctcctgagtagctgggattacagacatgcaacactatgcctggttaattttctattttttgtagagacgaggtcttactatgttgcccagactgctctggcactcctgggctcaaaagatcctcctgcctcggcctcccaaagtgctgagattacaggcgtgagccaccacacccggctatttttattttttagttgacacataataattgtacatatttgtggggtacgtagtgatgtttctgtacgtgtatagtgatcagataagggtaattagcatacctatcatctcaaacatttattatttctttgcattacgaacactcaatattctccttcaagctatctgaaaatacataatttttgttttgagacagggtctcactctgttgctgtcttcacggagagcaggagcagaggctttgagaagccagtgggccttggcctcagccctgccggcagagggtccccaccatgcagctgaagtgccagggtgcttgtgaagtctaagcccttgtctggcatttgtcaggaatatagggtgaggcctctgggaccgagcggggcggggcggggcggggcggggcggggcgggaccaacagcgcacacttaagcggcccgggcgggtaccgccgtcccgccatggctctgaggcgcgccctgcccgcgctgcgcccctgcattccccgcttcgtcccgctgtccacggcgccggcctcccgcgagcagcccgcagcgggcccagcggccgtgccaggaggtgggtcggccacggcagtgcggccgccggtgcccgccgtggacttcggcaacgcgcaggaggcgtaccgcagccggcgaacctgggagctggcgcggagcctgctggtgctgcgcttgtgcgcctggcccgcgctgctggcgcgccacgagcaggtgcgcggggtgcaggcgggggcgcgggggcttctgccggtcccgggagcctttacggagcttcctggcctgaaacgggtgcctcccaagcatctcctggagcaagggaagccaggaagggaggcgtttcctgcagtccctctcggacctcgcaaattttcctatttgtcgatgtctaccaactaaaaacaatggtcgttttcatatttacgatatataccacttgtgggaatacagagttatcacttggaatttaaaatggagtattcttcatgttgagacaagagaatcctggtgtagggctcatagcctggaaccccggaattcaaaccccgggacccagcagcttcccagacacggccactctgagaacactgttggggaaaaatgggaagcccctcaaacgcccagctttgaactcacccatggtagctttaaaaagtgtcagggcttttggtggcggtggtggggggcaacaagcagaacactgttttagccgcatcagcctaggggtactagagatgacggttatctccaggtgaccctgggaagagtttgcaaggttccgctttttggcgccagggtatctggtggtgttgatttctcaggtgagactgtacagaggtcgggggctgcacccctggcctcaacaggaggcgggggaaggcgggggacggtgtcagatgagaagcaccgagccacagttgagcttaggtgaggcctcggcgggtgcgaggtgagggcagggatccacgaactcag

SEQ ID NO: 1021 - DNA, 6000 bp, Homo sapiens
gctggtcttgaactccagggctccagcaatcctcctgccttggcctcccaaagaactgggattacaggtgtgagccacgctcctggcctgttgccaaattgatgatagaaattcctcatggggtctaattaagtgccacagggacagggctaccctgcagccctgtgggctagctcttgcccagccctcactgtaggagtcctctgacctcttccgcctacctcttgcctccttccagtccaacaccagtcttagatttctttcctgaagacacatgcaaccgggcacagtggcatatgcctgtagtcccatctacatgggagaatgaggcaggagaatcccttgagcctaggagttcaaggctgcagtgagctatgatcgtactcctgaactccagcctgggtgacagagagaaaccccatttcaaaaacaaaacacatgtgatgaagactccttacccagctccccctgttcctccagaccagccaacctccatgccaggcccctgcccagaacttcatggcaagctggactggactggcatattctgagttctccagaatttaccatcttacctccttgcccacactgtttcttctgtgtgaatgcccttttcctctcctatgaacacctacgggcatctgccctcagctcctgccacctccctccatgagaacagggattaagactggctatccctcaccaggcgcggtggctcatgcctgtaatcccggcactttgggaggccaaggcaggcagatcacctggggtcaggagttcaagaccagcctgaccaacatggagaaaccctatctctactaaaaatacaaaattagccgggcatggtggcacacgcctgtaatcccagctactcgggaggctgaggcaggaaaattgcttgaacctgggaggcggaggttacggtgaccccaaatcatgccattgcactccagcctgggcaaaaagagtgaaactccatctcaaaaaaaaaaaaaaaaaaaaaaagtccgggcgcggtggctcacacctgtaatcccagcactttgggaggccaaggtgggcggatcacaaagtcaggagatcgagaccatcctgactcacacggggaaaccctgtctttatgaaaaataccaaaaaatcttagcccggcatggtggcaggcgcctgtagtcccagctactggggaggctgaggcaggagaatggcgtgaacccaggaggcggagcttgcagtgagccaagatcgcgccactgcactccagcctgggagacagagcaagagtccgtctcaaaataaataaataaataaataaataaataaataaataaataaataagactggctatcccagagcctggggacaggagagtgtgcgctgcaaagccagccatttgaggagggcctagtctgaactgaataggtcaatgggctggagctgactttggacagagttgaacaaccccaaagaatccagtgggtgctgggcatacagtcgtcaggcctgtgtagacagacctgggccgagaagaagctgggctgcagtagccagggcaaggcagaggggcaggaacaggcatgggcgatggggttgggccccagttctttgacctggggaatcccccaacctatgcttccatatgaatgaatcactgtgcatctgtgggcaccactgcatcagcttgcccctccacacagctgcccttggctcatgttggctgtgctgtatcagtccttcaacgtttcctggggatcagttaattaagttgaggtctctgcgtctggaaatccgcctcagcctgcagggaaaaggcccctagtcttgtttctgccttcagaaccctgagacagaacaaggagaatcctgctgattctcagattgggctccagaggggcgacagtgtcaatcacaatgttagatactgaagttggctcagttctttttttttttttccttccccttctcccctcccgtcccctcctttcctctcccttcccttcccctcccctccccttcctcccttttctttctctttctcttttttttttggcggagtctcactctgccatctcactctgcagtggcgcaacctcggctcactgcaacctctgcctcctgggttcaagcgattctcctgcgtcagcctcctgagtagctgggattacaggtgtgtgccaccacacccagctaatttttgtatttttagtagagatggggtttcatcttgttggccaggctggtcttgaacccctgacctcaagtaatcctcctaccttggtctcccaaaatactgggattacaggtgtgagccactgcacccggccttttttttttttttcttcttttgagacagggtctcactttgtcgcccaggctggatgtagtggcagaatcatggctcactgcagccttgactgcccaggcccaagccatcctcccacctcagcctcccaagtggctgggactacaggcttgcaccaccacaccaaggtgaagtgttgttttgtttgttttttgtagagacagttttgccatgttgcccaggcagtgatcctcctgcttcagcccccacaaagtgttgggatcacaggcgtgagccgctacgcccggccactttcttacctaaaatacctgcacaccctacttggagaccctagggtgaggggagtggggaacaggagaacctgacagtagagggtacatgtaaggaggagagggacaagcttgctgtgtggtggggtgctccagggctgggggtgcctagggatccacctctctcccaggctgtggaattatcctccccgcactcactgcttctctaaccttggctatctcctgctgcctttggggtgtctgatgggcttgagggacctcccagctgctctaggtcatctcaccgcagccatgtgccccatttggtactgtcaaagctgctggaatattatcgtctttccagaactatccctggggcaatatcaggacctcaggctgcccggggctcagagccctcctgggtcttcctggggcccctggtccacatgcatctccactaagcctgagggcccttcgggagaggcagcacttttagcctgcccttggttttagcttttgctctacgaagatcttgtgatttctgccccaccatggggcagcaggaacctcaagcacagtgcctgcggcaaagggagccacaatggacttgccccaggtcaggcctgcacttgccttgtgtcagggtatctccccaagttgctggcctcagtccctacactgacctgtttccccagctttatctctggcaccccaaactcagcagccccgaccccacttcccaagcaccccctgtgcctggctctgtgcctgtcatggtgtcctggcagcagtctgggagagtatttcagttacctgcggtgtcctgggaaggctggagcagaggggtccactcactgattgccaaggtcacagaacaggacttgcattgtgcactggaggccctgtggtcttgcatgagcctggtaggcctctcccctcctgcttccagccctccatctgggaggccagcctgcccagggctgctctgccacttagcagctgtgtggccctggagagtccctaacctcactgaacctcagtttctccgtttgtgaaatggagataatacaaagagaactttccttctcaggctgttgtgatgggtaaggaaataaatgcatgcaaaatcacagctgtagttactatgaggcacactgtcttcctggctagaggagattctgaaggtgggtggggcagcaagatcaccacgtgtatgaaatgggggcaggctggttggagactgagggcaccagccccaagcactgccatctgccctgtgatgggactctcctgtggcagtggcaacggtcccactgtggaagcaacacatgagctgagaggacttgcctgaactgagccacatgtgccctctgggcctggtcaccccaccacctgcccccagtgtgacccatgcagggcctgttcctgaccctgaacgagaccaggactccctgggctgcatttcctatctgtaaaattgtaggagggtggtggtggtgggggctcgaacttgccccctgggtggggtggggcataaatagtcccagaggatggcctgggaaggctggctgggcctggcacaggggactttactgctgtcattattgtcctccttacaggagaggagagcaaggcccagaccggggaggaacccacacagcctctgtgctccagcctgcttgaaagacaaggtctacctacaacgcagagatgcacacattaaggacaatgaaacacccaagtgttaggaaccagaataatcagccctaatagaggggaggctgatcagggagggcctcctggaggaggaggcacaacatcagggtgcactgtgatttctggagacccaaggagttctggtaaatgacaggtgagaaaaagaaaatgtaataaaatataattgaaaacagaccctggtatgtgtggagagagggccgggaggaacctaggacaccggggaacctgaactcccccaaccagtgaagggagctgtgggcagcaaggtttgattggggttttctttcttgtggaggtttctcagagtgattcaagttcccccaccccgcccacagatggttctgagactttggaaagaaagaaaaggaaaaaagaccctgcccgcgccccagctgggcatccctgggaggtcgcgaggatccccggagacccagactcgggcccggggcgcccccggccagagcggcccctggctgcctccctacgccccgcgactccggtccggacgccgagggcctcggcctgcccctgtcccccggccgccccccacctgctccggcccggcggggcggtgctgggcccgcgggctccccggccgcagtgcaaacgcagcgccagacacgccccgcccgcgcctccccgcccccccgcgcccgcggccccaagcggttcccgagcccaggcccgcgccgagcccaggtgagcgcccgccccggggaccctggtccccggaaccccggtccccgcccgccgccccgcctcttcgccccggcgccgggggccagcgcttgcgctcccaagtctcggaccccggcccggcacgttaggggctgggggttggcaagcggggccagaggcactggccggggtccgaagctcacctcgtccttctctcgtcccacaacggccccttcccggctcgccgcggggccccactgtgtgccagtcccccttctcgggctgcaaggtctggcgggggcaacgggacggagccggcgaggctgctggcatcggcttcccagagagagggaactgcacgtgcagaggcggggagagtggacagaggcttgccctgagctccgtgggggaggggagagcgcggagcccccacactcgaaggcaggactgggatcagatgccacccctaggacgcctggaagccactgggagtccgatctgggcaggagcccttgggatgaggcagtgggggcaggtggcgagaggtggaggagtggggagaggaccctgcccagcctgcaccctgggggcgccaggagccctgggagggtcaggtggagcaggggccgctctgtgagatgggagtaatccagtcccgcctcacaggtcctggggtccctgggacagacacagactcctgctgggtggttagcactgggctctgctagaacttttctgcagtgggcagctcatgggcaaggaatagcactcgggcgctctgcactctgggggtccctcctgccctgcccctggcaaggacctttgcctttgagtggggtgactgggctccaagccgatctagcacacagtaggccgaaggcacaggggccccacccagtctccttcctggcccaggccctgggggattcaggtccctgggtactcgggaagggacagcacagcctgggcaggtccccagtggcaagaccaggtct

SEQ ID NO: 1022 - DNA, 6000 bp, Homo sapiens
atgaggcaggagaatcccttgagcctaggagttcaaggctgcagtgagctatgatcgtactcctgaactccagcctgggtgacagagagaaaccccatttcaaaaacaaaacacatgtgatgaagactccttacccagctccccctgttcctccagaccagccaacctccatgccaggcccctgcccagaacttcatggcaagctggactggactggcatattctgagttctccagaatttaccatcttacctccttgcccacactgtttcttctgtgtgaatgcccttttcctctcctatgaacacctacgggcatctgccctcagctcctgccacctccctccatgagaacagggattaagactggctatccctcaccaggcgcggtggctcatgcctgtaatcccggcactttgggaggccaaggcaggcagatcacctggggtcaggagttcaagaccagcctgaccaacatggagaaaccctatctctactaaaaatacaaaattagccgggcatggtggcacacgcctgtaatcccagctactcgggaggctgaggcaggaaaattgcttgaacctgggaggcggaggttacggtgaccccaaatcatgccattgcactccagcctgggcaaaaagagtgaaactccatctcaaaaaaaaaaaaaaaaaaaaaaagtccgggcgcggtggctcacacctgtaatcccagcactttgggaggccaaggtgggcggatcacaaagtcaggagatcgagaccatcctgactcacacggggaaaccctgtctttatgaaaaataccaaaaaatcttagcccggcatggtggcaggcgcctgtagtcccagctactggggaggctgaggcaggagaatggcgtgaacccaggaggcggagcttgcagtgagccaagatcgcgccactgcactccagcctgggagacagagcaagagtccgtctcaaaataaataaataaataaataaataaataaataaataaataaataagactggctatcccagagcctggggacaggagagtgtgcgctgcaaagccagccatttgaggagggcctagtctgaactgaataggtcaatgggctggagctgactttggacagagttgaacaaccccaaagaatccagtgggtgctgggcatacagtcgtcaggcctgtgtagacagacctgggccgagaagaagctgggctgcagtagccagggcaaggcagaggggcaggaacaggcatgggcgatggggttgggccccagttctttgacctggggaatcccccaacctatgcttccatatgaatgaatcactgtgcatctgtgggcaccactgcatcagcttgcccctccacacagctgcccttggctcatgttggctgtgctgtatcagtccttcaacgtttcctggggatcagttaattaagttgaggtctctgcgtctggaaatccgcctcagcctgcagggaaaaggcccctagtcttgtttctgccttcagaaccctgagacagaacaaggagaatcctgctgattctcagattgggctccagaggggcgacagtgtcaatcacaatgttagatactgaagttggctcagttctttttttttttttccttccccttctcccctcccgtcccctcctttcctctcccttcccttcccctcccctccccttcctcccttttctttctctttctcttttttttttggcggagtctcactctgccatctcactctgcagtggcgcaacctcggctcactgcaacctctgcctcctgggttcaagcgattctcctgcgtcagcctcctgagtagctgggattacaggtgtgtgccaccacacccagctaatttttgtatttttagtagagatggggtttcatcttgttggccaggctggtcttgaacccctgacctcaagtaatcctcctaccttggtctcccaaaatactgggattacaggtgtgagccactgcacccggccttttttttttttttcttcttttgagacagggtctcactttgtcgcccaggctggatgtagtggcagaatcatggctcactgcagccttgactgcccaggcccaagccatcctcccacctcagcctcccaagtggctgggactacaggcttgcaccaccacaccaaggtgaagtgttgttttgtttgttttttgtagagacagttttgccatgttgcccaggcagtgatcctcctgcttcagcccccacaaagtgttgggatcacaggcgtgagccgctacgcccggccactttcttacctaaaatacctgcacaccctacttggagaccctagggtgaggggagtggggaacaggagaacctgacagtagagggtacatgtaaggaggagagggacaagcttgctgtgtggtggggtgctccagggctgggggtgcctagggatccacctctctcccaggctgtggaattatcctccccgcactcactgcttctctaaccttggctatctcctgctgcctttggggtgtctgatgggcttgagggacctcccagctgctctaggtcatctcaccgcagccatgtgccccatttggtactgtcaaagctgctggaatattatcgtctttccagaactatccctggggcaatatcaggacctcaggctgcccggggctcagagccctcctgggtcttcctggggcccctggtccacatgcatctccactaagcctgagggcccttcgggagaggcagcacttttagcctgcccttggttttagcttttgctctacgaagatcttgtgatttctgccccaccatggggcagcaggaacctcaagcacagtgcctgcggcaaagggagccacaatggacttgccccaggtcaggcctgcacttgccttgtgtcagggtatctccccaagttgctggcctcagtccctacactgacctgtttccccagctttatctctggcaccccaaactcagcagccccgaccccacttcccaagcaccccctgtgcctggctctgtgcctgtcatggtgtcctggcagcagtctgggagagtatttcagttacctgcggtgtcctgggaaggctggagcagaggggtccactcactgattgccaaggtcacagaacaggacttgcattgtgcactggaggccctgtggtcttgcatgagcctggtaggcctctcccctcctgcttccagccctccatctgggaggccagcctgcccagggctgctctgccacttagcagctgtgtggccctggagagtccctaacctcactgaacctcagtttctccgtttgtgaaatggagataatacaaagagaactttccttctcaggctgttgtgatgggtaaggaaataaatgcatgcaaaatcacagctgtagttactatgaggcacactgtcttcctggctagaggagattctgaaggtgggtggggcagcaagatcaccacgtgtatgaaatgggggcaggctggttggagactgagggcaccagccccaagcactgccatctgccctgtgatgggactctcctgtggcagtggcaacggtcccactgtggaagcaacacatgagctgagaggacttgcctgaactgagccacatgtgccctctgggcctggtcaccccaccacctgcccccagtgtgacccatgcagggcctgttcctgaccctgaacgagaccaggactccctgggctgcatttcctatctgtaaaattgtaggagggtggtggtggtgggggctcgaacttgccccctgggtggggtggggcataaatagtcccagaggatggcctgggaaggctggctgggcctggcacaggggactttactgctgtcattattgtcctccttacaggagaggagagcaaggcccagaccggggaggaacccacacagcctctgtgctccagcctgcttgaaagacaaggtctacctacaacgcagagatgcacacattaaggacaatgaaacacccaagtgttaggaaccagaataatcagccctaatagaggggaggctgatcagggagggcctcctggaggaggaggcacaacatcagggtgcactgtgatttctggagacccaaggagttctggtaaatgacaggtgagaaaaagaaaatgtaataaaatataattgaaaacagaccctggtatgtgtggagagagggccgggaggaacctaggacaccggggaacctgaactcccccaaccagtgaagggagctgtgggcagcaaggtttgattggggttttctttcttgtggaggtttctcagagtgattcaagttcccccaccccgcccacagatggttctgagactttggaaagaaagaaaaggaaaaaagaccctgcccgcgccccagctgggcatccctgggaggtcgcgaggatccccggagacccagactcgggcccggggcgcccccggccagagcggcccctggctgcctccctacgccccgcgactccggtccggacgccgagggcctcggcctgcccctgtcccccggccgccccccacctgctccggcccggcggggcggtgctgggcccgcgggctccccggccgcagtgcaaacgcagcgccagacacgccccgcccgcgcctccccgcccccccgcgcccgcggccccaagcggttcccgagcccaggcccgcgccgagcccaggtgagcgcccgccccggggaccctggtccccggaaccccggtccccgcccgccgccccgcctcttcgccccggcgccgggggccagcgcttgcgctcccaagtctcggaccccggcccggcacgttaggggctgggggttggcaagcggggccagaggcactggccggggtccgaagctcacctcgtccttctctcgtcccacaacggccccttcccggctcgccgcggggccccactgtgtgccagtcccccttctcgggctgcaaggtctggcgggggcaacgggacggagccggcgaggctgctggcatcggcttcccagagagagggaactgcacgtgcagaggcggggagagtggacagaggcttgccctgagctccgtgggggaggggagagcgcggagcccccacactcgaaggcaggactgggatcagatgccacccctaggacgcctggaagccactgggagtccgatctgggcaggagcccttgggatgaggcagtgggggcaggtggcgagaggtggaggagtggggagaggaccctgcccagcctgcaccctgggggcgccaggagccctgggagggtcaggtggagcaggggccgctctgtgagatgggagtaatccagtcccgcctcacaggtcctggggtccctgggacagacacagactcctgctgggtggttagcactgggctctgctagaacttttctgcagtgggcagctcatgggcaaggaatagcactcgggcgctctgcactctgggggtccctcctgccctgcccctggcaaggacctttgcctttgagtggggtgactgggctccaagccgatctagcacacagtaggccgaaggcacaggggccccacccagtctccttcctggcccaggccctgggggattcaggtccctgggtactcgggaagggacagcacagcctgggcaggtccccagtggcaagaccaggtctgaccttttctgggatctgtggcccatcaggtgaggcctgaggtcagccaggaaggaagcgggcagggctgaaccagggctgaaaccaggacccaggaagggacagcctagtgcccagggaaggggcaggtggggcaggtggcagttgagttttacagaccttctttgatgacaagtgggggaaagagccaaggcacgccccagtggctgtgggagccaccgcctcctcccctgtaatgggcacctcgaggaccgacaggcgcaggggccaggcaccaagggtccctctccaacctggccttttgtttccaccccttgctctcag

SEQ ID NO: 1023 - DNA, 6000 bp, Homo sapiens
ctcggctcactgcaacctctgcctcctgggttcaagcgattctcctgcgtcagcctcctgagtagctgggattacaggtgtgtgccaccacacccagctaatttttgtatttttagtagagatggggtttcatcttgttggccaggctggtcttgaacccctgacctcaagtaatcctcctaccttggtctcccaaaatactgggattacaggtgtgagccactgcacccggccttttttttttttttcttcttttgagacagggtctcactttgtcgcccaggctggatgtagtggcagaatcatggctcactgcagccttgactgcccaggcccaagccatcctcccacctcagcctcccaagtggctgggactacaggcttgcaccaccacaccaaggtgaagtgttgttttgtttgttttttgtagagacagttttgccatgttgcccaggcagtgatcctcctgcttcagcccccacaaagtgttgggatcacaggcgtgagccgctacgcccggccactttcttacctaaaatacctgcacaccctacttggagaccctagggtgaggggagtggggaacaggagaacctgacagtagagggtacatgtaaggaggagagggacaagcttgctgtgtggtggggtgctccagggctgggggtgcctagggatccacctctctcccaggctgtggaattatcctccccgcactcactgcttctctaaccttggctatctcctgctgcctttggggtgtctgatgggcttgagggacctcccagctgctctaggtcatctcaccgcagccatgtgccccatttggtactgtcaaagctgctggaatattatcgtctttccagaactatccctggggcaatatcaggacctcaggctgcccggggctcagagccctcctgggtcttcctggggcccctggtccacatgcatctccactaagcctgagggcccttcgggagaggcagcacttttagcctgcccttggttttagcttttgctctacgaagatcttgtgatttctgccccaccatggggcagcaggaacctcaagcacagtgcctgcggcaaagggagccacaatggacttgccccaggtcaggcctgcacttgccttgtgtcagggtatctccccaagttgctggcctcagtccctacactgacctgtttccccagctttatctctggcaccccaaactcagcagccccgaccccacttcccaagcaccccctgtgcctggctctgtgcctgtcatggtgtcctggcagcagtctgggagagtatttcagttacctgcggtgtcctgggaaggctggagcagaggggtccactcactgattgccaaggtcacagaacaggacttgcattgtgcactggaggccctgtggtcttgcatgagcctggtaggcctctcccctcctgcttccagccctccatctgggaggccagcctgcccagggctgctctgccacttagcagctgtgtggccctggagagtccctaacctcactgaacctcagtttctccgtttgtgaaatggagataatacaaagagaactttccttctcaggctgttgtgatgggtaaggaaataaatgcatgcaaaatcacagctgtagttactatgaggcacactgtcttcctggctagaggagattctgaaggtgggtggggcagcaagatcaccacgtgtatgaaatgggggcaggctggttggagactgagggcaccagccccaagcactgccatctgccctgtgatgggactctcctgtggcagtggcaacggtcccactgtggaagcaacacatgagctgagaggacttgcctgaactgagccacatgtgccctctgggcctggtcaccccaccacctgcccccagtgtgacccatgcagggcctgttcctgaccctgaacgagaccaggactccctgggctgcatttcctatctgtaaaattgtaggagggtggtggtggtgggggctcgaacttgccccctgggtggggtggggcataaatagtcccagaggatggcctgggaaggctggctgggcctggcacaggggactttactgctgtcattattgtcctccttacaggagaggagagcaaggcccagaccggggaggaacccacacagcctctgtgctccagcctgcttgaaagacaaggtctacctacaacgcagagatgcacacattaaggacaatgaaacacccaagtgttaggaaccagaataatcagccctaatagaggggaggctgatcagggagggcctcctggaggaggaggcacaacatcagggtgcactgtgatttctggagacccaaggagttctggtaaatgacaggtgagaaaaagaaaatgtaataaaatataattgaaaacagaccctggtatgtgtggagagagggccgggaggaacctaggacaccggggaacctgaactcccccaaccagtgaagggagctgtgggcagcaaggtttgattggggttttctttcttgtggaggtttctcagagtgattcaagttcccccaccccgcccacagatggttctgagactttggaaagaaagaaaaggaaaaaagaccctgcccgcgccccagctgggcatccctgggaggtcgcgaggatccccggagacccagactcgggcccggggcgcccccggccagagcggcccctggctgcctccctacgccccgcgactccggtccggacgccgagggcctcggcctgcccctgtcccccggccgccccccacctgctccggcccggcggggcggtgctgggcccgcgggctccccggccgcagtgcaaacgcagcgccagacacgccccgcccgcgcctccccgcccccccgcgcccgcggccccaagcggttcccgagcccaggcccgcgccgagcccaggtgagcgcccgccccggggaccctggtccccggaaccccggtccccgcccgccgccccgcctcttcgccccggcgccgggggccagcgcttgcgctcccaagtctcggaccccggcccggcacgttaggggctgggggttggcaagcggggccagaggcactggccggggtccgaagctcacctcgtccttctctcgtcccacaacggccccttcccggctcgccgcggggccccactgtgtgccagtcccccttctcgggctgcaaggtctggcgggggcaacgggacggagccggcgaggctgctggcatcggcttcccagagagagggaactgcacgtgcagaggcggggagagtggacagaggcttgccctgagctccgtgggggaggggagagcgcggagcccccacactcgaaggcaggactgggatcagatgccacccctaggacgcctggaagccactgggagtccgatctgggcaggagcccttgggatgaggcagtgggggcaggtggcgagaggtggaggagtggggagaggaccctgcccagcctgcaccctgggggcgccaggagccctgggagggtcaggtggagcaggggccgctctgtgagatgggagtaatccagtcccgcctcacaggtcctggggtccctgggacagacacagactcctgctgggtggttagcactgggctctgctagaacttttctgcagtgggcagctcatgggcaaggaatagcactcgggcgctctgcactctgggggtccctcctgccctgcccctggcaaggacctttgcctttgagtggggtgactgggctccaagccgatctagcacacagtaggccgaaggcacaggggccccacccagtctccttcctggcccaggccctgggggattcaggtccctgggtactcgggaagggacagcacagcctgggcaggtccccagtggcaagaccaggtctgaccttttctgggatctgtggcccatcaggtgaggcctgaggtcagccaggaaggaagcgggcagggctgaaccagggctgaaaccaggacccaggaagggacagcctagtgcccagggaaggggcaggtggggcaggtggcagttgagttttacagaccttctttgatgacaagtgggggaaagagccaaggcacgccccagtggctgtgggagccaccgcctcctcccctgtaatgggcacctcgaggaccgacaggcgcaggggccaggcaccaagggtccctctccaacctggccttttgtttccaccccttgctctcaggcacccacccacggcccttcctggtatctggaccagaccaggtgggtctcagccccacctcaagtgagacttcaggaagaacttccagaggaaactggaggatggcagtgggatggactgtggggaggtcatttgcaaacaaggcagcttatgcctgtgccctgggccttccaaagtccacctgtaggctgcatcttccggaaggcccaccctgtagcctggaaggcacctggctacagtgatctctctgctgtgcaggtgtcccctcccccagggcaccttgcagggccttagggtgatatgggggctttctgggcccctgcccaccttaaaactgatcaaggtgggagggtggggtgggaggccacagggatgcccctgctgcttgaccttgatgggaccttgaccccttgctttccccatatgctgttgggcatgactgcccacaggcctggtgggcgtttgtgaagggctggagtcgggggtagggggagcttatggctgctgggcacaggcgtggcagggctgtgtgcctggcttccctttcccctaaccccatcaggcccgggctggccgcccacttctgttcaccacagagcagggtttccctggggaccagtggactggcccagccccacaccgccccccagcccctcctggccacagcttgagctgggaggagggtggaggctgggccgcctcctggacccctgccctccctgcccggccttccaaggcccggcagcctcagtccactgctgggcctggaacacggagcagtggctgccctgcgaggaggtgggtgtccggagtgctagccagggtggggctgggctagggggagcctgatgtcacccccattgtaggagggagaagaccaaggatgagaagggctttggcttccccaaggtgaccccctctttgagcctaggcatagtggtctcccgggagaatggagggtcccagagctctcaggctgtgggatttggagaggggaaggggggcacgaggaggcagtagaaatcagggaggatttcctgggcaaggcagccgcggggctggacgatgggcggccgaggttcgggcagaggaactccactggaggagtgagggagctgagcttggagggcttcaaaggggaggtgacctccagggccccacgctctgggatcaggctcacgccatggttcccagctcaaatgtaagactctttccgaagctcccactgtctctctccgtccctctgtgtctctacctgcccacacgccccggtcctgatggctccagtctcccctgcaggtcctagagcagctccagcaggatggcggctccagcgtctctaaggcctgcagggggtccagccccatggggggcgccctaggcctccgacagctccccatctgtgctcctgcctgccggccatcctcaggccactcgccatgggcggctgcttctccaaacccaaaccaggtacctcctgtcttcttgtctccatcctttctcctccctccccgcctcctcctcccccgtctcccccccctccccctctgcactcggtaggcctccgaagtaggtcaggctatccaagaacccgctcggaatgttaatacgctgccgccaggagggggtagggggcctggagcagttcccccagctggcccctgctccagtgggtgcccctttttctttggggctttgagtgttggtggtgggaataacagcaggacccttcttggaaaaggaaagtcagggttcctcctgttg

SEQ ID NO: 1024 - DNA, 6000 bp, Homo sapiens
ggggactagaagggctggtgctgcgtggggtcaagaggtttacctgataaaccggtaagggatgccctcttcccccagtagacttgggaggtgcctcactcccagggtgcctccgtcactctgtcagggatgctgttgtgcaggcttcagtcagcaggctctcatcggggcagcctctcctttgggcagaggctgataggaccaaagaggtttctagaggacttgtgggtggaccaagcctctgtcctgtccctggaggaacccaggcctggggtgttgtggtccccagctgagtggagactgtgcctgtgctgagcttgggtagaggaggacaagaactaggccaggcgcggtggctcacacctgtaatcccagcactttgggaagccgaggagggtggatcatgaggtcaggagatcgagaccagtctggccaactttgagaaaccctgtctccattaaaaacacaaaaaaattagctgggcatggtggcacgcccctgtagtcacagctactcaggaggctgaggcaggagaatcacttgaacccaggaggcagaggttgtagtgagccaagatcgtgccacttcactccagccaggtgacagagcgagactctgtctcaaaaaaaaaaaaaaaaaagaactgggcgggcacaggctgccgtcagggcctcgctcaggcttccctgctgtgtgaccactcacgtcacatgctccatcttggcccagcagctttcagggcagagacggtgtccccgagctagagacagggaagcagaaggatctgctgtctgtgtcgggctcgcaagcctcgtgagtgcctccctgacccagaatgctgcccaggggcgcaggcaccgctaggcggcctcaggtggtccgttcatttcaccattcctgcaactaaaggacttgtgggttgtgtataatttctcactgtttttgatgagcctcgtttgggtgcatctctgagcctcctggctttgttccagtgctgcggctttgaatgctgctgtcttagaagcagctgtgcctctgctcaggtagcagcagggggcttcacgccccatccccccggccctgcccccaactctggctgtgtttctgcaggatgagaaggcgcgcattgaagcattgggtggctttgtgtctcacatggactgctggagagtcaacgggaccctggccgtctccagagccatcggtgagagccaaagaggccgacccaagtgggagaaggtctctcggaagcccaggcctcgagtgtggcccgcggctcaccaggggttcagggaggcagtgtgatgggccgagggggatttgtcatgcactggggtgataccctcgtagtgtgaagggaacagggcagattcagagactgcagcaccagtgtctgagtgtaagttacactgtatgttattatctcacctaaaacagctcctacaaatctcatagaaacctgtggctcaccaccctatgggctggaagtagagcttccaatattccggaaatgaggtttatcctcctcccgcgttcatgctgacaatccttttttctcttttgggaaaaaagtgggttcgctgggcgcggtggctcacgcctgtaatcccagcactttgggaggccgaggtgggtggatcacctgaggtcgggagttcgagaccagcctgatgaaaccccatgtctactaaaaaaaaaatacaaaaaattagccaggcatggtagtgagcccctgtaattccagctattcagaaggctgaggcaggagaatcacttgaacccagaaggcggaggttgcagtgagctgagatcgcgccactccactccagcctggataacgaggaaaactctgtctcaaaaaataataataaaaataaataaaaattttaaaaagtaatgggtctggctgggcatgctggctcacgcctgtaatcccagcactttgggaggccaaggtgggcggatcacctgagatcgggagttcgagaccagcctggccaacatggtgaaaccccttctctacaaaaaatacaaagttagccaggtgtggtggcacgcgcctgtaatctcagttacttgggaggctgagggaggagaagtgcttgaacccagaggcggaggttacagtaagcggagatcgtgccactgcactccagcctgggcaacagagccagactgtgtctcaaaaaaaaaaaaaaaagtagctgggcgcggtggctcacgcctgtaatcccagcactttgggaggccaaggcgggtggatcacctgaggtcaggagttcgagaccagcctgaccaacatggtgaaaccccatctctactaaaaatacaaaaaacattagccgggcgtggtggtgcctgcctgtaatcgcagctacttgggatgctgaggcagcaggatcacctgaaccctggaggtggaggttgcggtgagccaagattgcaccattgcactgcagcctgggcgacaagagcgaaactccatctcaaaaaaaaaaaaaaaagtgggtccagcctgcatctcattgtctcagcatgcggtcagtgccgggtctcaggctgtgggcactgtgaccacacctccttcctggtacttagaaaatctctccctccccagctgattgccagggatttggcacctacccctctgaaacattctgtcctttttggcagatgtggcaccttcttgacagcccatcctcaggctgtgtctttccttgtgtctctggacactccaggaagtgaggccaggatgggacggctagggcagagaaagagggagctcggcctggtgtggtggctcatgcctgtaatcccagcactttgggaggctgaggtgggcagatcacaaggtcaagagatcgagaccatcttggccaacatggtgaaaccccatctctactaaaatacaaaaaaaaaaaaaaacaattagctgggcatggtggcgcgagcctgtaatcccagctactcgggaggctgaggcaggggaatcgcttgaacccaggaggcagaggttgcagtgagctgagatcgcgccactgcagcctggcgacagagcaagactccatctcaaaaaagaaaaaagaaaaaaagggggagctcacaggccaaggtcaggggtttccgttcccaggcaagtgggaagtactgggcagtttgcataagggagcaacagaccccagaccccatgagagcaggttggtctctgtccctgcaggatgtgaggtctaggcctgggtaggtggggaggaagctgtggacaccgtggtcctctgacccgggctcttctccgcctgtccaggggatgtcttccagaagccctacgtgtctggggaggccgatgcagcttcccgggcgctgacgggctccgaggactacctgctgcttgcctgtgatggcttctttgacgtcgtaccccaccaggaagttgttggcctggtccagagccacctgaccaggcagcagggcagcgggctccgtgtcgccgaggagctggtggctgcggcccgggagcggggctcccacgacaacatcacggtcatggtggtcttcctcagggacccccaagagctgctggagggcgggaaccagggagaaggggacccccaggcagaagggaggaggcaggacttgccctccagccttccagaacctgagacccaggctccaccaagaagctaggtggtttccaggcccctgccctccccttcctcccatccttgtccttctctccctcagaagcctcaggacccaacaggtggcaggcagtggacagggtgcccgccccacagtgctttccccagcaccccagagccagtcgggacaccccccgcagcccgtcctggtggctgtggaactgcactgggtggcgggcagatggtggaaggcagcttaggagacctcaccaaagagaagatggaccggctcttgctcccagctcctattaggcccggggtgggaccagaggtcataggtgcccaacggcagccaaaccaaagacactggtgtgcatggggcagcatggttgtgcacgtgggaccctggggcggacccaggagccaaactcttgaagcaccccctgggtcaggcccagcagcggagtggccagccccagtttcccattgctcctctctgcggccagggccaggtgggttcatatttacagatatgcccagccagtcctggtcggccacaccagtgtcccaaagaggagagcgcagcagagccaggggtctgttctgtagcagccacccccctgcccccactccagggcagccatgatgtgcttgggcccaccagggccttccgggctgctctcttccctgagcccggaaccggcgacgcacatgtgtcttttgttggtgtgtttgtttttttccagggaggtctaattccgaagcagtattccaggttttctctttgttttatcagtgccaagatgacctgttgtgtcatataatttaagcagagcttagcatttattttattctttagaaaacttaagtatttacttttttaaagctatttttcaaggaacctttttttgcagtattattgaatttattttctaaatcaggattgaaacaggaacttttccaggtggtgttaataagccattcaagtgccttacacagctttgaagaaactaggactgcagtgggctcggataggcccattgaggtttttagaaaagcaggatttgttttgttagggaggcatgattttggtgagatctttctggaagagttttccgcctctttgtgatgctgaacacccccaaggttctcccctccccccgctgcccaggtgactggcaggagctgcgactgccacgtagtggtgcctgggcccgacagcggggctctgggcatcccgggtgaccttggcccatctgcctgcattcccacccccttgggcctggctggatcccaggcagagggaccttgctgctgtgtgattggaacattcccaaatatcttgtgaatttgtaatcaaattggtctcattgggaaagactcttaattaagaggctcaggcaagcacagaggcagcccgtgggtctctgtctcagtctggaggcagcagggatgctgctgggagtccatggcacaggccacagcccctcaccttgccgcggtggctggcagcacgcctgccttgctctgccccatgccctgaacaggcatgagagctccacgtcccctagtgcaccctgagagggggctcacaagtgaccgatcctgggtgcctcagggagctcactgagggcgtgcaaagttgaaagtggcaaggctgggggagggtgtcgggtagagggaagagggcagggggctaggggaggactcagaggccatctgcagggccaagccacaggaagggctgagctggaggtgggcagggctgctccaggcaggtcagagcagtgcagggggaggagaggagaaagggaggaagctgggctgtgtggtccccatgaaggcattcagagtccacctgcagacagcgagagccccaggaaggtttgcacagctgtgccccaagcaccttggcctcctctcagctcgccgaggaggcacgctagagccgccttcccggtgggagccctctgtcccacagggagcggggagccagctttgctggggccctacctgcatgcccagccttacccctcattctcacagcacagatgaggttgagaccatgcagtcaatgcattgcttaaggtctcttatttacaaaaaaaaaccttaaacatagtcgctgtcattcagacattcagagaatggttggccacaaacaatgaccaagtattgcttggcttaacttgaaggcctgctgtctccttctgggggtcagggacgcagctccaccctcaccactagcccaccctgcccgtgggcataaccttgacgaagagagagaatgattggcatctgcttttctcttttctttgctaataattctgttcctggctgccgagagtgaagtttcaccatgtgg

SEQ ID NO: 1025 - DNA, 6000 bp, Homo sapiens
gggctccctcagggtctgtgggcagctctggctggcgggcagcgttggtgtgcacgtggacagcggcgtacctcgcagcatccacgcctccgtgaccatcaaacacagcaaagtaggcgcggttcacagggtcctggtggggatgtggtgggagtcacagacccgcgggacccagggtgctcccagtggggcgtggcgccaggcactgatggggtagagtctgggagaatcagtatggccttcgcccggcttatgtgcgtatgagggggtaggtttggaaaaggacagctcgcgggagcctcggtttcaccatctgttatgagttgctacaagcataaaatgaggggctgccccaggtggctcctggtgcaggagtcaggggaacgtggcatccaggcctccctcataacagactcacactgttgcccttcttagtctcttgctgggcaagtacaggggctgacgggtgtctctcctgtctcagccttggtgggcagctcttctcggtacctggggggcccccaccctcgccccggtcctccgaagctgtccccagggtctggacgggagcactcacagacaagccgaagagctggttgaaggaagggagggacacgtgccggtcctccatcttgcggcgagtgttccggatggcgtggatggagaccagccactgccgctgtgaggcccgggcagccaatggcacctgcttctgccactggccggcgacttcccaaaggcggttaaagaaactctgtgccaggctttgggcatccagcactgatgggcacaatggagggattgtcagggaagtgccaaccaagccagctgaggcctcgctggctccctgacagctcccacaggggcctgcaaagcccccatcacctcccggggcattgtgagcacatcaactcaataacgcgcacatggcagcctgttaccagaattagaaatgtctagtttggcaacttgccccttgaagtctcccatcccaccatggagcaactctactcatgggaacccaccctgaagaaatcatcagaaacacaaaaataattttaaagacaaagtacagaatcacttataattgcccattaattagaaatactatatatccaatgacaaaggaataatacttaaattatgatctagtctcggccaggcgcagtggctcacgcctgtaatcccagcactttgggaggccgaggtgggcggatcacccgaggtcaggagttcgagaccagcctagccaacatggtgaaaccccgtctctactaaaaatacacaaattagccaggcatggtggcgggcgcctgtaatcccagctactcgggaggctgaggcaggagaatcgcttgaacctgggaggcggaggttgcagtgagccgagatcatgccattatgctccagtctgggcgacagagcaagactctgtctcaaaaaaaaaaaaaaaaaaaaaagatctagtctcttgatgaagaattaagctgctattaaatatgattttcataacgaaatatgcaactcccatacgaccccaccgtggcactcctgtggacttatcccagaacaatgaaggctgttcacataaaagcttgaacacatgaacacaaatgttcatagcagctttatctggaacagccaaaatctggagtcagcctagatgtccttcaacgtggaaatggttaaacaaaccgtggtcgacccatacctttgaataccactcaagaatggcaaagaatgaactcctgatgcatcaaacaacctgggctaatctccagagaattaaaccagtcccctaaagttacacatcatatgcttccatttatatgtgttcttgaaataataaaatggtagaagccgagaagattagtagttgccagtggttagggatggggtctgtaggggtgggggtataagggtggccttaaaagggtgacaggagggatcctggtgatggaactgctctgtattttgaccatgttaggatcctggtggtgatattttattatagttttgcaaaatgttaccattggaggaaactgggtaaagtatacatggaatctctttgtattatttattacaactgcatgtgcagctatgattatctcaaaacaaaaagtttaattaaaaaaaactagcccaggcatagtggctcatgcctgtaatcccagcactttgagaggctgaggtgggaggactgcttgaggtcaggagttcaagaccagcctggataacataaagagaccttgtctcttaaaaacaaacaggctgggcgccatggctcatgcctgtagtcccgcgctttgagaggtaaaggcaggcagatcacttgaggtccggagttcgagaccaccctgaccaacaaagtgaaaccccgtctctactaaaaatacaaaaattagctgggcgtgctggcatgcacatgtagtcccagctacttgggaggctgaggcaggaaaattgcttgaatccgggaggcagaggttgcagtgagccaagattgagccactacactccagcctggacaacagagcgaaactcagtcgcaaatgaacaacaccaaaccaaaaaaaattagctgtgtgtggtggtatatctactcccagctattcgggaggctggggcaggaggatcccttgagccaaggacgtcgaggttacggcgatctccgattacaccactgcattccagtctgggtgacagagggagacctggtctcttaaaacagaaaactaaaaaatggattttaatagagtttataagcatgtaaaatgcttctgtcatgatactaagtgaaaaaagaaggaaaattacatatgcagtttaactacaagtccatgaaaaaccaccagggccagaaaaaaaaaaaggcgggaacagcacacaaccaaggtgtcagagtgggcctgcacgtggcagttccacggacagctttttcctgaagtacactttcttaatacttccccagtttttcattacaagtgttagtctcgtgtgacagtggctttaaagcatgtccacaaattctttgacttccccttttgcgaggtggagctcacttcccactgctgagtgtgggagctggctgcttctgatgaagagtggcagtgactgcgtgtgcttcaggtgttacgaaacaaagaggccctgcgcctcccgccttgtgtattctcactctcttcctccctccctctcatcgctcaatctgagctgtgaggatgctcaagcagcgccacggagagtccacatgggacgggaccagggcctcctgtcagtggccgtgtgttgaaaccaccgtggaagcaggccctccagcccagccagcaaccatgtcaccacaacccagtaagagaccctggaccagaaccagctaagctgctcccagattccagacccacagaaactgggagaataaatgtctgttgttttaagccactacatttggggcaatttgttatgtagcaacaaataatataagccacaatactcatttgaaaagaaaaaatacccaaatcctacctaagcttggcttctcaagaaaagatcaaccagtaacaggcccaaaggaaaccatgggggctctggcttcagggactcatgtcacttcaatgcacaaactctcctggaactcctgccagcccaggtgcatgtggcaagcatggtgaatcagggccagtcagccgagggcaggagttgagtgtcacaggccacacccaaaggacatggggaactgagaggaggaaagagctcctgcctaaaggcggaggctgtggaagaaaaggagaagggctgaggccagagggggccaccgaggaagaaccatgaacgcgagggcttatgcacgcaggaggtcacagaaagacaggttcttgggaatccatgcatcaaggcaggggtgggggcatccagagccagctgctgccgccatggccaacacaggggcctattcaagcatttggcaagaactggggactggcaaggctatgggtgaaggaggggcctgagaactcattcaggcaggcccagctcagggaaggcagctccacacaagtttggccagtggatcccctgcaaaccagcaggaaacccccctcgtcctgccagtccttgtagcgctgcctcctcttcctctcgtctgagggccactgtgcccagaaaactgcccctaaatgccatggactcctcctcactccctctggaaactgtgggctcctggtgcttaccaggcctgagctcgggctgggggagactccggccgccgctgtggctcacggtctcgccccgggtgctactgctatttccaacagccgcttagcctagactctgctcaggaaaggccagcggctgaggcagtgctgcccagcccacggactccccatgccaagggctgcagccccgcaacctcgcttctggattcttcgctgatccagtcaccggggaggggctgactggcagccacacagaggtttcagccactcgctgctcttcagtggcaattcttataatacaatccccactctgacgcaattttgtaagaatggcttggagtccaaaaacttgactacattctacttccgtgacagggagagcatgatcaaggccgctaggcaggcctgcatgcgaggcactctgacagacggggaagcaagggcaggcgagacttccttctagctgcgccctccctccttcccaggcctgcaggagccccgagcgtaggactgggctggtgccggcgcagcaacgctccttctcaccggcaggtggcgctgtctcccgcgtggacggacagagacccatcaggcggggagggcctgggcggtggcggcgcccccttggtggggccgcagagcggaggagcagcagctgccaccggccggaagcctgctggctcggccgagaacaatggccgcctgtcactgtggacagctgtctcccaggctaaggcaaggctgcgctcccagggaatgcgggcagggagccagggcggagggcagaggacgagagcgaggaggagagcgcgggcacccactgatgctggcggcctcgggtattcgctttctctctcttctcccaccttgttccttttccccggatgcacgcatgcactagtaatgccgaatttagaacaacagggaaaggaaaggaaatggcaaaggaagggaaaggaaatggccgacaggaaatggcaaggaagggaaaatccactgcaactctgctgcctgctggcctgtccagggacaactattcagctgggtgggacgttgctacccccttgtggcacccctgctgcagcctgcgattcttacgccctgtatttctggtctaacatcaaccaacactttggcgaaatataataaaatgaaattactaggagaatgaaagaaagtcacatgaaataaaagccctgctttttaatgattatatcctctgtgaaatggatctgcagccctctccatttctgggttcccctggccacaccatgcttatggctgtcccaggagcaggctgacagacaagcttccaccagcatctaaccatggggctcatggacaccgtagagcgtctccacccaacagaatcctgacttgggggcagctgaggcagggggcccgagcgttgaggggaccacgctgctgccccgagacctgctggcatgccacctggccaaccctgacttcgcctgcccgggcgcatgttaactgagttacaacactgagggcacttgaacctggctgcatgaccagagatcgatcacctgtgagatcctctgtgaaacgggataagcatctttaatttcctgggctgttctggaacttcagtcagacaggacacaggagggtgtctgcaccacccacccctgcctcgtgggctgactgggaactatatgacctgtggagggctgtgaccgccaccctccacctcactggggccgcaagccttctctgctccttgattctgctgccgttgtgagcgagggccccagcacccttagggacc

SEQ ID NO: 1026 - DNA, 6000 bp, Homo sapiens
ttggttttgatgcgagagcagccagacttgttgagcggctgctgtgtgagccacctagtgatgggtgcgagcaggaggggtgcagagctcccgagtctcctcagcccccaggaacccaccttacatggtgaactaaaatggagtatttgaagttgttatatgttccagccatcttattggatttattttttaagttatttttgttcttttctagcatcttctttcacacgcaggtgtggatgtgcataggtgtagtcagcacttggggtctgagcctcacacgttgtctacactaagcctggctgtccacacacacgcactcacatgtgcccatacacagtcacgagttccacctccgagctctgcttcccgtgtcccagcctgaggaggggctcttgggcatgaagggctttgagcatcttggtccctgagctctttcacagaccgtaaaaggcatccttctggaggccatccaggagtcagaacatccagtccacagggggctatttacgccttgtctccgctcttgtttggagcctcctgtcacatatttgagtccctgagcagtgcataccgtacactaatgatttgagtgtggtttttgtctctgccactagactataagcctcttgtaacagcccctgccccaaggtcggtgagacgtgtttctcaggcacctgggccttgcatacaccttggcttgtccctggagcatcttcttgccttgtgtaggagcctgctctgcagggaccagaatcagggtggatctgcatggtgcagtgactcagggctgagggcctctagggcgtgtcccaggccagaccctgggatgaggcgggagctgtgtccaggaagaggacgatggtggcccttggccaggcattgtctgggtccccacagccggaaactgcctccctgccccagcagcagtggcgggtgggcaggaagctgaggcctggcctcaccgggaccaagggaaacaggcgtccttcctccctgctgtgcaaaaggaaaacccagcagttggcaggaaacccccaaatggcagaggaactaatttctcatgtcttggctggttgtttttcaaaggcagttccagaggcttctcccatgagtcaccctttcattttaaaaatcacgaatctgctgagcatggtggctcatgcctgtaatcccagctactcaggaggctgaggcaggagaatcacttgaacccgagaggtggaggttgtggtgagctgagatcacgccattgcactccagcctgggcaactagagcgaaactccgtctcagaaaaaaaaaaaaaaaaatcaggaatccatcccggtagattcctcagaccatcagtagataccttgggtgcccagcccccatggaacaagacctgtcagcctgtgctgttggaaggtcctcgccttccagttaaagccgggagtgtcggcccagtgcagaatcacctcgccaccccaggcatgctcccctgacccccactctcagggacaggcacacaggggtgaatgtgtgttgtccagcttccagggcccccactgggtgagaaggcagattccaggggtcaaaatgcatgttagaggccatagggccactgagggagcgaccccttctgcccagaaaagccagggatggctcagaattttagacactcctccccactgccctccttctcagccacagatggcttcagtgtttctttccctgatctgccccgtggctctcttctgccctgcctacctgctaaaagacgctaaccctcctgtcggtttgctttcagcctgctgcgacctccctttctacccactacgcctcctcaactgctcagctctgttctatgacattgaaagcagtgacccaatctcacttcttaaaacatttccttcgtggcacccagaaggccactcctggagtcatccccactttgctagccatgctctggccctgtgggactcagccccctatcctcattcattccgcagctccatctcctgcccagaccatgttcttgcaggccctcaggcctcttgacctccgtggaacacaagtcgctgtggaaacagagcccattgcccatcccctgcctgactcttccatccccatcagggtaattaactgtaccacgagccttctagttgctcagaatagaaacttcaacactgtccctgcccctccatttatactgcccgactctgtctgctcctgtttgtcaccatggccctgcccagcccaggtcttagactctctcctttagacagtcgtccccttcttgccagcccaccctccacaccagggtcagagaggcctaaaagccccatctgatcatgccatgtccctcttcaaacagaccaaaggcggccaggtgtggcggctcacgccattatcccagggctttgggaggctgagatgggaggatcacttgagggcaggagttcaagaccagcctggacaacatagcaaaaccccacctgtacaaaaaaatttacagattagctggacatggtgatgtctgtagccctaactactgcctgtagccctaactactctggagtctgaggtgagaggatctcttgagcccaggggtttgaggctgcagcgagccatgattgcacagctgtgctccagcctgggagacagagcaagaccctgtctctaaaaataaataaataaaacacagaccaatggcagtgcttccctgttagcataaagcttggcctgccctgttcccacagcccctcaccccggcagctcctatggccccatccgcccagggaccttgtggaccacgcacagccacttcctctgctgagtgtgcccatgggtcccacaccccaggatcagcttcctggagctgctgtacaaatgaccacagacccagcagcttaaacaacagaagtgtgcttcatggtgctggaggctgtcatctgagatcaggatattgacagaactggctccttctggtggtttgtgggcaacccttggcattccctggcttgtaggttcatcccccaggtctctgcctcatgttcccctggcattctctctgtgtgtgtgtgtctgtgtccaaattcctcccccaacctgttttttttttttggagacagcatcttgctctgtcgcctaggctggagtgcagtggcacaatcttggctcactgcaacctccacctcccaggttcaagcaattcttctgcctcagcctcctgagtagctggaactacaggcatgcgccaccacacccggctaatttttgtatttttagtagagatgaggttttaccatgttggccaggctggtctcaaactcctgacctcgtgatctacctgccttggcctcccaaagtactgggattacagatgtgagccaccgcacccggcccaaattccctttttcatagagacatcagtcattggagtaggggcccagcctgctccagcatgacgtcatcttaactaattccatctgtaatgaccctgtttccaaatgagctccattctgaggtactgggggttagggcctcagtgtatgaatttaggggggacacaattcaacccagaacactccccaccccccagggtccccagctggcatgggtgattcctctgccctcctgtggccaggagccatcatcagcatggatgtcaggcagtttacttgcccatcaacagccccctcccaactagccgcaggctcaagtatggtccagctccccaccagatggttgtgcgtctgcctttgctgtcctgtgaccttcctgtcccagctccctgaggacaggggccgccctgctggccgtgacccctcagcatgtgggctgacagttggggaaggggggctaggtgtggtctcctgctgggggctgcccctcacttccccctcctcatccctaggaaggccccgccaccacttgctgctgctctggcccacgaagcagtttcacagctgctacagacagacctttccgaattcaggaagttgcccagggaggaagaagaagaggaggaggacgatgacgaggaggaaaaggcccctgtgacctgtgagttctgtttcttctgaggtggccccagggctgcttagcaggcaacaaagggtgacgacattgtgggaagcccattgattggggtccctaagggtgctggggccctcgctcacaacggcagcagaatcaaggagcagagaaggcttgcggccccagtgaggtggagggtggcggtcacagccctccacaggtcatatagttcccagtcagcccacgaggcaggggtgggtggtgcagacaccctcctgtgtcctgtctgactgaagttccagaacagcccaggaaattaaagatgcttatcccgtttcacagaggatctcacaggtgatcgatctctggtcatgcagccaggttcaagtgccctcagtgttgtaactcagttaacatgcgcccgggcaggcgaagtcagggttggccaggtggcatgccagcaggtctcggggcagcagcgtggtcccctcaacgctcgggccccctgcctcagctgcccccaagtcaggattctgttgggtggagacgctctacggtgtccatgagccccatggttagatgctggtggaagcttgtctgtcagcctgctcctgggacagccataagcatggtgtggccaggggaacccagaaatggagagggctgcagatccatttcacagaggatataatcattaaaaagcagggcttttatttcatgtgactttctttcattctcctagtaatttcattttattatatttcgccaaagtgttggttgatgttagaccagaaatacagggcgtaagaatcgcaggctgcagcaggggtgccacaagggggtagcaacgtcccacccagctgaatagttgtccctggacaggccagcaggcagcagagttgcagtggattttcccttccttgccatttcctgtcggccatttcctttcccttcctttgccatttcctttcctttccctgttgttctaaattcggcattactagtgcatgcgtgcatccggggaaaaggaacaaggtgggagaagagagagaaagcgaatacccgaggccgccagcatcagtgggtgcccgcgctctcctcctcgctctcgtcctctgccctccgccctggctccctgcccgcattccctgggagcgcagccttgccttagcctgggagacagctgtccacagtgacaggcggccattgttctcggccgagccagcaggcttccggccggtggcagctgctgctcctccgctctgcggccccaccaagggggcgccgccaccgcccaggccctccccgcctgatgggtctctgtccgtccacgcgggagacagcgccacctgccggtgagaaggagcgttgctgcgccggcaccagcccagtcctacgctcggggctcctgcaggcctgggaaggagggagggcgcagctagaaggaagtctcgcctgcccttgcttccccgtctgtcagagtgcctcgcatgcaggcctgcctagcggccttgatcatgctctccctgtcacggaagtagaatgtagtcaagtttttggactccaagccattcttacaaaattgcgtcagagtggggattgtattataagaattgccactgaagagcagcgagtggctgaaacctctgtgtggctgccagtcagcccctccccggtgactggatcagcgaagaatccagaagcgaggttgcggggctgcagcccttggcatggggagtccgtgggctgggcagcactgcctcagccgctggcctttcctgagcagagtctaggctaagcggctgttggaaatagcagtagcacccggggcgagaccgtgagccacagcggcggccggagtctcccccagcccgagctcaggcctggtaagcaccaggagcccacagtttccagagggagtgaggaggagtccatggcatttaggggcagttttctgggcacagtggccctcagacgag

SEQ ID NO: 1027 - DNA, 6000 bp, Homo sapiens
gtgccagcgaggggccttgaaagttgaggaggtttcaggtaagcagaaaacaggggtaatggcagccaggagccgaaacatgagcaaggctgtccccaagagcaaggccaagaagagttccttctgctgggacgagggatccaggagcttgaggcattgggagcaggcagcagagggcaggtgggcacagtgggcgtgcctttacagggctcccttctcccgccaggcatgggctgcaacgagtgtacgcacccctcctgccagcactcgctgagcatgctgggcatcggccagtgcgtggaatgtgagagcggggtgctggtgctggaccccacctcgggccccaagtggaaggtggcctgcaacaagtgcaacgtggtagcgcactgcttcgagaacgcccaccgcgtgcgggtgtccgccgacacctgcagtgtctgtgaggccgccttgcttgatgtggacttcaacaaggccaagtccccactcccgggcgatgagacgcagcacatgggctgcgtcttttgtgaccccgtcttccaggagctggtggagctgaagcatgcggcctcctgccaccccatgcaccgcggtggaccagggagaaggcagggtcgagggcggggccgggccaggaggccccctgggaagcccaaccccagacggcccaaggacaagatgtcagccctggccgcctactttgtatgatgaccctgtcctccctcacccaggctgcagtgccatgcagacacctcatggcacttcaaactattaaaatgcattttatcttatccagagctggggcccctttgctggtgcagcgatgtcagagcgttaccgtgtccctgggcacctgtggggccctctctccctctccgaaacccaatacgtctcccttcagcctgcatacacgtgcccagagtgctccctgctatccctacaccctggcagtacgggcagggatgccccaaccctgaagccctggggaatagacccagtttgcactcacaccccatctcaatccgtgctgctgatggtagctgtgtgcacaagcagtggccctgatgccttaaggaaggcggccttgacagctgtggctccggcaggagaggagtctagtggagcaggtggggctgggagaccccctccccggatctggcttatgaatccccttggtcttcgctgcagccccctgctcagggccacgctcttgaccccacacttctccgtcccctgctccctgctcccatctctgagaagccctgtacatggtgcccgtgtgcgtctggcagcttcccaggacctgctgcaattcccattctcacaacaagcccttatggtcttagaggcagctgggtgccccatggaacccattcacatgccaggtttagaaaataccctgtaggccagactgccgtgtggtgccaggtgctggtggcagctgccctctgacctcagtgccttcttgtgctcccctccccagccacccgaggagagacacctgtgcgggatccactgtgtgttggaaactccctccacactccgcccgtgcctcattgagtgatgacgggagctcagcaaaacagctttccagactgttcagtgggacctttctttgaggggcaggtcaggaatgtttcggactcagacccgcccccgccccaactcagtagtagattcccaggctgcaccaggacttatatgagagctcctgtaaggaaacccagagcccaccaagcataccccacctggacccccttcctggaggccctcacaggttaacacgggggttccctggaacacagtttggagagctactcgaagctgaatgaaaatacagagacatggggaaccacatagagggtcctgggatgtgtctcagaagcacaggcttcaggaaggagggggtgctctcagagcttctgccccctcccacccactctggtcccattctggggccctagcaaggccacacctgttaggtccccagtgcggggctgtgactctgctcttccacccacagggcccagtggacctggagccttctccgcagaaggtttcaagacctccaggacccttaggttatagggctcattcaggcttggaggagcagagacggttcctaggtcttaaacccagaccacccagtccttccttactatgcttctgcactgcgctttcagccacaggcagggctaatcacaaagtgttcctttattttcctctgcagttgtcccttgtgtgtgaccctccttcaaggcccttggcttccgcagcttgattctgcactccgagtccattcaccttctcccatccaatagcatccaaccccgctgctactgctgccaacctggccttgggagcaatgaggacaaggaagggacaagaccccttttaggccagaactgccttcagatcagccacgctccatgggactgtacctctgccctggaggctggagaggtcagtggctgcagactgtctcaaggagcccctggccctgcccacctagccaggggtgcagccttgccagagaagcagagaagcgtctgtggctgggtgggtgatattgaaagattcctttcaccagggtggaagccaggatctgaggcgtgatggaatgtggacagtgaggcagtgacagcgccacaaggcaggagtcatctccaggcacgtccttggcctggagcccatagggacaagctcctggtggtgcctcactttgccatcctctctaagccgcagaccttgaatggaatcagtgctcaagagtctaattgggcccactctgaggatgcctgcgggaatatcagcttttaccgcaccacactgcactttacagtgtgggagggcctgccccacgcaccacctcacctgtactgcggttctcaaacttcaccctacagccattctgttgtaggtgatctcaggggcagtttgagaaacagtggctcagggtctcacagcagccctctgagataggttggttgctattgtcccgattttttctcatcaagaaactgaggctcaggtgagctaaggaatgtgcccagggccactgtttataagaagtagcctcaagccttgctcatggttactgccctgacagggatctaggaaagagtgagcaggagaatgggatgaggcaggaccctccgccccagccctgctttctctgcccagacacctcctgccttgcagacccaaccccaccccagatggtttcctttccagtcacccagctgctagttctccaggttcctggtctcactccaggttcctcctgttagagaagcatcccagagacattcattcctggcaaggacacaggcctgcggacctgaaggtcaggtgggcagagccacataagatctggtgccccatcctccatttaaaaaattatactttccaacggcattggtataaaggtgaatatattaatatcatatattaaaacattttctttgacataaaggtttctttcttctgcctttaaaataaaatattttggccaggtgtaatggttcacacctataatcccagcacttgggaaggctgaggcaggaggatcacttgagcccaagagttcaagaccagcctgggcaacatagagaccctgtctctacaaattttttttaatcagctgggcgtggtggtgcttgcctgtgttcccagacactaggaaggctgaggcaggaggggagggtcacttgagcccaggagtttgaggctgcagtgagctgtgatcatgccactgcactccagtgtgggcaccagagaaggagcttgtctctaaaaagagagaaaaagaatattttcaagagcctctgtgttggcagaaaaatggcccttcagagatgttcatgtcctatacctgtgcctgtgttagattacatggcagacccggcatagtggctcacgcctgtactgtaatcccagcactttgggaggccgaggcaggcagatcatttgaggtcaggagtttgagaccagcctgaccaacatggtgaaaccccatctctactaaaaatacaaaaaaaattagccgggcatggtggtgcgtgcctgcagtcccagctactcgggaggctgaggcaggaaaatcgcttgaaccagggaggcagaggttgcagtgagtcgaggtcatgccactgcagtacagcctgggtgacagggtgagactccgtgtcaaaaaaaaataataataataataaggggcaaaggggaattaaggttgctaatcaactgatttagagagatgatgctggactatctgggtgggcccaatggcatcaggagggtctttagaagtagcagaaggaagcagaggagggaaccagaggtggcagtgtgagaaaggctcaactggccattgctggcttcgaggctgtaggaaggggccacgagccaaggtatgcagggagcccttaggagctggaaaaggcaggggaacagtttctcccctagaatcctcagaaaggaacgcattctggcgatccctggatcttcgcccactgaggctaagtggacttctgacctccagaacggaaagataacaaaagcctcaacgtttgtggaaacaaacaactcataatgagcctgggactgtgcctccttcccggacggatgagcctgcctgggcagtctgggtttgcatccctgctctgtcacttaccagctattgacggcagaagttgcttaatttctgggcgctgtgacctagggattgctttccccatccagccgcccacccaaagctgcagaagagaagcaagaggctggtgactggggcggctccggagcccaggtggagccgcagttcgcctaccactaaagggccgcagtcaccgtccacgtagccgccagggggcagcagaggtccggccccgccagcctggaggcccgactgcgcctgcgcggcgcccgcggcgcccgcggcggccagggacgggaagtgggcggggccggccggcagcagcttgcgggacacggagccgcgaggagacagctgaggcccgcggagaccaggggtgaggaggccgggggggacgggattagagggctgacggggctgggacgagggtcaggcgagcgcccaaggcgcacaggggtgaaatgggaccgaggaaccggaggggtggaatcagagggctggggaggcaaggaggccgagacgaggctcacatgggtgcaccgaaagggtgcgggggtgcagtgcggggggccgaggagcaagaggggccgctgcggacatgaggaacccgaggctgggagttggggggctggggagccaagggggcagaactggggggcaggcgggggtgtggccgagccgagggcctggtagggaccgagggctatgaggcagaatcgggtgctgagggggacgcgccccattttccgagatttggcctctccccaccccccaggagcctctgggccggcacgttgccccatatccccccagtccctgcaccttcaggggcccagtctgcctgatggcccccggctccgcggcctcccaagcgtccgtgaagcgagcgtcagctgcacaagtgctcgggctgcagctgcttcagccacaggtctgtgagccagagcctcaggcgcggaggccgggcacattgccgctgggttcggtcaggcaagcccctgaacctgtctgtacaacaggaagaactggctccggctgcagggatttcggcacagcgcttgacacacagtgaggcccactgcatggtggcgggctccttcgaagccttccaccctgcgggacagagtcacacatgtcgtggtggcattccccgggacaagttctctgggcccagctgagctctcaccacgggggatagaaagtggggccggccagcactctgaggccatctccagtctcttctgttgtcaaatttcgctcttttcctcctgcacgcgaggtggaaataccaaaggcattgggcatccagagaccttgattgagttcgctttgccctttcacctgtg

SEQ ID NO: 1028 - DNA, 6000 bp, Homo sapiens
ccctcagttagggagaggagacagggtctcaggacaggaccttgaagacaaggaagggcagtgcagagaggggtgagagagccagactgggtttctagggggtggtccagggtgggagctgacctgcctctgctgagactgcgttccaggtgtgagcattgatgtctagcccatgtagctggagaggagtcacagccatgctccccagctccagcccacctccccagaccccagacccagtgtggcctctccccacctcccagagcatgtggtcaagcccctctcctagcccgaatccctccctcatttgctaattaccaggacctacatgtcccagcttcccagggccaggggacagggccccgcccatctggcaggctcaagttggctgcctggctgccgggatccaggcggcgctcacaaggatctgggcttgcacagcctccaaagggctgttgtccattctcttgtatttgttctcatcctctcctttcttggaccctctgagtctctggttccctcttgttgggacccagatcactctgtgcctcagctgaatcatttttcccttcagtttacacatatccacctagggtccactacatccagaggcttccgcctcagtccttgtcctcaggctgtgcccagggttgtgaggatggcggtggtccttaccttgcaaaacagtctcccagtgacaacaatgttcagggataacatctatggagggctttctatgtatcaggaccattctgagtatcttccaagtgttagctcctttaatcctggaaaggaccccatgaaattagtacttttattacccctgttgtacatatgagagactgagtaaaagccggtggcttgtccagggtcacacagctaactggaatggccaggagtagacctggtgaccatggaccccagaccttgatcactgcacacgctgcgtctgggacctcgcctggtacctgaggtccgtggcgcgctggtgctgatcattcagagtgctcatgggaagtgtagtctagagtctgtgtgcttcctgatctccttgatctccattttattgaggaggcctttaggccacccgaggggtccagagtgaccctgtggattagcagtggagctcagcttgagccagcgctcttcaggggtcgtgttctgcccccattctctggttcattctgcaggtagcagggaatcattgaagattagagagaatcaaacacctggagagagatgactctgcccggggagcccaggctcctgtctgggtgcacactccagggctagatggtgacttctcagctactctagcttcataggctcatagtgcatgtgagcactcatgtggacacacgtgcacgcgcacacacatggacacacacacacacacacacaccgctgtctttggaatcagaccatgaaaatgcttcctcagaggcctaggggtgaggaagctgaggtgagttgtgcctccagctggatgtgctgggatggggtgggagatgaggtggccacacctgggtggcaggaactctggggcagtgaaccttctaacgaacagatctgggatgctgccatgaggaggaagagggagtcagcagccatgcctgccaatgcctcctagcgcatttgtccatggttagcggataattattgtgtccctatgggtcccaaggtgtattattttttttttgctcttataataaatcaacacaaatttttagcagcttcaaacaacacgcatttattatctcacagtttctgtgggtcagtagtccggcgtgacatgactaggtcttctgtgtaaggactcgcatggccaaagtcaaggtatctgaagggacaagggaaaaatccacttccaagttcaatctggttgtgagcagaattcagttccttgtggttgtaccatgaggtctctggtccccttcatcttcaaagccggtaatggacatcgagtgtttctcttgcttggaatctggcactctagctggagaaaattatctgcttttaagagttcatgtgattagattgggtgtacccagatgctccatgctaatctccctattatgcacagatgcataatcctaattgcatctgtgaagtgctttttgccaggtaacatggcatacttgtaggttccagggattagtgcttgtcctccccctgctattctttagtgggcagggggtcatctgcctaccacggaggtaaggggtcaggaggtatgcatacagcaatgcccaaaaagagactgtccccactgggatggagtttaccgcctagacatgcagtcttaactcagaaatatggagatagcctcgaaggacaggacaggtactgggcacgtgtgggaatggaccaagccaggtgctccgggggctttcccaaggaactaaggctgagccaagaactgaaggatgagttggagtcagatgagggaaaatgtgggcaaactggatttcagaaccaacccccaaccctggagccaggagccatggtactgaaggacagtgcgccataactcagagaaccagggagggttggcggaggctcacagggaccgggttaccccagggccttgtgacagtactacccctagtatcagaggagactgtcattggcatttaggccacttggtgctcataacacctctatgtcaggtgaacactattgtcatccccaaattacagatggggaaagtgagccaaatgtccatgctagtaagaggcaaatcatatcacttctttgggtacccttctagaaggatgaggctgactgccactggaaacagctggggagggtacaaggagatgacaagtggctcagaggctgtcctggctataagaattaaagaggaaagaaacaccaagggtggctcgacagtcaacaaggacaggtttattttggaaaacaaacttgagaggggcttctggccaagttaggtcagagccacactctcttacaaactaaggatatttaagggttttggagggggttcttatcataggttctgaatgtttctgtgtgagggaaagtttattgcggggatggaatgtctctggtcagaagggaggctgtctccgggttggcatgtttctggtcagagaagggtttatcttagggttggaatgtttctggttatgctgacattagctattaggctgatattttcgggctggatttaggcggcttttaattaagggggaacttagaatggtggtgtttgttcaagatggcaatgctcctgctccgtcactggccaggtaaggcaaccctttgttatggtaacaacctgagattggcaggggctcacctccaggggcagctcatgtgcttgctggcgaggctgcaccttgtcattcaggttcacagggcacaggtcaaccaggccctggctcttcagtcttctgcctggagtgacttatgtaattctgctcagctttcatagggcacagggagtcggggctaactctgctgcctggggctggaaacagactcctcccttgaggagcagcagtccaccatagggaagtcacagtggtccaggccaaaggggatgcaggtagtgtagactaggcggtagttcagggaatggagagaagtgggaataaagggatagtgaaaggaagcatattttactggcaggtgatgaggtgtaggaggacaagtcatacatttggactttacagagcagtggacactcagtcagctgctgtcagcgcctgggacttaggggagtgcccctggctggagacatggtatggagtgccatcagttagggagccctgggcacaggtaagagaaggtgtgacaccaggagggaaagagtctggggcccagctgcaggaaccaatacccataggctatttgtataaatgggccatggggcctcccagctggaggctggctggtgccacgagggtcccacaggcatgggtgtccttcctatatcacatggccttcactgagactggtatatggattgcacctatcagagaccaaggacaggacctccctggaaatctctgaggacctggcctgtgatccagttgctgccttgtcctcttcctgctatgtcatggcttatcttctttcacccattcattcattcattcattcagcagtattagtcaatgtctcttgtatgcctggcacctgctagatggtccccgagtttaccattagtggaaaagacatttaagaaattcaccaagggctctatgagaggccatacacggtggacctgactagggtgtggcttccctgaggagctgaagttgcccagaggcccagagaaggggagctgagcacgtttgaaccactgaacctgctctggacctcgcctccttcccttcggtgcctcccagcatcctatcctctttaaagagcaggggttcagggaagttccctggatggtgattcgcaggggcagctcccctctcacctgccgcgatgactaccccgccccatctcaaacacacaagctcacgcatgcgggactggagcccttgaggacatgtggcccaaagacaggaggtacaggggctcagtgcgtgcagtggaatgaactgggcttcatctctggaagggtaaggggccatcttccgggttcaccgccgcatccccacccccggcacagcgcctcctggcgactaacatcggtgacttagtgaaaggactaagaaagacccgaggcgaggccggaacaggccgatttctagccgccaagtggagaacaggttggagcggtgcgccgggcttagcggcggttgctggaggaacgggcggagtcgcccagggtcctgccctgcgggggtcgagccgaggcaggcggtgacttccccactcggggcggagccgcagcctcgcgggggcggggcctggcgccggcggtggcgtcacaaaaggcgggaccacagtggtgtccgagaagtcaggcacgtagctcagcggcggccgcggcgcgtgcgtctgtgcctctgcgcgggtctcctggtccttctgccatcatgccgatgttcatcgtaaacaccaacgtgccccgcgcctccgtgccggacgggttcctctccgagctcacccagcagctggcgcaggccaccggcaagcccccccaggtttgccgggaggggacaggaagaggggggtgcccaccggacgaggggttccgcgctgggagctggggaggcgactcctgaacggagctggggggcggggcggggggaggacggtggctcgggcccgaagtggacgttcggggcccgacgaggtcgctggggcgggctgaccgcgccctttcctcgcagtacatcgcggtgcacgtggtcccggaccagctcatggccttcggcggctccagcgagccgtgcgcgctctgcagcctgcacagcatcggcaagatcggcggcgcgcagaaccgctcctacagcaagctgctgtgcggcctgctggccgagcgcctgcgcatcagcccggacaggtacgcggagtcgcggaggggcgggggaggggcggcggcgcgcggccaggcccgggactgagccacccgctgagtccggcctcctccccccgcagggtctacatcaactattacgacatgaacgcggccaatgtgggctggaacaactccaccttcgcctaagagccgcagggacccacgctgtctgcgctggctccacccgggaacccgccgcacgctgtgttctaggcccgcccaccccaaccttctggtggggagaaataaacggtttagagactaggagtgcctcggggttccttggcttgcgggaggaattggtgcagagccgggatattggggagcgaggtcgggaacggtgttgggggcgggggtcagggccgggttgctctcctccgaacctgctgttcgggagcccttttgtccagcctgtccctcctacgctcctaacagaggagccccagtgtctttccattctatggcgtacgaagggatgaggagaagttggcactctg

SEQ ID NO: 1029 - DNA, 6000 bp, Homo sapiens
gaaatgtattttctattgctctcccacaactcccaccacatcttctccatctgcatgaaatcatattctctgtatggtatctgtaaagtcatatcttattctgagaaatgtccatttctgcatcaatactcatcgcatgtattctaaatatactttgtcttgtttgtcttgtatataggttattgtagttacttgacctgtgccgaaatgttaaatgtgtgtaagttcatgtccttcattctggctttttattcactaatagtcatcagcatccttactgtcaatacaagagatgctccttctcaatattttgatatggtagtacaaggattccaaaggaggaaccttcttttttagcagctgtgttttttgttttggttggcaattcactaaggactcatctcatcatgttatgagggagacattcttggaagcatggctccttttccgactcttctcagcacacagctgtcacccatgctttgctgtgagatggggtgccctacagatggatggggtttacaggcttaaggttactgatgtcttttcataagacattattgccttgtttgtttgttcttcagaaaacaaattctagggagccggggttaatctgttccatagtctgaatgtgttactgaaacaccaggggttttgtctgggtcccattgcatgctgcacagccaatcactgccgggaggaagggctttattcaggtgctgcagccaaggagaatgggagataagtcttgaatccatctccctgaccggccaaaattggagggttatataacagtggaagggatgtagctatgtttgggaaggagttagggaggggtaagaacgcagccatgatgaacgagggatccagtgtctccctgtctggatgcagtgatctagtgaatttgagaaaggattaccctgtggagggaggcaacaggagggagccttctctctggagcccctgggcatgctttgaatttgagccatataaatctattacctattaaactgagaagagaactaggtacgcaagaagccaagtcactggggcggtggggacgatacttctcatttgtagcctttcaatttggtgctctgtctggctgttttgagagctaaactgtaagttgagaccccatagtcaccagatgaggcctgaggttccaggactgaagggacagagtcggtttctgaaactgacaatctctgtttcttttacatgggcttcaaacatagaaatgaagtggcttggcctcactcgccaggaggggaaatctgggcagttggctggtgggttgacattgtccctcacaccagtcctgtaaattactcaggaaggcccaggcctggagaactaagacttggctttcactgcttagcctggaaaggaactgagatggccaaagagggctttatagaaacagtgtcagtggcccagaaatcctggaaatctcccaagctccaaggatcagttgatctctgtgtgtgtctcctgcacatagagagctccactcagttctgtggtctttgggctggtggccccaggggcccctcccttggcacttgtccaggtaactgaaaaaccactctgatatgagggttggccctgcattaattttatctactgcattagaggcagtagggttgtctcattgcctgccctgccagctcctgtgagtggtagagccagcccttcagtgtggggctggtgggggagcagttcccagtgaaggcatttgagttgcatcccagcaggataccactcgtttgccctgctgcacagactggcctcactggcctcctagcacttcccggctccatctggagacttctaagtagatacctaaccacacttcctcattgtctctgtccctgcctccctatccactgccatcaaggctggcacatcaggaacaatagtgccctccgaggaaggggtgagggagagatttcacaatttatcaagacctgagtgcaggcacaggccacctgctgtctcctcccttcccatggcattccttggattaaccgtgcctctgaggatgtgagatgtccctgtcatgcctccgtgattgagtatgtgggaaggacttctgatgaatcccttcatttcacagatgggaaaaactgaggccagtagaaggagcagagtgggagcctgatcctgatcttgctggaatcgggctcccagaagggagtggggtctggaggctggcggtggggggtggtggggagggagtctctgcaacaaagcaaaattcctggaggggatgaggtgggacacatgcagggtgggaagtcttgggaaaagcctacattgctgggctgtccagaatggacaagtaccgaggggcccctggtgccaccagcccaacggatcacagaactgggtggagctatgtccagaaatggaaacctcagctaacaggacctgggctgaagcaaaggggcctgtgggtgttgaccaggtggcctcagggaaggtatcccagaagaatggtgtgtgtgaggcttatagtggacagatgggggacaggccttgaacctacaaaatgaggttcaaggcctgccaggctgtctgtctgttgcaaacagtggccctgaggagagtgagggtcaccctgtaggccgggggtctttctcagcagatgacatagtaccaccagagtgatggagaacaggcagatggaccccacacctgtctgtcctgtacctcagagtttgtggcgttacttggaaatgcatttccaaggctgaccctgcaggtcctggggcagtcaaacaggggtttgaggaagagacccaccacctggtgggcagtggagcctgtgctttggaggaaatggagctggccatgggatgggggtcaatgggggcaggtgtggcttgaaggtgggatgtagcagctgacctccccagcaggcaggccggttattagtcccaggggacttaggaacactttgggcagggcaagcggataggtccctgacccacagacaccccctttgttcctggagtccaaggacccatgaccttgtggatgcccccagggggccacagaacctcagacactcacctgcttttggaggacagctctcaccaaccctcctgccctcacacagcaggtgcccagcctgccctgcccatctcctcggccctcagagtctaacttgctcatgtgaggccacagggcccttgcagggggcatggcattgagtgtatgaccatgccctggatcctggggtcagtgtcctcatctgtgaaatgagggagttgcattagatgctcatggggcactgcgcccctgctctccctatctgtgacacagccgagagcaaagaccgctgaggcggggtgggagccagggggccagccagggcttggtggggtgtggggcccgaggcagaaagagtttgttgtggggggaactgggggtcctgggcaaagctcagcctcaggccttgggaggctggggctgggggcacccaggagctgaggggatgtgataaaggccagggccgaggagggtgcctgttacaccacaggtactcagatccaagaaggaaacctcaagcctgaaagccaggctgagaggagtgggaccttcccgctacagctggagccatcccatgccccccatgtctcccccagctgggaggtagacgaggggctccaccgccctctcactgagttaacaatgagactgaggccctcggctggcagggagtaagctgaggagggccttgctttagagaccttcatggaaggggtgccccatcccaagatgggtgccacccttccagactccctggagcttctattctccttcctcttcctaatcttcaccccacccagccccattgctcttctggaaggagagctcgctgtccagtactgcgcgggatgaccgagtgaacaggggactggagacgagatgtggctggagactgagagaagcagaggagtcacactccactcacctccacctcccaaagtgccgggatcacaggcttgtgccactgcgcccaaacataactgaaggttttacagacatgtctgtggcaccacagaacacgaacggtcccaatggaaaccccacgcccaatttcctcagggaactgctgtggcggaggcttggtgggtgtctgaggggagcagaacccaaggcgtggggttcgggggtggacggggcggtatgaccaagaactctgcacctcccccacccacccgcctgaaaactctcctgaagtcacctaacaaagtggatggcagtgagtggctctgggtgggatctttctgtcctctggctaccctctgcccaacaagaaggctggggaaggtggggctgagagaaaggtctaggcctagaagacctcggactcctcccaactccaactcctcctccccctcttccgtggtcggctcacctccagcaccccacgtggtggccctaggtacaacggattccggcgggcagagcgccttagatcccgagtctgcagcccagggcagagtgccaacttctcctcatcccttcgtacgccatagaatggaaagacactggggctcctctgttaggagcgtaggagggacaggctggacaaaagggctcccgaacagcaggttcggaggagagcaacccggccctgacccccgcccccaacaccgttcccgacctcgctccccaatatcccggctctgcaccaattcctcccgcaagccaaggaaccccgaggcactcctagtctctaaaccgtttatttctccccaccagaaggttggggtgggcgggcctagaacacagcgtgcggcgggttcccgggtggagccagcgcagacagcgtgggtccctgcggctcttaggcgaaggtggagttgttccagcccacattggccgcgttcatgtcgtaatagttgatgtagaccctgcggggggaggaggccggactcagcgggtggctcagtcccgggcctggccgcgcgccgccgcccctcccccgcccctccgcgactccgcgtacctgtccgggctgatgcgcaggcgctcggccagcaggccgcacagcagcttgctgtaggagcggttctgcgcgccgccgatcttgccgatgctgtgcaggctgcagagcgcgcacggctcgctggagccgccgaaggccatgagctggtccgggaccacgtgcaccgcgatgtactgcgaggaaagggcgcggtcagcccgccccagcgacctcgtcgggccccgaacgtccacttcgggcccgagccaccgtcctccccccgccccgccccccagctccgttcaggagtcgcctccccagctcccagcgcggaacccctcgtccggtgggcacccccctcttcctgtcccctcccggcaaacctgggggggcttgccggtggcctgcgccagctgctgggtgagctcggagaggaacccgtccggcacggaggcgcggggcacgttggtgtttacgatgaacatcggcatgatggcagaaggaccaggagacccgcgcagaggcacagacgcacgcgccgcggccgccgctgagctacgtgcctgacttctcggacaccactgtggtcccgccttttgtgacgccaccgccggcgccaggccccgcccccgcgaggctgcggctccgccccgagtggggaagtcaccgcctgcctcggctcgacccccgcagggcaggaccctgggcgactccgcccgttcctccagcaaccgccgctaagcccggcgcaccgctccaacctgttctccacttggcggctagaaatcggcctgttccggcctcgcctcgggtctttcttagtcctttcactaagtcaccgatgttagtcgccaggaggcgctgtgccgggggtggggatgcggcggtgaacccggaagatggccccttacccttccagagatgaagcccagttcattccactgcacgcactgagcccctgtacctcctgtctttgggccacatgtcctcaagggctc

SEQ ID NO: 1030 - DNA, 6000 bp, Homo sapiens
ccctccttctggttaagaagagttcagtcctgtttaagctgaatcctcgtgggcatggggtagtgtggctgcctggtaaaaggcagctatggggtgctctggggccaagggagggtcccgtcaagggtgggtgcagatgtgggatcttgtgtcctggcccccagcacttttatctcacgtgaaacaccctaaggatgccccctgaaagggtgggaggcctgagaccatgggcccagccaaccttccctgggacggctctttgcagtcatctcttccataagggagtccctcaggttaaaagaaaaatgtcatatgtttataaatctcgctgtcaaaaacaccacaccagcaggtccatctgccttgttcatctagagcgagagggcaaggcagctctcagccaaggcaggcggctttagaggctggaccggggaggctcctgcacttcctcgtgatggtgtgggtagccgccactcacaggacagaagtgtggaaacccggcgtgttctcaggttctttaggcctctcacgcttctaccttgccgagcccaactttccgggagaaaacatagcgtccaaatccaaagccaaaacttctacacccagagacgcttttattaagtgaactgagtgccgcagcctcacatgggacacacagaccatcgggattttcagaaagggcggagagcccacaggccagtccaagccccaaacagtcctagatctggggccctccagggtcacctccccatccccgtgcccccagcctaacttgtagcagctggaggtgctgtgaagaagtgtttacgcccatgttcactcattagagtcttcatgccacaggtgcatctaaatccctagaaatgtgcattttttagggtggcctctgttcacctgtacagggaaaaataagttaaatattcccccattcctggatattttacaacacgtgtaaagttccaatatataaaaaaagcaggcctttttcccaccctcaaaagcttctatagtcaagattcttgcattgaacaggcaggttttcgttttctgcatcaagtcaccaagggcgccctcctgatcctgcgtgctcagccacacgtcctgtgctcgtcacccatgggaagggaaggatctctcaggccggccccttgggtcactccccgagccttcagcagcagcagtgtgtcactttttgaggccttctgtctcgtgttaaaggctgtgagacactggagtgaggtgggggtgggtccacggtttcccaagtttattttcctagaacatcagttcaccggtcacaggtcactggcgttcagcagagcacagttacagagcagagtcttggatgatttcagactgttgcccatggtgaaggccgtcagagtgttggttctgggagcccccgacagagagaaattctcctaggccagtgcctggggctgagaagggctctcagaagggtcccccaaggagtggtttaagaagagaggcaggcgcggggaggagggaggaagttcctccgcccagactggatgaaacccttcccatcctgcagagccgtgagcagggaggcaccttgcctgtggctctggggcaggggtggatggcctggggacgatgctgatgcccagggaggaagcattcttggccaggctttaaaaatgtgtaattaggcctagaaaatatttcaaggccccatccaactccaagagcccatgttgctatggcagagcccattggcacagcctggaggtgacctgcagttctaaccaagcgtcttccttgtctgtcaggacattaatgaaatggtacggactgaacgacccgactggcagaacgtgatgctgtatgtgacggcgatctacaagtactttgagacctgagcatgccgggaggagccgccccaatagcgggggtacccctccacagcgaccgagcgacaccgacgccattagctacgcacccctgtaaagcttccagcaactctgggctgccccacagcgtgtgagcctccagctcggggcttccgtattggaagaactcagccgtgtggcccacagctcccaccagggcccctcccacatgacccgtccattcaggtcatgtgggctcagcacacatcctgcaggccggtggctgctggagttttccttctgaagagaatattgaactacactagtgctccagggcaccaaacaaaaagggctcatgcacagctgaatttgggaaaagggattcagttctgtgggaaactcactagggttgatgaaggctcggccgcggcacttcctgactattggctggggtgggttccggtgctggtgagaacccagaaggagagtcagcgcctggcagttcccagcgccctgggcccttcaccgtcctagtttggaggagcatgttcaccacagacgtgggtcagctgccccacacctgacggggctgtcccggccgacacaatccaggcgtgttcagcctgagctaggagagtatctagagggcgtggtgcgggcacgccagggctggggtgctgctgctgcactcacgcggctgggctttctggcgggaagcagttacgggggccccttgcctggactcagcgacctgtcttccagcctggaaggggtttggagtcccagctctggctttagatttcttcatcataaggagtttttctagttaacatttttgttttgttacgagcaatgctggaaaaggtcgctcctgttctgttagtaccaaagttacattgtttcaataagcatagaaatctaaacaacatctgtacattagcatggtgagagcaaggaataaagcaggaaataggagaaaagtaaacaactttagggagcccaggcagtgtcatttaaactcactgagtcactaagacataattctcctaggccagagttaaagaaagtgccttaactcttcttgtgagggcagccactgccctccgtggccaaggcaggacctccaagactcagtggttgagttgtctcctaccaccatgcccgccctccccaggtactgggtccatgccccctgtgcccaccctccccaggtgctgggtccatgctgtttgaaccaaagccttatttaaaggtggtcactggagatgctctcaggccagaactcaacagctatttttgggaatagggatctcccgtgtgcctaacgcagtagctattggtttgaacaatgtccagacaagacctgtacctttgagaatataactgtgtttggcacctgcatagcaccatgaggaagaccagccaccagtggaagcggggtcactgccccacagactggatgcaatgaggggctcacaggaggcccagccagcccgattgtgggctgaggggtctgcattcaagcacgatgttctagaataggagtttaacgtgtctacgtaacctagaatgtggttattaggaaaggggctgtgcatgtgggtgcagctggcggcacacctggtcaccagatggccagaagctgcccatcagccctgcccagatgtcagcctgggagctcaggctgctgccgctggctggatgccctttggtgaaatgcctgttttcagctaagaaaggagaggccaggcaagcaaagtcatgccacaaagcatatcagagacccccgcagactcctggccccgtcccgccccctgtctgagttgtgtttttgttgctgttcctctgttgatggccagctctgctgttggcatgagccactgatgttcatgtgagaattactgtttttaagtgtctctccacttaggtgtcctcagttcccacttttgctctcatttgccttcacagaggccactccacctgtccggatccagctgtctggtcatggtttggtttatttattttgtccttcaggggctgttttgccctaagaatgagggggcttcccctggtctgcagttcccaactttatcccttgctggccatgcgagcccagccctggtgcctcatgggatgggggggtaggggtccccaggatcttctggaggaaggtggccatggatggatgggctgtatctgtgttttccctctgggagtctcatgggtccagcatcaggcctgaggtcagcaacagggaaagagggtgggcacggggagggcttggccccgcctatctagaggcttgcctcgggcccctccttggggaaggtttgcgtgcagagctgcaagggagagggttccagaagcattgccttttgcctcgtctaataggatccttaggacactgtgggctttaggaatgactatagatgctcacacgtgtttaaagtgacatttggagatgctctcagtcctgtggcatctggcacgaagtctccaagaagccactttgcctcttctcccttcaagcacaagctttactgcaaaagggccagtcgcgtttctatttctctcgatcccaggcttctgcggaccgacgatacgtttaaatgttgttctagtaaatattcttgaatgtattaaaatggctgaaacaacaagcttgggcttttctagcttgccctccactccctgccgtccctctgacgtcgcataaaccagaacccagctccctcctgggactggctgtggagagaagggcacctctgagccagcctgtggccctaccccaaggcgcacttcctcatgtgggcagatcctgaccaggagtccagggtggcctcccctgggccacagcacatcaccgtgtggcctggggctgtgggacagtgagccctgtaaccactagggttctgtgacagatgccaagaccccagagaccgtggcagagctacccccaggagagcggaagcccctacacagcccagacacatgccttccctgggggctggggagtgtgtctcgaggggttttgtttgttttgaggcatgtatcatcttggaaataattgtcaggatgtataaaatagagaaaaagaaaaaaggtatcctacccagaggcaaccagataaacttttttgcctgtgcattgttttttgttggttttttcgagacggggtcgatcacggctcaccacagccttaacctccagggctccagcaatcctcccacctcagcctcctgagtagctgggaccacaggtgtgtgccaccatctccagcagtttgtttatttattttttctttttttttttttggtagaaatgggcttttcgccatgttgcccaagctggtcttgcacttctgggctgaagcaatcctctcgccttggcctcccagagccttgggattacaggtgtgagtcactacagtgattgtgaatgcactgagctggcctggagaacacttaccaccttgtccacgtcacatgcaaaaggcccatggtggtggtgcttcctgcacacgagggcatgtagtgaatgcccttcccaggtggagactcctcagggttgggagcccagcaactgccttggccctgagtaagccaggagttgcactgtgacctgcaagtgcttgggagctgcacccctgggtgccaacagctgcaggtaccctggggtgggcagtgggcaacagctgtagagctgggagctgggcgtgaaaggactggggcaggactgggcttggactcagctcctccctgctcagcagccccttcgttgtgtcctctgctgtgcggaaggggttctgccctagtggtcagcaagcatccatggagcctgccgggcgggccctgtgtgcagcggcctccacacgtcagcaggggactgccgtccctgccagcgcacctgggccttgtcctgggcagcacagaccccttagccaccactcccaggtggggcggtcactcccagatcctccatccgtcccgcctgcagtgcagctgccttggatgctgattagggtggccctgaggggatccttctgtcccaagttacgggcctgcggggcccgtccacagtgctgtgcccctcaatttggagctggctctgctgcttcccagggcagcacctatggggagggcatcgt

SEQ ID NO: 1031 - DNA, 6000 bp, Homo sapiens
cctgcctggccagctctatggccccagccccacggggccggcacttcgtgcaacctcggggtagcctgggttctattttaggttgtcccttaggtgagggaccggggcagacagaaccagtctcaacatgctcgcagccacttccccgtacatcaggtgagtgaggacagactcctgggttgctgagattcggggatctggattctggcaggagctttgaccccaacaggtctggaccttactgggcatctacaggagctgggccgggcacaagagaggactccatctctcctgcctgacaggagaggactccacctgaccagccctctcaggctgggagtgcctcggggagcctgctgtgaggcagggggaggggtgcggagagaccgggcacagcttgccagttgactgcaccaggcccagagcaggtgctgaaaggtctggtcttttgtctgcaccctcccgtgtttgtgaggaaggggtggcagggggtctgcagtcttaagggccaagcagaaaagaagggccaaggcaggcacccaccaggcaggaagcaggtgtgccctgaggggaaggacaggccatcgcagggctgggttgcacccaagacttctgccaggaagagcactgaggagtcgggacacacaggtcctccccaggtcagccaccgacacttgggatgtgctgggcttgtttccacctctgcaaagcagggcccccttctgggccctcatatcaggcactctgacatggggtacagtcctggcaggtcatggggctggggccacagggagagcgggcaggtggcttagagccatcggggtgatgagtggcaagccccggcatgagggctgcagaggactgtcactgcccacgctggagccagggctccactcccctcagggcctgctttcacatctacgccgatcatccccaaggccgggttgctagcgggttgctgtttgtcctgacacccagaagcagatatggggtgaacatcttgagtggggtggggtgagttggaggatgatgaccagtgactcggagatcacttcctccgtatgtttcttctgcctttgcaggacctctgttaggataaactggagccttgtgaggtccctgccccattggagaagttggggagcacccagggtgacccagttggtttccagggacccttcccctgctcactggctgcttgtcctgggcctggcatgtcttgctcctgatgcagctcagctggcctcagagcaaacaatgagggccagaggccaccaggtgcatcctgggcaggaacaaagggccggaatcctggagctggggaggcccagctggccccgccgccgccgggcctgaggatctggagcctggatggaaggaagggtgggcgcccacagccttttcaaagcctgcctggggctgggcagggaaaccaacgcctggagccagaagctggggcctgccaggggcctccccgtgcccaccaaagggcagtggttgcaattggagagcttctgcccctcagccttgttgctcccttgggcctgggggtgggggaggcgggcagcccaggcacctgcacagggacctcccccagccccacagccttggtatctgaggacagcactcagctgaggtgggtacggggctggcaagggggcagcaaggccaagactgaggaggtggccttaaggcacgtggtgccgagaacacaggcccctccctggagaagacaagctggcttgtggggcaggcagtttggggacagccctgccaggtgccgttccccatccctgaactggacagcttggcctgtgccgtctctgggcaatggcagcgctggagacctgggccaaagcacctgacagatgacacaggaccgcggggctctctgcctctgaagggccagggaggagcccagtaggggaagggtgggggcctggcctgagccggcccatcacagcctccttggcactggctcctcatgggtggctgtggggactgtggagctggctctggggctggagccactccaggccctgcctgaccaccccctggcctcaggacacagttccaccggcgccactgctgaggaatggaggaactgccccttgagccctagaggtgaatgttaagggctttggcactgtgaccctgaggaccagctttggaacaaagccatcactccctgcgtgaggacgttgcggctgcaaccctcctgctgtgggactggggtgcacatggctagaccatgcatgggaaggtccacgcaggaaggttgcgggccccaggatgggaatggcagaggagtcattggggtccacactgggggacgagacagaccctcagaatcggctgagggctggtttctgcctcgtgagccccctgagcccctcaggaagactcaggacgctccgtgcatgtttgctgagtaagggcttgaatgaatctgggtccagcaggtgtgggcgggaggggtttgtccccactagaggagaggttttacctcgtggagagccccagaagcaaggatgggggggccaaggatggggccaagggagggccccatggccgtcagcatccctcacccctaccttgtggtttgacttaacctccaggagggggcagggcagacacaagatactcattttacaggtgaggatatgggtcctggaaggtctgcagggaagcccctgccgctggtcccagggcggtgtccccacctggagggggagctcctccactgaggaaagccagggccatgggagaaggcgagctcctttgaatagagggtcagcaaaggccaggatgacagagaggggggcaccagggccaggtctccttggaaagacctggggacagcgccccaagagtctcatgtgggtctcgcccttcggagtttaactcaagctgtctaggtccccacacatcccagggtttcctcctccaccttggacattagggaacacaaggaccaggagagccgggctagttgaatgggaacgggggcccaggcttcgatcccaggaataagccagggaggctgccagatgctcaaggctgcatctgggtaagcaatggtcactgccatgggccccatgcttctcctaacacactggccaggtgcctgtgtgcccatttcccacccaccctctcctccctgcagtgagtggtagctgctgtgatagaggtcatgcccccattctgccttcagccttagggtccagcctggccctgggcaagcccctccaccctgggcctctagccaggaccccactggtccccagaggttctagaatgcaaggattcccaaaagcctttggccaccaatgccccggctgtctgacatagcctgtcctgtcgtgaacagttgggattagtccacatccctccagatgcaagggtagaaggcgggtccccttggacagcttggagggctggacatgaagttgttcccagttggaagtctccagaaaataggcgagtggggcggggggatggggggggaattcccagcctcaggctctaaaattcccagttagtctgtggtgcagacaggactccctgcctccttgttcagggaagtaggggaggatcaaggccacactgggcaccaggagctggaagaacaagagggtctctggcccagagtctgggatggggagaggcagagggggcattggaaattggggacacatctttgaactgagataacagctgttgccaagaccagcacctgggccaggctaaggaagggcagggctaaaggtgggggagctaagggtcaggcagggccttgaacgccgtgttcaggaggctggcctttatccctcaggacctggggagccatggaaagatctgaggagcaggcattgggcacagctggacactggggaacgggtgacacaggggcatggatccagcccaactctgataaggaacagcagagttccacaggaccatagtggcagaggcagcagtgaggacttcttttttatttatttgtttgtttgagacagagtctagctctgtcccccaggctgcagtgcagtggcgtgatctcagctcactgcaacctccgcctcccgggttcaagcgattctcctgcctcagcctcccgagtagctgggactacaggcgcatgccaccacgcccggctaaattttgtacttttttagtagagacagggttttaccttgttagccaggatggtctcaatctcctgacctcgtggtccgcccacctccgcctcccaaagtgctgggattacaggcgtgagccaccgcgcccggccggcaatgggggcttcttaaaaaagagggaggctgggcccggtggttcacgcctgtaatcccagcactttgggaggccgaggcgggcggatcacgaggtcaggagttcgagaccagcctgaccaacatggtgaaacaccgtctctactaaaaaatacaaaagttagccgggcgtggtggcgggcgcctgtaatcccagctactcgggaggctgaggcaggagaatcgcttgaacccgggaggtggaggttgcagtgagccgagatcgcgccactgcactccagcctgggcgaaagaccaagagtccgtctcaaaaaaagaaaagagggagtgtgggggtggggcccggagcgctccaaggggcggggaaggggactcccaggcccgaggactcctggaagggaggtgagtgtggcgctgaggaagcggcgggacggatgcgagcccgggaggagcgcgctggggggccgcaggcgggggatgtggcgcggtccaggcccgtcgcggcctcgtcctgacagggacacctgcgggatcgtccttccaggatcgcctgcgggcctcgcgggccgatgcctcgggtccccctccggcctcggtttctccgcgcagcggggcggggcgggggcagcgcgggtctcaaagctgcctgcagggggcgcccgtgagcggcgcggccggagccggagacccagcggccgccgagacagcgggagccggcgtgcgagcggcaggtcagccggggtgctaggtctggcgtgcggggtcctgggtgccgggtccggggtgcggggtgccgggggtccggggctggtggccgggcggcgtggggccgtcgggggtgcggggccgggaggactgggaggctggggttctgctcccctcagggttcctttcccgccgccccgagaccagttccccggcgcggggtccgagtcctgccccgcggcggctgccggcactgcctgtgaagggcccaggcacagtcacgtcccaggcgcagttgcggcgccgcgtgcgggaccctccgagctgtcccaaactgcaccggaaggcgcgcaggggtaggcggggagggaaggcaagtgcggcggccggcgcggcgcggggtgcggagccgcaggtagcgggcggggagcgtccgtccgtcagtccgtccgtccgtccatgcgccgcagaccggccccgcgcgctcgcatgaaccttcgcgagctcctccagcagggatggaccgggggcgcagaggcgcttcctgaggggtggcgggccgggccccggggcgagggagattccccaggtggaggagccgggcggagaccggttccccgggaaggtgaggcgcgggcagagatacccgagcgcccgggacgcgccgagaaagggggaatcaggaacgctgggccgagcgctggcgtcttccgtggacagtggtggcgggaactgggtttgggggacccaggagacgacgggggacggatgggggtgggtgcgcgcctcggactggccccggccgtctgtctggctgcccggagcggaggtaggaatggcgggaatggtggcggctctcgagggatttggcgcaaggcggcccaagggcttgaggaggaggccgcgggccggcagagctgaggtccctgtgtcccgcactcagactttagttgccccgactgtaccatgggaggaagagggagacccagggctgggtcct

SEQ ID NO: 1032 - DNA, 6000 bp, Homo sapiens
ctaaggaagggcagggctaaaggtgggggagctaagggtcaggcagggccttgaacgccgtgttcaggaggctggcctttatccctcaggacctggggagccatggaaagatctgaggagcaggcattgggcacagctggacactggggaacgggtgacacaggggcatggatccagcccaactctgataaggaacagcagagttccacaggaccatagtggcagaggcagcagtgaggacttcttttttatttatttgtttgtttgagacagagtctagctctgtcccccaggctgcagtgcagtggcgtgatctcagctcactgcaacctccgcctcccgggttcaagcgattctcctgcctcagcctcccgagtagctgggactacaggcgcatgccaccacgcccggctaaattttgtacttttttagtagagacagggttttaccttgttagccaggatggtctcaatctcctgacctcgtggtccgcccacctccgcctcccaaagtgctgggattacaggcgtgagccaccgcgcccggccggcaatgggggcttcttaaaaaagagggaggctgggcccggtggttcacgcctgtaatcccagcactttgggaggccgaggcgggcggatcacgaggtcaggagttcgagaccagcctgaccaacatggtgaaacaccgtctctactaaaaaatacaaaagttagccgggcgtggtggcgggcgcctgtaatcccagctactcgggaggctgaggcaggagaatcgcttgaacccgggaggtggaggttgcagtgagccgagatcgcgccactgcactccagcctgggcgaaagaccaagagtccgtctcaaaaaaagaaaagagggagtgtgggggtggggcccggagcgctccaaggggcggggaaggggactcccaggcccgaggactcctggaagggaggtgagtgtggcgctgaggaagcggcgggacggatgcgagcccgggaggagcgcgctggggggccgcaggcgggggatgtggcgcggtccaggcccgtcgcggcctcgtcctgacagggacacctgcgggatcgtccttccaggatcgcctgcgggcctcgcgggccgatgcctcgggtccccctccggcctcggtttctccgcgcagcggggcggggcgggggcagcgcgggtctcaaagctgcctgcagggggcgcccgtgagcggcgcggccggagccggagacccagcggccgccgagacagcgggagccggcgtgcgagcggcaggtcagccggggtgctaggtctggcgtgcggggtcctgggtgccgggtccggggtgcggggtgccgggggtccggggctggtggccgggcggcgtggggccgtcgggggtgcggggccgggaggactgggaggctggggttctgctcccctcagggttcctttcccgccgccccgagaccagttccccggcgcggggtccgagtcctgccccgcggcggctgccggcactgcctgtgaagggcccaggcacagtcacgtcccaggcgcagttgcggcgccgcgtgcgggaccctccgagctgtcccaaactgcaccggaaggcgcgcaggggtaggcggggagggaaggcaagtgcggcggccggcgcggcgcggggtgcggagccgcaggtagcgggcggggagcgtccgtccgtcagtccgtccgtccgtccatgcgccgcagaccggccccgcgcgctcgcatgaaccttcgcgagctcctccagcagggatggaccgggggcgcagaggcgcttcctgaggggtggcgggccgggccccggggcgagggagattccccaggtggaggagccgggcggagaccggttccccgggaaggtgaggcgcgggcagagatacccgagcgcccgggacgcgccgagaaagggggaatcaggaacgctgggccgagcgctggcgtcttccgtggacagtggtggcgggaactgggtttgggggacccaggagacgacgggggacggatgggggtgggtgcgcgcctcggactggccccggccgtctgtctggctgcccggagcggaggtaggaatggcgggaatggtggcggctctcgagggatttggcgcaaggcggcccaagggcttgaggaggaggccgcgggccggcagagctgaggtccctgtgtcccgcactcagactttagttgccccgactgtaccatgggaggaagagggagacccagggctgggtcctaggctgggggagtcggggccctgcaaagacgcgcaggtgtttgtggcccttgttggagggtgagccgcaggtcaagccagccctccgtcgccatcctgaagcacctcctctcttgggctctgccacacacagggccttctcccctattgccaggtgctcaggccgcctccaccctgcctctgctgccggctccccctgggttccccggcggggcaccctgccgatactccatgacgcgccagggctgccccagggtgccccagccctggggaccatggtggagggttctgtggagcaccgcgggcctgggaagctgttgcggggtcggggcttcctcactggccctgctttggccgttcctggaggccttgggtggggctgggaaggccgggccctgtgggcagcaccccccccccccccgcccaacatcccggcagatccatggcaggggcgcctcacaggctggtccacggccacggtgtcagtccctccttgttctgcgcttgctttttggggtctcccagcctctccctagtcctagagtttctcaggcaaatcccagccactacccctccatccgtgtcccctgtttccccagtgctgagctggctgagctgtgagctttcctgctccttgcctcaggaagccaggggcagcccagtcacctctggccagaggcgggccttaggccaaggctgacctggctggtctgagagctgtgctgggcttcttcccatatcagtctgtgaattacagatccccaaatatgccctgcgtcgcgatggaggagggcaatcaatggcaatgactgcctcatgggcaacgcgatgtgctggagatttcagtgctctcgtctgggttctggtcttgcctcctcgacccactcgctgagcaggttgctgtcccggggaatctgatatctcatctgtagaacaaggatgatgatcttagcaatgcctaatgtggaaaggccttggcttgggagcaagtgggggaaggtttagggcagaccagagggccggtgaggggtgtgtgctggagcggggaacccgggagggagggtgttaggcttgagggtcaggggacaccacagggattgctgttggcagagggacatatgaatggtagttggcctgggagccagcatgtgacttgagagcatcacgtcctgcaaagtccaggtgaggcctgggcagtgcctgctgtgtgggaccacagcccctggtggctctcagctgtgtcctgacactccaaagaaggtcttagtaccctctcacagacctaatacccgagccacctaaccccaaatgagctagaactgccttcccaaccgtgtttgcggggtctgtcttgtctattgcagcgcaaacagagccctgagcacgcaggagagcagaggaaggacagacagaagatggatggatggatgaaggcgggaagcacaggctgaggggatttagggcatgtgtggtgggggtgctgtggagaggagactgcacaggcaggagctgagctggtgaatgggagggttctagctcccagaagggtctgggccattgacaggaggggcttggtcctaggaggtgggtggtccagaggttgcaaggagcagaggagcccagatggggaagggaatggagctggggtgcagagaggagcccccacacaactgcccacatcctgtgcagaacctggggctctgggtggtgggaagaggcagtttcatggcggaggaggcctgggcccctgcagcctggactccatggatctggccagggactggggaggatcaggtggagagaggagcagcagagcagctgcccctcgtcccagcacaggggatgatgggagcccagggaaggcaggaccctggcttcgggcattttctctgctagaatctctcgatacctctctcccttcaccttctcctccaagtctcacccagatgatgtttctgtgagttgccatggggattctctcaccaccccccgccaacaccccgcaggggaagcttgttccaggagtcactgggcaggggctgctgctgctcttctgtgcccactcctcggatgtgccgctgcagccctggtctctggcatcggccgtcacctggtggagaggctgccggagctggccaagcagagggaggccgatggtgccacttggtgtctcctctggcatctgggcaggagacttctccccagaggccccgggctggtctgcccgtgtcacaggaggactcgcctctggtccctcagtggcctctgcaaaccctgagccagcctgggggaggctgctcagtggggaagaagcagtggccaggctctgcttggtcaccctgccctcctgtcagcctccggggctgcctcgtcgcacctgcccagggacccaacagccggtcctcacccctcccatcctcattgcagccaccctggggcattgtgaggccctgcacccagcactgccccttcaagcctcccacagggtcccgcccaggactcctgggctctgtgtccgcggggccatctagaaacactcccttgtccccccttcagcggcatagtacctgttgcccgccatctgagggaggtgcaggtgccaatccttcacgtgacgtgacgtggctcaccacagcctgtgtacatgtgagcagccgcgtgcagaggggaagctctgcctgggcctcagggactgtgacatggagcaggagccgcccccagccaagctgctttcagcacagcgtgggcccccagcaccttggtgcggggtgcggcccctcggaggagggctgtcaggtgaagcctcgtgtgagggggtgagtggcccccaggcggggaggagggggtgctgtggccttcctggcccctagcctggacacatgggggtgtggggagcaggagctggggcccccagcactggccccggggctgcgatgtgggggctgctctgtgaggcaggctcagagccttagcctccagctgcagggagctgggtcttggccccatcttgcccacatcctgccaccaggagcagagagctgcagctgcacccgggctgtgggggagggatgccaggtgtatctctgggtcccgggcccagcctgcacccagcgcctgaagtaagggccaccgggcagccccggaggtcaggagggaagtggagcccgtgctgggtggctgcttaccactgggcagtgaggaaggcacctgcgctgatgagtttggaaggggtatggggatcctggggccctgggttctgggaggttcatgcccaggcccccctgggccatcccaaaagccagtcatagtggggcccacaacctgccgtgccctgccgagctcccgcaagccacttgttgatgcttctcagtccaccccatgcctctcaaccgtttcctcctagactaggtctcttcatggcgtttctgggagaattcctcagtactagcttcagatccccagtcgtctcttccactgtacgtgtgcctgaagctcaccacatcccttacttcagtccttctatttttcagtccctggattttgtattatttcttgttcatatccacctgtccttgtttcatttccgccagtcggttcagaagttctcattcttgtctacggatgccattcctttctttgcctctttggagattctaaaggtctctgaaatcattattagattactgtattaccttccttcctactggaatgaattcacctccatgttttttattctgttgcttacct

SEQ ID NO: 1033 - DNA, 6000 bp, Homo sapiens
cctgtcagcctccggggctgcctcgtcgcacctgcccagggacccaacagccggtcctcacccctcccatcctcattgcagccaccctggggcattgtgaggccctgcacccagcactgccccttcaagcctcccacagggtcccgcccaggactcctgggctctgtgtccgcggggccatctagaaacactcccttgtccccccttcagcggcatagtacctgttgcccgccatctgagggaggtgcaggtgccaatccttcacgtgacgtgacgtggctcaccacagcctgtgtacatgtgagcagccgcgtgcagaggggaagctctgcctgggcctcagggactgtgacatggagcaggagccgcccccagccaagctgctttcagcacagcgtgggcccccagcaccttggtgcggggtgcggcccctcggaggagggctgtcaggtgaagcctcgtgtgagggggtgagtggcccccaggcggggaggagggggtgctgtggccttcctggcccctagcctggacacatgggggtgtggggagcaggagctggggcccccagcactggccccggggctgcgatgtgggggctgctctgtgaggcaggctcagagccttagcctccagctgcagggagctgggtcttggccccatcttgcccacatcctgccaccaggagcagagagctgcagctgcacccgggctgtgggggagggatgccaggtgtatctctgggtcccgggcccagcctgcacccagcgcctgaagtaagggccaccgggcagccccggaggtcaggagggaagtggagcccgtgctgggtggctgcttaccactgggcagtgaggaaggcacctgcgctgatgagtttggaaggggtatggggatcctggggccctgggttctgggaggttcatgcccaggcccccctgggccatcccaaaagccagtcatagtggggcccacaacctgccgtgccctgccgagctcccgcaagccacttgttgatgcttctcagtccaccccatgcctctcaaccgtttcctcctagactaggtctcttcatggcgtttctgggagaattcctcagtactagcttcagatccccagtcgtctcttccactgtacgtgtgcctgaagctcaccacatcccttacttcagtccttctatttttcagtccctggattttgtattatttcttgttcatatccacctgtccttgtttcatttccgccagtcggttcagaagttctcattcttgtctacggatgccattcctttctttgcctctttggagattctaaaggtctctgaaatcattattagattactgtattaccttccttcctactggaatgaattcacctccatgttttttattctgttgcttacctttcttagccttcatatacctcttgcgctttgaaattgatttgcgactcctcttagctgagccaatgttgtggagacagggagtggcctgcagtgcctgaaactgcagggcagcagccgcctcccaggaatgtcctgggtcctttcctcctttgaggtcccctgccatatgctcagatggggccaggcacagcaacgggggcacacctccctttggcccagcagttggggtgctgccaggcctggtggaggtacttggtaaacatttgttatggaaaagcagcaggagggttctaaggctgggattctggagcccaggaacaggccaggcatggctggagcgggtccgagtccgtgcactgtgtcctgtatgttgctcttagccgcactcaggagcagatgtgcaggtcactgcctagaagctggtgggcacctccgtgcagcaggctctggggggtatagccaccatctgggcatgtgtacagagggccttgctagtgcgacatatgaggaaccagaagatgtgtgggttttgattaaatggagttttaattaaagtggccaggttgggggaggtgaggaggaaggcaggaagcagcagcagttttgagtctgaccgcgtggaatcctataaggtggttctttcaagaggcattatgcacattccgcagcatgtgtcccctgtctgtatggggcagcatctgccctctgatctgtccccaacaaggggtaatcacagagaagtattacattattaatatttaatttcccctcctggttagcaacagatgactcaaggagtaattagatgcacagagccaacagagagggataggaaattgccagatcctggccccgccccctccccggggcctctgaccttcctgtcactctgggaggcttctgagggaggggagctggaggcccaggagccttcctgctgctgtgctctctgtgcgcacggccgcagccctacaccaccttccagtgctcttggtgaggctgagagaggtcgcttcgtgcctttgggcctcagtttcctcatctgtaaaatgggcttcctgggaccagcaagatcacagatgacagtcatttcccaagctcctaagcaggctgcacaagctgtgtctgagggtccagtgcagtgcctggcctctaggcaggtgccccctgggacgcgtaaggtttggcagctcagcagtgactggcatcgtggccagctgactctgtgttgctccccagttacggtccacgacacattagtagcttgaaactgggcacaaggggagaatttacaccacagaaatcaggcaaagcctgtaagtcagggtgcccccggccaggagctgatttgccagcctacggctgggtagctcccaacctttccccaatgaatgcactcctcttcccctgtctgccccaaaggtgcctctgactccactgatctgctttgctcagggccgagaaaggcacagctgagagtggattctggcttggcaggggcccaggttgcctgtgggtccgggcaagcctcacccgggatgtgctggcagcagctgggagagcctgcaggagtgcttaaggaggggctgagggagaggacgggcagcgaggtggcctgtgtggaccctgctggcaggagccgtgggtgtctttagccccgtgtgaggccggcctgggcagaggggtctgttgctgtcactgaggctggtgggcagcaggaaggtggcttcagtatagtcaagaaggttatcggtatctagtgctgtttagcatggggacccacagcacagaaggtggggagaccctgagaacgggggtacacaggcaggtacccagggctgccagggaagccttgccaaacagaggccctggtcaggcttctcccaaactgggcatcccagctggcatggcaccagtccagcccgtgaggcaggcgccgatgatttgaccccaccagcagggctctgggtgatgggactggggagtcctccttcactttggcagacgtgttatgttccaccttgtttgcccccagcaaggcccttgaatctggagcgtggtctggggctgcatcagccttctagcctgggatggtcagattggcagaaggctgtggcatccttcaatgcagatgccctagagagggccgtggtgggaggcaggatccctgggtagaggcggctcctcagtggcccactgggcctcactggacagtcgcctgttgctgctgctggtggtgctgggcctgggagtccaccttggagccacaggccaggcacctgggtgggaggcagcccggggccagcaccagctccacttgtacctgttgggcaggggctatcgtgagtcaggtgggccctggtgagtactgctcagggagagaggccaagagcatcagggataactgtgttccttgagtgtggccagggatggtgccaggagagctggtctggtgcatccctgccaacgacacactttgtgaatggctgcctggcaagtgctccatggaaagcaggggcttgggaggactcggccctctccagctgctgcaggccctccgttgctgcagggtttctggctctgctctctccttcctcctcctgcttctgtgtcaatgctccattcccaggctcctagtaggggcaaaagggcctgctgggtgcaggagaacctccagtcccaggtatggctgcagcccgtgccaatcctgttccagccacttgaggtgccgacagcattggagttggagggaaagttggggtctgtgtgtttgagctctgtcacatggacaatggggtagaggggagcctggccctttgaacagggctcaggaccaggagtgacttcctctccaggttgccagtcctgctccatccctcatgtcctggaagagagagagagacgaggtggctgcccgagtccacgtgaaaggcagcctctgacctcttgtccccaggcaggtggtggcggctggcaacacactcatagggccccatgagggttcaggattggagggggtagatttgggggcctcttagctctcaaagaggggcaatttaacgggcagaggtccatttggatccagaccattcacaggctcgaaggggacactgggagttggggctgggctcaggcctgctggggaaccaaaacttctgcttctgaggggtgtcagtaattccattttgactctgggggagccattttaaatctgtttatttccttctcatagaatcatgggtgagagctggcatggcccctagaggtcatttggggtccagctgcctcaccgtatcaatgaggaaactgaggcccagaaaagaaaagcatttttgcccagagtccctcagtgagtcctggttccgtacctgctttctgccagggaccaaactcccgttagtcattcctggtgtcagccaggcagaggagcaggtgggggagagggcgtgggaggagggaggtgaggcagctccctccgagtggaagctcacagtcagctgcagcgccgcccctgccctgactgcagctgactggcaggggcacctggaggcagcgggttcgggcgcagtatgagagggcttaccctctgcggcagtgggagacaggaccaggcagctccccacatccttccacatccgagctccaggggtctctggcttgtcctttcacagggcggctggtgtcccttaggtgggtgctggtagttcctgggagagttgacgggatggagcaggccaggggggctgagaagttggcctggcgagagaaggtgggtgggactgggagagcctgggcagggaggggcctttctgggagggagtgtcatggggctggccgagatccaggacccaggagactggccaagctgccacaggaggcctgagaggctgagcatgggggggccaacactgacagactttaacaagtttctggctcccccaggaaaaaaacagaccacatctgatccttggccctgagtccagagtgggaggcaccgtgacaacaatgcgcagagcagggaatgcagggagccatggatagtgctggggtgagctggagtcctggcaggggcccagctagggcagtactcattctgcagagcctgggagaaggggctgcctccttgggaggggtttgtgtgggagtctcagcgggaattctattggaccaggggaaccagccttgctcagtgacttctctgggtgtcctcctctaaagtgagggtcaaattcccacctctctcgcctcctggctatgaccacagcagaccaggcagggcatggggctaggcggggtcaggggccatcctcaggctgacacctggcctgtgggtagggtgggatctgaaactatagggtcttcagggggccaagtgtggggtaaggggtggcactttccgcagggctcgccctctgcagatggttcagcttctcatcggctgtccctttgcaggtgcctcaggaaccctgaagctgggctgagccatgatgctgctgccagaacccctgcagagggcctggtttcaggagactcagagtcctctgtgaaaaagcccttggagagcgccccagcagggctgcacttggctcctgtgagga

SEQ ID NO: 1034 - DNA, 6000 bp, Homo sapiens
gctgagcctcagccaggcccagcagcatatcctgggctgcatctgtgaccaacacactcacatcttgccgtcttagaccccaaacattgaccatccagctggaagggatgccaaggctgtctagcgtgacacaccaccactctggggtgcccaggcatgtcagagaatgtgggtcccagagctgctgcccaccctttgtggaggtgccctctgcagctctgtgtcccccggcttgcaggctgcccctttctggggatctccattacccacactgggggctcaccctatggtccaagaatatgccccatgattccagctggggctttatgtgcacatgtcccaacctgaggagtaggtggagccttcctaagttgtccaaaggagtcattgatccaagaattgaagagccatggacccacagggaaacctccattccttcccctggtacgaacaggcctgacttggcctccacctttcctgcccactctgttcatctctctctgtcactaggcagccaggccacccttccctacccagtgctcacatgctcattccttcctcagggtcttgtcccaggctttgcccccctcctgacacacctgcccccacactcatgccagtgagaccctgcctgcccgtcctgcaagacccactgggtgacacctcctccagggagccctctctcccaatcctgccctcttagaagtgttaggacttcgggcctcaccaccagctgccacctgcaccttggcctgttcctcaaaccagcgagaacatccaccaagggctgctgtgagagccagggaggggacagtgaggcaaaaatcccctgggaactggaaaaagaagcctgtgtctctcaccctgaattccctatcctctgggaacacagagagctacatctctgcctctggcctgaagtctttctcacagagttcctcgactaggccctgtgctagcccaacaggttccctgaacttggaaaataacagatttttccaaaactgagttcttttttttaaaaaaaaagttaatggagagtggggcaggcctgaggctagacccagggctagccgaatggacctttctgagtggagcaggaaacggcacgtagaggaggctggattcccagctgagaaaggaggagggaggatcctgaggcaggctgtgactccagcgccggccaggagtgtcaccaagttcctttcataccccgcttgctctcgggagcccacatggacacctccacatgcccagaggcccaggggccctgaggaacaggaaagcgaagggacctgcgggccaggaacagcctgaagggccctggagtccatccacatcaggagacactcgtatgtccttccctgctctggcctccccatgagtttgtgagtaacaggagggtcagaacatccgcctggccacaatgcaggccaagaggatgacaggagatgctgagctgacatcctttggcaactgcaaagctctctgccctcaagggaggatgaacatcatcgtcgtcatcctctccagggccccctgcagaagagaccagcctaagccttgcagagcctcatggagcagagtcaaatggctcaaggtctgggtggaactaaggtccagctccaaggaagttgggatgagatgggtagaggatagggggcaggtccatggctctgaacccaaagatctgaatccccaccctccccacgcctccaaccctcctcagggtccctgtcaccccatccactcactggaccttcagaacacctttgtgagctcagaggggcagagagacttgtcctattttatggatgaggaaatgggcccagagagaggcagctaactttccatagccacacagcacatcctgtcctactacatagggagtcattctctcaactctcagaaaacagagaaggaaagggagagacaaaagagaaaaaaagtcgagctcctttaaattgagaacggcagccctgatcataccctttgaatcagagaaaaaagtgagagcttggcctctgcttccccatagagcatcccatcagtgtgcagactcagcttggttccctgaagtcccctccagtgctttgttctctggcccacctgggcacctgcagacagggcccctcctgggcctccgtgttctgagctgccactggacgaacctaaactctgctctgcccgtcgcagagcaatggatggaggctcaccagagactgcacttggagtccgacaatccctaattccacccctctcagggctggccagggtccccttctcctttgccgagggttctagactctcctgggatagagagcatctgacagggcagtgtgaggtccagattcctccccttccctggagcagcccagtgcagctcctgctcccacttagagcccaggtgacagggacagccacctggtgcaggctctgcgagacaggctgctcatgaccgctccccagtgactgaagtcacagtggggatcaggccacatttctttccaggactcgccccagctccactaccaactcgttgtgtggcccggaaacagctggctgtcttctctgaggctcattttccatcccgaagatgagaggaaatgacctctaagggccccttggctttgacgctctaaatttccatttgctcatctagctgggtcctccttcctgctggggcaccctcaacctgctgtggcttcctctttagataggcacccaccagtttcagataattcaccgcagagatggtgcaccctgctccctgactctcaagaggcaccacctcaagcctcatacatggcctcagggcccacaaccacccaggctgtggaacccagctctgtggcagaggggccaggaggtggggcagaaggcctctgacgtccccaagggagggatgcactttctagcctcatctatggcctgggtaggtggaatccatgccgagtaattcagcctctgggaaaatcttcatttgcacaattacttggctgaagtcacttcacaaaagattcaccataaaaatcccctccaacagccagcccctgagcacactggctgcctctaagacgatgagtccttggtgacttgaggagcaacagaatttgcatataggtccaagtgactcactgtggcattcaaccaagtcacttcccctctctgggtcattttcctaatgtgcacactgcaaggctggcccagaggatctgggggaaggcaggtggcgggcggctcctaactctgaggtcctatggtttcccctggctccccactccaccccagcatcatccgggaagttttgcttgtgtgtgaggaatggcccagacacacccgctggcagcacgtgggtcactgggaccacagctccctgctaagcccaatgccagaccctggccacactcatctgccaaaaagcagagcacagttggcctcaggcagcctaggggaacccaggccgcctgggagggccaggctgccctgcgcccataggggtcagtcagttcggcatgactgctggccacgtgctggccctggggagcccctgctgagcctggggccccgtcgccagctcaccatgctgacactgcagaccaggccctgatcccaggctcaccctggctccgggcacagaccaaagcctgggcaccaacagcctttgcacagatgtaaccccggccctgctcaccggagcgggatgcggatggcaatgtagcggtcaatggcgatggccaggagactgaagatggagctctgcgtgaggaccaggacgaagcaggcaatgaagaggcagccgtggcaggcagcgcagaacccggtgctgatggtgatggcaaaggggatggcgagcacacccactgcgatgtcggccgccgccagtgacaccacaaagtagttggtgacgttctgcaggttgctgttgagccacacggcccagcacaccagcacattgcccaggatggccagcacagcaatggccagctccaccgtgatgtacaccgaggagcccatgatgggcatggccacagacgacaggcaggctcagcacggacgcgggctgggccagctcacggtccattgctgcagcccagccgcccgcctggctcccagcccggcccaggcggaggggcccagacccctgagccccttcctcacaggagccaagtgcagccctgctggggcgctctccaagggctttttcacagaggactctgagtctcctgaaaccaggccctctgcaggggttctggcagcagcatcatggctcagcccagcttcagggttcctgaggcacctgcaaagggacagccgatgagaagctgaaccatctgcagagggcgagccctgcggaaagtgccaccccttaccccacacttggccccctgaagaccctatagtttcagatcccaccctacccacaggccaggtgtcagcctgaggatggcccctgaccccgcctagccccatgccctgcctggtctgctgtggtcatagccaggaggcgagagaggtgggaatttgaccctcactttagaggaggacacccagagaagtcactgagcaaggctggttcccctggtccaatagaattcccgctgagactcccacacaaacccctcccaaggaggcagccccttctcccaggctctgcagaatgagtactgccctagctgggcccctgccaggactccagctcaccccagcactatccatggctccctgcattccctgctctgcgcattgttgtcacggtgcctcccactctggactcagggccaaggatcagatgtggtctgtttttttcctgggggagccagaaacttgttaaagtctgtcagtgttggcccccccatgctcagcctctcaggcctcctgtggcagcttggccagtctcctgggtcctggatctcggccagccccatgacactccctcccagaaaggcccctccctgcccaggctctcccagtcccacccaccttctctcgccaggccaacttctcagcccccctggcctgctccatcccgtcaactctcccaggaactaccagcacccacctaagggacaccagccgccctgtgaaaggacaagccagagacccctggagctcggatgtggaaggatgtggggagctgcctggtcctgtctcccactgccgcagagggtaagccctctcatactgcgcccgaacccgctgcctccaggtgcccctgccagtcagctgcagtcagggcaggggcggcgctgcagctgactgtgagcttccactcggagggagctgcctcacctccctcctcccacgccctctcccccacctgctcctctgcctggctgacaccaggaatgactaacgggagtttggtccctggcagaaagcaggtacggaaccaggactcactgagggactctgggcaaaaatgcttttcttttctgggcctcagtttcctcattgatacggtgaggcagctggaccccaaatgacctctaggggccatgccagctctcacccatgattctatgagaaggaaataaacagatttaaaatggctcccccagagtcaaaatggaattactgacacccctcagaagcagaagttttggttccccagcaggcctgagcccagccccaactcccagtgtccccttcgagcctgtgaatggtctggatccaaatggacctctgcccgttaaattgcccctctttgagagctaagaggcccccaaatctaccccctccaatcctgaaccctcatggggccctatgagtgtgttgccagccgccaccacctgcctggggacaagaggtcagaggctgcctttcacgtggactcgggcagccacctcgtctctctctctcttccaggacatgagggatggagcaggactggcaacctggagaggaagtcactcctggtcctgagccctgttcaaagggccaggctcccctctaccccattgtccatgtgacagagctcaaacacacagaccccaactt

SEQ ID NO: 1035 - DNA, 6000 bp, Homo sapiens
tcaccacatcccttacttcagtccttctatttttcagtccctggattttgtattatttcttgttcatatccacctgtccttgtttcatttccgccagtcggttcagaagttctcattcttgtctacggatgccattcctttctttgcctctttggagattctaaaggtctctgaaatcattattagattactgtattaccttccttcctactggaatgaattcacctccatgttttttattctgttgcttacctttcttagccttcatatacctcttgcgctttgaaattgatttgcgactcctcttagctgagccaatgttgtggagacagggagtggcctgcagtgcctgaaactgcagggcagcagccgcctcccaggaatgtcctgggtcctttcctcctttgaggtcccctgccatatgctcagatggggccaggcacagcaacgggggcacacctccctttggcccagcagttggggtgctgccaggcctggtggaggtacttggtaaacatttgttatggaaaagcagcaggagggttctaaggctgggattctggagcccaggaacaggccaggcatggctggagcgggtccgagtccgtgcactgtgtcctgtatgttgctcttagccgcactcaggagcagatgtgcaggtcactgcctagaagctggtgggcacctccgtgcagcaggctctggggggtatagccaccatctgggcatgtgtacagagggccttgctagtgcgacatatgaggaaccagaagatgtgtgggttttgattaaatggagttttaattaaagtggccaggttgggggaggtgaggaggaaggcaggaagcagcagcagttttgagtctgaccgcgtggaatcctataaggtggttctttcaagaggcattatgcacattccgcagcatgtgtcccctgtctgtatggggcagcatctgccctctgatctgtccccaacaaggggtaatcacagagaagtattacattattaatatttaatttcccctcctggttagcaacagatgactcaaggagtaattagatgcacagagccaacagagagggataggaaattgccagatcctggccccgccccctccccggggcctctgaccttcctgtcactctgggaggcttctgagggaggggagctggaggcccaggagccttcctgctgctgtgctctctgtgcgcacggccgcagccctacaccaccttccagtgctcttggtgaggctgagagaggtcgcttcgtgcctttgggcctcagtttcctcatctgtaaaatgggcttcctgggaccagcaagatcacagatgacagtcatttcccaagctcctaagcaggctgcacaagctgtgtctgagggtccagtgcagtgcctggcctctaggcaggtgccccctgggacgcgtaaggtttggcagctcagcagtgactggcatcgtggccagctgactctgtgttgctccccagttacggtccacgacacattagtagcttgaaactgggcacaaggggagaatttacaccacagaaatcaggcaaagcctgtaagtcagggtgcccccggccaggagctgatttgccagcctacggctgggtagctcccaacctttccccaatgaatgcactcctcttcccctgtctgccccaaaggtgcctctgactccactgatctgctttgctcagggccgagaaaggcacagctgagagtggattctggcttggcaggggcccaggttgcctgtgggtccgggcaagcctcacccgggatgtgctggcagcagctgggagagcctgcaggagtgcttaaggaggggctgagggagaggacgggcagcgaggtggcctgtgtggaccctgctggcaggagccgtgggtgtctttagccccgtgtgaggccggcctgggcagaggggtctgttgctgtcactgaggctggtgggcagcaggaaggtggcttcagtatagtcaagaaggttatcggtatctagtgctgtttagcatggggacccacagcacagaaggtggggagaccctgagaacgggggtacacaggcaggtacccagggctgccagggaagccttgccaaacagaggccctggtcaggcttctcccaaactgggcatcccagctggcatggcaccagtccagcccgtgaggcaggcgccgatgatttgaccccaccagcagggctctgggtgatgggactggggagtcctccttcactttggcagacgtgttatgttccaccttgtttgcccccagcaaggcccttgaatctggagcgtggtctggggctgcatcagccttctagcctgggatggtcagattggcagaaggctgtggcatccttcaatgcagatgccctagagagggccgtggtgggaggcaggatccctgggtagaggcggctcctcagtggcccactgggcctcactggacagtcgcctgttgctgctgctggtggtgctgggcctgggagtccaccttggagccacaggccaggcacctgggtgggaggcagcccggggccagcaccagctccacttgtacctgttgggcaggggctatcgtgagtcaggtgggccctggtgagtactgctcagggagagaggccaagagcatcagggataactgtgttccttgagtgtggccagggatggtgccaggagagctggtctggtgcatccctgccaacgacacactttgtgaatggctgcctggcaagtgctccatggaaagcaggggcttgggaggactcggccctctccagctgctgcaggccctccgttgctgcagggtttctggctctgctctctccttcctcctcctgcttctgtgtcaatgctccattcccaggctcctagtaggggcaaaagggcctgctgggtgcaggagaacctccagtcccaggtatggctgcagcccgtgccaatcctgttccagccacttgaggtgccgacagcattggagttggagggaaagttggggtctgtgtgtttgagctctgtcacatggacaatggggtagaggggagcctggccctttgaacagggctcaggaccaggagtgacttcctctccaggttgccagtcctgctccatccctcatgtcctggaagagagagagagacgaggtggctgcccgagtccacgtgaaaggcagcctctgacctcttgtccccaggcaggtggtggcggctggcaacacactcatagggccccatgagggttcaggattggagggggtagatttgggggcctcttagctctcaaagaggggcaatttaacgggcagaggtccatttggatccagaccattcacaggctcgaaggggacactgggagttggggctgggctcaggcctgctggggaaccaaaacttctgcttctgaggggtgtcagtaattccattttgactctgggggagccattttaaatctgtttatttccttctcatagaatcatgggtgagagctggcatggcccctagaggtcatttggggtccagctgcctcaccgtatcaatgaggaaactgaggcccagaaaagaaaagcatttttgcccagagtccctcagtgagtcctggttccgtacctgctttctgccagggaccaaactcccgttagtcattcctggtgtcagccaggcagaggagcaggtgggggagagggcgtgggaggagggaggtgaggcagctccctccgagtggaagctcacagtcagctgcagcgccgcccctgccctgactgcagctgactggcaggggcacctggaggcagcgggttcgggcgcagtatgagagggcttaccctctgcggcagtgggagacaggaccaggcagctccccacatccttccacatccgagctccaggggtctctggcttgtcctttcacagggcggctggtgtcccttaggtgggtgctggtagttcctgggagagttgacgggatggagcaggccaggggggctgagaagttggcctggcgagagaaggtgggtgggactgggagagcctgggcagggaggggcctttctgggagggagtgtcatggggctggccgagatccaggacccaggagactggccaagctgccacaggaggcctgagaggctgagcatgggggggccaacactgacagactttaacaagtttctggctcccccaggaaaaaaacagaccacatctgatccttggccctgagtccagagtgggaggcaccgtgacaacaatgcgcagagcagggaatgcagggagccatggatagtgctggggtgagctggagtcctggcaggggcccagctagggcagtactcattctgcagagcctgggagaaggggctgcctccttgggaggggtttgtgtgggagtctcagcgggaattctattggaccaggggaaccagccttgctcagtgacttctctgggtgtcctcctctaaagtgagggtcaaattcccacctctctcgcctcctggctatgaccacagcagaccaggcagggcatggggctaggcggggtcaggggccatcctcaggctgacacctggcctgtgggtagggtgggatctgaaactatagggtcttcagggggccaagtgtggggtaaggggtggcactttccgcagggctcgccctctgcagatggttcagcttctcatcggctgtccctttgcaggtgcctcaggaaccctgaagctgggctgagccatgatgctgctgccagaacccctgcagagggcctggtttcaggagactcagagtcctctgtgaaaaagcccttggagagcgccccagcagggctgcacttggctcctgtgaggaaggggctcaggggtctgggcccctccgcctgggccgggctgggagccaggcgggcggctgggctgcagcaatggaccgtgagctggcccagcccgcgtccgtgctgagcctgcctgtcgtctgtggccatgcccatcatgggctcctcggtgtacatcacggtggagctggccattgctgtgctggccatcctgggcaatgtgctggtgtgctgggccgtgtggctcaacagcaacctgcagaacgtcaccaactactttgtggtgtcactggcggcggccgacatcgcagtgggtgtgctcgccatcccctttgccatcaccatcagcaccgggttctgcgctgcctgccacggctgcctcttcattgcctgcttcgtcctggtcctcacgcagagctccatcttcagtctcctggccatcgccattgaccgctacattgccatccgcatcccgctccggtgagcagggccggggttacatctgtgcaaaggctgttggtgcccaggctttggtctgtgcccggagccagggtgagcctgggatcagggcctggtctgcagtgtcagcatggtgagctggcgacggggccccaggctcagcaggggctccccagggccagcacgtggccagcagtcatgccgaactgactgacccctatgggcgcagggcagcctggccctcccaggcggcctgggttcccctaggctgcctgaggccaactgtgctctgctttttggcagatgagtgtggccagggtctggcattgggcttagcagggagctgtggtcccagtgacccacgtgctgccagcgggtgtgtctgggccattcctcacacacaagcaaaacttcccggatgatgctggggtggagtggggagccaggggaaaccataggacctcagagttaggagccgcccgccacctgccttcccccagatcctctgggccagccttgcagtgtgcacattaggaaaatgacccagagaggggaagtgacttggttgaatgccacagtgagtcacttggacctatatgcaaattctgttgctcctcaagtcaccaaggactcatcgtcttagaggcagccagtgtgctcaggggctggctgttggaggggatttttatggtgaatcttttgtgaagt

SEQ ID NO: 1036 - DNA, 6000 bp, Homo sapiens
tcggcactcccagagagcgatggttaagggaccggtgacagtccagagggcagcctgtctggcccaggttccacaactgtcagcaaatctagatgccaaatccacagaggacatacaactgggagggacagttcataggtcagatggcaaaattgatctgaatctggatctcaaaactctttgaaggatggactgaagttgactgtaacaagaggaaatttgatagggaaggatctaaggtctctcctctccatgtatgcaatggaggcttagcagtggcacaggtgaaaaggatttggggggtttcagtgcctataagctccacctgagttaagggtgttgcctgttgccaagaaagttcttaggctgggcacaatgtctcatgcctgtaatcccagcactttgggaggcccaggcgggtggatcacctgaagtcagaagtttgagaccagcctggccaacatggtgaaaccccatctctactaaaaatacaaaaattagccaggtgtggtggcgtgtgcctgtaatcccagctactcaggaggctgaggcaggagaattgcttgaacccgggaggcagaggttgcagtgagctgagattgcaccattacactccagcctggatgacaagagcgaaattgtctcaaaaaaaaaaagaaaagaaaagaaaaagagagttcttagacaacacttggggctctgcgtggctcttagagcacactctgagggggctctggaaaattggaaaacactcaaagggaagttatttgcatggacttcagaccaagctgtggggcttcgtaaagtctctaaggatgggcagcacgatggtaggggagatgcagagtgaaagcacagaattttccagtcttggaagtgttgtcatgaggctaaggaggcaatcctactctctgagtgtctctgaaatgaatctcaactcagtatcaatcagctgagtgcaaattgcagctatgattacctgggagcaagtggccttgggggtcagtgaggtctttgtgttcaagcttgagcaggacaacttttggggcatcatgcataaagaggtgacccaggtgaaactgaattctgaaacttgtcaggagccctgggaggcaggccctttgtgtggctttagggaatgtgtgggccctttgaggacatgacaaggttgggtggaggctcatcaacccctctatcccactgggatgttctgccagctctgccacagattacaggggcagctatattcatctttgttttttgtttttcttgggatgggatctcgctgtgtcacccaggctggagtatagtagcgagatctcagctcactgcaaccttcacctcctaggctccagcaatcctcccacctcagcctcccaagtagctgggactagaggtgcatgccaccacctgtagctaattagtttttttgttttgttttgttttgtttttttggagagacgaggtctcactgtattgcccaggctggtatgttcatctttgaactgtggtgtcaaggtctcaggattggatgtgagactgtggaggagataaactttgtgcaagggggaaggccaaatgataagaggatccggggttcattttcactgagaggacggaagacctttaagttgattataaccactggagtaaagctctcttgaccctgaagttacaatagctgcccccagctgccctgaactttgacctgctctcctcgcaaacctggggcctgtggtgccccagaagttctcagtaaaggctctcatgttagcttctgcttgtaggatggtctgagggttagctggagagatgactgagaggaactggccctatcatgggaatatgggaatctccccatccttggacacccagtcctgctaacctaaccctgaccagaactgtttccctgttacagccagaagcttcgacctgcagaagtcggaggccatgctccggaaggtgagacacatttggctgttgcttcagttcctccccatcagaatcactccttgcgtggacttcttttgccgcacctcccatcccaatcacagcttttggctttgagtattagccgaccactgttgccttatccctctgggacaaattgcattcccttccctggcaacacaggctttcatagctctgggccagccaagaatgataatctgttctgctaagacctctaaaacaggcagggccttcttttccattcctgcctaatgccttctggtgaccacttatgatctggtggtccattcacgctgtcgcttattgctacatgcctattaaacctcccccaccatccctgctttttgttttcttttttatttttttctttttggagacagagtctcgctctgtcacccaggctggagtgcagcagtggcgcgatctcagctcactgcaacctccgcctcccgggttcaagtgatttcatgcctcagccacctgagtagctgggattacaggtatgcaccaccacagctggctaatttttctatttttagtagggacgggattttgccatgttggccaggctggtcttgaactcctggcctcaagtgatccacccgccttggcctcccaaagtgctgggattacaggtgtgaaccaccatgcctggctgtccatccctccttttaaaaatttccccattgtatctttgtagcatgtggagttccgaaagcaaaaggacattgacaacatcattagctggcagcctccagaggtgagcacaaattatcccacctcatccctatgctaggcctttcagacccacaacctgggtcctggatccactggatttggatccttagaggaaaggtctgacaatgcccactgagccctgatggtctccagaatgggcatctgttggtacccaggagagggaggtagagaaagatactgatgaacctggagtaaggccctgtggtccaggcaaggtatggatgcctgctgaccaggtggctcctctgtgtctttgcccaggtgatccaacagtatctgtcagggggtatgtgtggctatgacctggatggctgcccagtctggtacgacataattggacctctggatgccaagggtctgctgttctcagcctccaaacaggacctgctgaggaccaagatgcgggagtgtgagctgcttctgcaagagtgtgcccaccagaccacaaaggtgagtggaccaccatggctagaaatgagttgaccacagcagaggcattccagcagaagcagggatgtcacacaggaatataagcacagcttcagggccaaggcccagcctttttttttttttttttaatttttaaaacttttttagtagagacggggtttcatcatgttggccaggctggtcttgaactcctgacctcaagtgatccacccacctcggactcccaaagtgctgggattacaggtgtgagccactggacctggccgaggcccaggctttgggatttcctagaccagtgacatttccaagttttagaatattcccaaatatctattttgccatgtaaggactttaaaacaatgaccatctattgttgccatcattaacacccaaaactataagaatggcaataatctcagatgaaaaagcagtcctttaggaagctgcagtgagccaagatcgtgccactgcactccagcctgggcgacagagactccatctcaaaaaaaaaaaaaaaggagtcctttaaattgaataaatttagcttcataaaaaactcactacattattgttatttttctgatttatatggggacccagtgaaatcttactgtggaccaacccatccttgagcaagtatttgggtaccactggtgcaaatgatgtcagattcttgcttctctaattctgtatttaaaaaagataaggatggctgggtgtggtggctcatgcctgtaatcccagcactttgggaggctgaggtgggcagattgagcccaagagttcaagaccagcctgggcaacatggcaagagcctgtctctacaaaaaaaagtaaaaaattagctgtgcatagtggcatataccagctactagggaggctgaggtgagaggatcacttgaacttgggaagtcgaggctgcagtgagccgtgatcgcaccactgcactccagcttgggcaacagggctagaccctgcgccaaaaaaaataaggatagctgattcccttactgagaaaaagactgaagaacaagcaggagctgccacttccctcctgccctcctctcagcagttgtaaagatccagtgaaatgatgtcataaagtctaggaacattcccacactcatctacaaatgttcacagagagcctactgtgcgcagagaccctgcggagctggggatgcaggaagcattagacgtggatgcacccctgagggttcagggtgcacagaacgtctgtcctcgggcataagtggctctacgggtaccgtgcacagagcacacagtgactcaggaagggggaggccatcaggccaaactgcagaaccaaagccatctcagatgtcatctagatccacccagtcatgtactggaaaagaacacagagacctaggcaggaagagtgactcgcctagaccacaattctggcctggggtgattatctcagtttggaaaactctaggtccggccctaactagctctgattgctctctggatgcacagtgcaatcatttggcctggactggaacgggcttctgaagtaggacagcctgacaagacttcctgctctctgttccctgcagttggggaggaaggtggagaccatcaccataatttatgactgcgaggggcttggcctcaagcatctctggaagcctgctgtggaggcctatggagaggtgaggggcaggggtggggaggaaggggacagagggaaggggaggaggagtagacccctctcctaggctgtcctgtgggatgggtgaggcaatgggggcagattctgagcctgctggaatcaagagtgattttgtttccacagtttctctgcatgtttgaggaaaattatcccgaaacactgaagcgtctttttgttgttaaaggtaagttgggaatttcttgtgataaagccagatggaaaagaggggtcaaaaacatgactgcggcagatggagggtcaaacagtgagccaaaagagggggtctgaggacatgttcagaagactgctgcccctgctagtgtgctggctcacgcctgtaaccccagcactttgggaggccgaggcaggaggctctcttgagcccaggagtttgagaccagcctgggtaacacagcaagacctcatctctataaaaaagttaaggaaatgagctgggtatggtggtgcatgcctgtagttccagtttctcaaaaggctgaggcaagagcattgcttgagtctaggagtttaaggctgcagtgagccatgattgtgccactgcactccagcctgggcgacggagcaagtctccatctcaaaaaaataaaaatagggctaggtgcagtggctcactcctgtaatcccagcactttgggaggctgaggtgggcagatcacttgaggccaggagttcaagaccagcctggccaatatagcaaaaccccatctctactaaaaatatggaaattagctgggcgtggtggcccacacctgtagtcccagctactcaggtggctgaagcacaaaaatcacttgaacccgggaggtggaggatgcagtgagctgagagctcactgaggctgaggcaagagcactgcttgagcccaggagtaaaaggctgcagtgagctatgattgtgccactgcactccagcctgggtgacagagcaagactctgtctcaaaaaaataaaataaaaagaacactgcccttcacatacgcagactactttacaactcacagagctttcagtatttataatctcctttgagccacccagcctgatgagatgggaagagaccatttgattatatccactgtaaagatgggaaggctggacctc

SEQ ID NO: 1037 - DNA, 6000 bp, Homo sapiens
gtgtttggctgaaatggaacaacttctcaaagaaacagggttagattaaaagcagcctgttcctctgccaaagtgtggaagctttctctgccaagtgcatgcccattttctctttccagaggaaaccactgctaatgtctattatcctatcaaatatcttccatctagaagcattacatgtttccataataaacagggcatacagtgctcgctttgtcagcacatacactaaaattgaaacaatacagagattagcatggcccctgcgcgaggatgacaatcaggttatcttaaataaataaatagaaaacaggacatacacaaacacacacacacacacacacacacacacatattcacaggaattgtctgtcattcactgtatgtttgaaggaattttgaaactgtcaaactcatcgcaggatttcaggaaactttcccattaggacaagcaccagagtggtatcatcagagaatctgggagtctaagcagacaaagaagtaaagccaaaagtatttttacctatgtagttacaaaaaagttacaaactgtttacatactgttctgcaacttgttttggcctcaggacacattgtggacagtttcctgtcacttctgtggagctaacctcttttttaaaaaatatatcagtattctatcacatggattacaacataaaattgttgaagcaattctcctttgatgaacatttgagttttcccaatctcttattattacaaatagggatgcaacgagcatctctgtccatttacctttttgcaggataaattcctggttcacaaagtttgcacattttaccttttgtcagaaattgaagagggccaggttttccagggtccaagtcaggcagaacaaatgcagcaatgtggaacagacggaaactccagctctgtcatttcctcactgtgtgtcaccagagtcacaccacctcctttttatcagctataaaacaggactactgctgaactcgtagagttgggggaaagagtgagataacatatagattaccaacccagtgctgcgacacacagctattattgttattacaactgctactgctgctgctaattctcctccctcctttcaaagtccagttcaagctctaactcctttaaaaagcgtttcacatgatttcagtctaccaggccctcttcttccaagctggtacagacgagatggtctctgtcactcatctggcacttggcatgttctgcctatttttttctctccatgaatgtcttgtcaaccccgctagattaagtttcagaaggtcaaggatcattacctaggctaccttcatccccatgacctgccacactgccttgctcagtcactaaacatcaacaaaaatcactgtccccaagccctttgccagaactgcctgaatgtctgtctggtttctgccttccctcagatgtcctgcggtttgacaacacctacagcttcattcatgccaagaaggtcaatttcactgtggaggtcctgcttccagacaaagcctcagaagagaagatgaaacagctgggggcaggcaccccgaaataacaccttctcctatagcaggcctggccccctcagtgtctccctgtcaatttctaccccttgtagcagtcattttcgcacaaccctgaagcccaaagaaactgggctggaggacagacctcaggagctttcatttcagttaggcagaggaagagcgactgcagtgggtctccgtgtctatcaaatacctaaggagtccccaggagctggctggccatcgtgataggatctgtctgtcctgtaaactgtgccaacttcacctgtccagggacagcgaagctgggggtggcggggggcatgtaccacagggtggcagcagggaaaaaaattagaaaagggtgaaagattgggacttaacacttcagggaagtcagctgccggggagaaacttgctcctaaatgaacacataagtttagatcgcaatgaggagtagcagggtagctggttgctagagttacggtggggatcagaaactcttccaaacattttagcactgaggctggggtagcttttggcttttcccaggtctcaggaggtggcctgagtcagcacacatcttcccactcggtagacaggctggcctctccctcactttgagactttggcaactcctgggccacacggcctgcctctttgattactaatgattgtcagtgactcagagcttcctgggacttcgggtacccacccgctgttctccatgcaaacaaagcgccagggaaatgacccacagggatcgcagctgcagggagggccagggaggttgggggtgggagtgaatgctaaaagcagatcgtccagtgcccttttcagtgctaccggcctctcaccaagcagtcctccatgtgagcaaccccgagacaaaaatgctaagtgggatcaagagagcagcactcggagagggtgtttgccagtctgagtgtcccgcggtgcccgccaacccgcttcctgactgacctgagcaaggtcttactaagcagtcccatctctgtgggaggcatgcaacgcgtgcagggagttcaggtgccggtcggcgtagccaggcctggaggccccccaggcaggaggccgcccaaaggcggggccggcgtctcgcagactaggggctgggggcggccacagacggcctcgaaaccacagcccttaccccaatcccacgagccccgccaacgaaccacaggtgctgggctttagagaacatgggaaggcggccccagacctgcgggaacgcctttccctcagagccaggccccggccccgtctgggaagctcatcttgcgaagctgagggagctcagggcaaaggccaggctagcgcggaccggaaggggccgaggctgcacgggcctctgccagaacgctcaggacatcccggcctgggtttacaacgctgttaggaaaattaaccaatgaataaagcaacgttcagtgcgcagggagtgaaattcaatgcccaccgctaggctcctcgctgcctctcactcaagaggcccaaactcagacggcgtcagggacccggacccagcagccgtttcacgccaatagatagggcgcatgcgcagaaatcctcctcggctctctagcgtgagctttcccaaggggccacgcccagcttgccttctgattggtccagctggtgggttgtcttccgccatctttgatcagggcactaaggatgctccccacggccttcacagtgacggcggagaccctgccccgccagctgctcagtacgtgccgcgtagcccgtgcgagccaagtgtgagtccgggcgagcgcctgcggagctagcactgggcccagaatgagagggaggcggaggagcagcgatcacgtggttttagggactgtctaataattccacgccagcattgccggtgtttcagggggtgggaaccgctgcgttccccatcaacttttctcccacccaccaccctccccaacctacaagcccagctcagcttgaggtaactgctgaccggactgtcctatacagccctacaagacagaggcgcctagggctgaaagcgggggcctccgtagggagccagcgggggcctcaatagttactcattttctctacctttgatgaaaataagagctaattcttaataaggcctaccgggtatcacgcaaaaaccctgtgcttactattacactttgggttgttgcaaagattaaaggaaataagccgtgcaaagcgcttaagagcttggtataagtaagtgctcgtcaatgttggctactctcattttttttgcagacgtgggaactggggctcagggaggctaacagccagtaggcggcacagctaggatttgaacccaggattgtctccaacgccgctcaattatacccgccaaggagtcacagagacttagtgaagtgcacacattgctcacctgggtgaactgaggtccagcgggggaaggcttcctcctgttgtaatcactaaccccaactctgtctcccttgcccgattcattcattcgttaattaattcatccaacatcctgtccccaagaagctcagtctggggacatactgatccagttaaatgcgagtgcttcctagttatacatggcgactgctgagaagggactccagagtccaggcacctacctcccaggggctcaccgttcactcctctagcctcatttagagctcgcattaagagcacgggatctggatccacactgtttggattcaaatcacaacttcaccacttagcagctgtgtgttctgggaaaatgacccaccttctctgtgcctccattttctcacctgtaaaacgggctcccaggctggtgggagggtttcaggtgtaagacatggagagtcctttagcgaacatgtagactggcaataaactcaataaatggtgactgttataattaatcctcggaaccatcctagggagtggacactattgtgttccccattttatttattacattaattttttttttttttttttagtagagacgaggtctcgctatgttgtccaggctgttctcgaacccttgggctcaagagatcttcccgcctccggcctcccaaagtgctgggatcacaggcgtgagccaacgggcccagcctgtgtccctccctcgtttttacaaatgaataaagagatgctggataagcccgaggtcacaagctttgcagtgtagcatcccccaacttgatcccctgtctctttggctccaaaacctacactcagtcctgggagcgattagcgccaacagctcagagaaaacgtgacgaaaaccagtctgtaaaacccgagcctgggagaggggcttcggtgcgcggggggaatttgcagacgctccctgctggcggagatttcctgacctgtccttcggcgcgggactttcggcgggtcccggccgggcagacccaagtgccggcggcggagactgcagtggagccagtaccggctgtagtggccggggccgtggcgggagagtcatgtcagagccgcagccgcggggcgcagagcgcgatctctaccgggacacgtgggtgcgatacctgggtgagcgcggggcgacgggcgcggcgaccccaccaccactgggctggagaagcaggggtcgccggacgcccgcccggggcctggaggaggcgggatgatcttagttctcattctgcttttgggccggagactgggctcagacagggctagggacttgcccaaggtcacactaccctggtgggtcgcccagggcggaagctcccatggggtgagcgggctgcccgctctggcatgcgctctggctggctgtggagtcgggatctccactcccatttcggtcctgacacgcactggctctgtctgaacctcagtttcctcctcggcaaaaaaacaaaaacaaaacaaaaaacaaacgagatacacacgagggcctctctcattgggtggtggttgcgagggtggaatgggataaagcgcagaaagccctggcacttggcgagcgtctggtcagtggcgctgccctcgatcactctgcccctctgggtgcctgtcacctcattagtgcagttactcctgggaccaagaccaggaaatctaaccaataagcaatggtaacagtgactcagtgctcagtccgccctcagtggcccgagtccgaggtgggcatcatggcaccagtttacatctcggaaagggaggctcagagaggtcaagtcacttgcctaaggtcacccagggactgcttagctggctaggatgagaaccagcctgctccaacgccccctcgtggaacagttgcgagcctaggaattaaatgttccctcccccaggctatgccaatgaggtgggcgaggctttccgctctcttgtgccagcggcggtggtgtggctgagctatggcgtggccagctcctacgtgctggcggatgccattgacaaaggcaagaaggctgga

SEQ ID NO: 1038 - DNA, 6000 bp, Homo sapiens
gcaagtgaggaattttttttttttttttgagccttgttgtccaggttgcactgcaatggtgtgatctcggttcactacaacctctgcctccgggattcaagcgattctcctgcctcagcctcctgagtagctgggattacaggtgcctgccaccacgcccagctaattttttgtatttttagtacagatggggtttcaccatgttggtcaggctggtttcaaactcctgtcctcaggtgatccacccaccttggcctccctaagtgctgggattacaggcatgagccaacatgcctgaccttttttttttttttgagatggagactcactctgacgcccaggctggatggagtgcaatggtgcgatctcagctcactgcaacctctgcctcccgggtttaagcaattctcctgtctcagcctcctgagtagctgggattacaggcgcataccaacacaccccgctaatttttgtatttttagtagagacagggttttgccaagttggccaaggtggtctcgaactcctgacctcaggtgatccactcgccttggcctcccaaagggttgggattacaggcatgagccaccacggctggccagtttttcttttttaaaaatattttttgtagtctcaactactcgggaggccaaggcaggagaattgcttgatgaacctgggaggcagaggttgcagtgaactgagatcatgccactgcactccagcctcagtgacagagacagacttcattaaaaaaaaaaagaaaaaaaaaatataaaatgtgtgtgtgtgtgtgtgtgtgtgtgtgtgtgtgtgtgtgtattttgttttctgtagaactggggttttgccatgttgcccaggctggttttgaactcttggcctcatgtgatccttccacctcggcctcccaaagctctgggattacaggcatgagccactgtgccaggctattggtccctttttacaagtgacttgccggagggtactcagctggtgcactggcagggtaggattcgaacccaagacaagaaccacgttctttctcaaatcacaccacacacgtgtgttcaggaacccgggggggggggcggtttgttctgttccccgagtgagaccctgtaccaggtgaagacccagacttggctcctctactggggacctgctctgagccctgaggcaacaaagtgtgtttgacattaaccattgacctccctcacctcactcaggtgctgtctttgacgttgttcaaaggccctgtttatcgataggacgtagagccttgggagtaggtgacctgtcgcaggtggtgaccctgatttttattgatgaggctcttgggcgttagcaactctctcccaagggcaaagaagatgtgtgctggtaagagtgtgtaggccacatggtgggaggcttatgtatgctttgtataatctgagtgaccccaacagggagtcacactttgagctcttctcagctgacaccacggggcagtgtgaggccctcagacttgggtgtctgatggatctgagtttgaatccttgctttgcccattcccagctgtgtgactttgtttaaaccatgggacagctctgtgtcagtttgcttatctgtaaaacgggaaggaggccgggctcagtggctcacgcctgtagtgccatcacttgggaggccgaggtgggtggatagcttgagtacaggagttcaagaccagcctgggcaacatggcaaaaccctagctctattaaacaaacaaattttaaaaactggctgggcgcagtggctcatgcctgtaatcccagcacactgggaggccgaggcaggaggtacatttgaggccaggagttcaagaccagcctggccaacctggtgaaatctctattaaaaatacacacaaaaaaattagctgggcttggtggtgcatgcctgcagtcctagctactcgggaggctgaggcaggagaatagcttgaacctgggaggcggagattgcagtgagccaagattgtgccactgcactccagtctgggcaacagagcgagactccatctcttagagaaaaaaacaaaccaaaaaaaagactaaaaaatccatttaacagatgaggcacaagagtttaaataattttctctgaaaaaattagctgggtgcggtgacgtgcgccttgtagccccagctacttgggaggctgaggcaggaggatcgcttgaacctgggaggcggaggttgcagtgagctaagagagcactattgcactccagcctgggtgaatgggtgagactctatctcaaaacaaaacaaaagccaacaaacaaaaaaacaggaaaggaaatcggaccagccttacaggggtatcttgagggaaaaaaaaatgcacgtttctgcaaagcaccttgcctggtactaggaacatggtagatggttccttagagtgcatgaggatggggtcaccaaggatagggcagtgtgtgaagagggctcgggacaaagccctgaggaaccctagtattttggggtaggctagaagacaagcccatacagcaaatagaagagcaatggccggagcagcagaagggaagctgggagagtcggtcaaggaagggtgagcagtcgtgcccagtccagccaagagggccagggaggtgggcactatgaaacctccttggctttgacaacaaggagggctctgatggccacggtggaggagtagggacagggtgagagcacactgagctgatgggtgggtaggaggtgaggaagaggagatgaggaagtttggtgagaagaaaagcttcatgggagaaccagagtgtcctttacacatgtcagaaatcaattatttagaatgctccagctctacctaattttcactgttttgaaatcaatcttagtccaacctcatcagaaaagctggaagggctctaagccctctaagagctagaaggaaccgaggaggtccccccatccagggctggccctcctcccatctctcactgggaccccatccttatggggggtggagtggatgattcattactatctagcatgctctttaaatatattcactaggggaaagattagcctggtttgttaacctcgattccaacagcaaaagtgactcttcaaagcatggtgaagcctggggtagtggcctcctcctagacccacattcaaatcctgtttcatgggcccccagaagtgtgatcgtttcagcatcatagcaggaagaggaaggcctgggaggcaggaaacctggtatggagaccccagctctgctcactcgctgtgcaaactagggccagcccctcctttccctcagacctcagtttcccgttattcaggataaggggttagacaggggtgattctaagggtcctgccagctctgacatttcagcatgtggatatctattctaaagtccttgaaacagttaagtccaattctccagatggaaaacaggtccagaaaaggcctggtctccagttccctcccttctcccttcgaacatgtcttactctctagagcaagattccaggcctgaaatatggcttcccaattacctaaggatgaagcctcaaatctttggcctggcatttaaaagactccgtaatcttgttttacccaacctcacttcccattcttaggcctctcttctcaccatctcccaggtcactgccaagcctttgccaatgctgtaccccaggccttaatctttttcctgactctccttcaagatccagcttatccctgtgggctgagcatgcagtagatgctcaataaaattctcagcgagcccaaggccccctctcctgcactgcccttggcgtgttgaaatcaagtgggggccttgttttaatcatcattttcctagcttgtcgggcagcccagtccagggcctggcacaagggaccctcagcatccaataccagccaggattgggaggggctcagtgaccagccagttgggccaccccagctctttgccacaagagaaagttcagcctgggtttggactcagatcctggccccaccacttacaggctgcgtaaccctgagcaagtcactaacctcgcttttcctcaggttccacgttttaaatatggggagaccagctgtgcccactgtgggctgggtagtgaggattaaagaggaggatgcttgtacgggactagcactgggctggctcctaatgtgtcctgaatattacttgtcccgccctggccacccagtcccctcctctggtggaaggcacagcctgcccaaggctacgtctcaggttgggttcgattgtgtgtgtctgtgtagcggggctgtccccgagggtcggactcgatcctgcccggaccagtacaaggtgtggcccagcagaacgcatggacaggcagggctcggggcgggcgggacggctggggcggggctgggcggacccgcccctcggggcacgcggtctcccggcttctccgccagtatgtttgcttgcttttggggcccttctcaagccagatctctaacgtggatggagtggcgcgtttcagggtggggctatgacaatgcactgcatgtgcagccgccatcaccgcgccccctccaccggctccgcagtctcctgcccggctttcccttctccacctccatctctgcggcggtaaaatgcagcactcgcagagcgcctgcgcggctttcaggccgggcggcggcggcggcggtggctatttatagtaggtgacgtcaccttgaaatagaccgttagggccggcccgcccttcccccctcccactcccgccgctccccgccgcccggcctggccactctcactgcgcaggcgtcgtcccgtcctcccatcccccagcgcggccgcgtctcctccctcggcgttgtccgcggcgcgagccacagcgcgcggggcgagccagcgagagggcgcgagcggcggcgctgcctgcagcctgcagcctgcagcctccggccggccggcgagccagtgcgcgtgcgcggcggcggcctccgcagcgaccggggagcggactgaccggcgggagggctagcgagccagcggtgtgaggcgcgaggcgaggccgagccgcgagcgacatgggggaccgggagcagctgctgcagcgggcgcggctggccgagcaggcggagcgctacgacgacatggcctccgctatgaaggcggtgagcgcgccgggagcccgggcggctggccggggggggcctggcgttggggagggacggggatggccgcgggcgcgttcccctcccggccatgggcgacccggcgacccggctgggcgtggccgcccgcccgcccttagcccgcgcttcccgctcccgctgggcgccccgccacttcctgaggctgggcccagggtgggggatccgggagggtgcagttcgggatcgcgaaggcagccccggaaggggggcgggccggtcggggtcgccacatcttagttcggaacccggccgggggcagagggtgccctaggggacgcgaaggagccgcatttctcctagagcgtttcaccggacccgggggctccccctctcgtcttcctccgttccccaacttggaataaagaatcacctagtaagtggcgccctgtctcagctggttttctctgccacgacctgaagtctgcaattccgatctgttttgctctgctcgttcgaattgttctggttccatcttcccacgcctgggggtctggctttgtgtgcgaagacccctttcctgcagtctaggcgtggacgggggcgggagagtgggcggagggtgtggggccccactccacagccccaggtttgctgctgcgctgtctgcttggagattaaaatgaaacgtgacttctaggtgagacgaatctgtgtgtctttgcattcctgagaccctcataaatcgattctgcagcttctccggtggatgagtcgtgcccagccacaccctagcaaaataccgtgggtcacacaccacctgcatttctgagttccggttacca

SEQ ID NO: 1039 - DNA, 6000 bp, Homo sapiens
tgagtagctgggattacaggcgcataccaacacaccccgctaatttttgtatttttagtagagacagggttttgccaagttggccaaggtggtctcgaactcctgacctcaggtgatccactcgccttggcctcccaaagggttgggattacaggcatgagccaccacggctggccagtttttcttttttaaaaatattttttgtagtctcaactactcgggaggccaaggcaggagaattgcttgatgaacctgggaggcagaggttgcagtgaactgagatcatgccactgcactccagcctcagtgacagagacagacttcattaaaaaaaaaaagaaaaaaaaaatataaaatgtgtgtgtgtgtgtgtgtgtgtgtgtgtgtgtgtgtgtgtattttgttttctgtagaactggggttttgccatgttgcccaggctggttttgaactcttggcctcatgtgatccttccacctcggcctcccaaagctctgggattacaggcatgagccactgtgccaggctattggtccctttttacaagtgacttgccggagggtactcagctggtgcactggcagggtaggattcgaacccaagacaagaaccacgttctttctcaaatcacaccacacacgtgtgttcaggaacccgggggggggggcggtttgttctgttccccgagtgagaccctgtaccaggtgaagacccagacttggctcctctactggggacctgctctgagccctgaggcaacaaagtgtgtttgacattaaccattgacctccctcacctcactcaggtgctgtctttgacgttgttcaaaggccctgtttatcgataggacgtagagccttgggagtaggtgacctgtcgcaggtggtgaccctgatttttattgatgaggctcttgggcgttagcaactctctcccaagggcaaagaagatgtgtgctggtaagagtgtgtaggccacatggtgggaggcttatgtatgctttgtataatctgagtgaccccaacagggagtcacactttgagctcttctcagctgacaccacggggcagtgtgaggccctcagacttgggtgtctgatggatctgagtttgaatccttgctttgcccattcccagctgtgtgactttgtttaaaccatgggacagctctgtgtcagtttgcttatctgtaaaacgggaaggaggccgggctcagtggctcacgcctgtagtgccatcacttgggaggccgaggtgggtggatagcttgagtacaggagttcaagaccagcctgggcaacatggcaaaaccctagctctattaaacaaacaaattttaaaaactggctgggcgcagtggctcatgcctgtaatcccagcacactgggaggccgaggcaggaggtacatttgaggccaggagttcaagaccagcctggccaacctggtgaaatctctattaaaaatacacacaaaaaaattagctgggcttggtggtgcatgcctgcagtcctagctactcgggaggctgaggcaggagaatagcttgaacctgggaggcggagattgcagtgagccaagattgtgccactgcactccagtctgggcaacagagcgagactccatctcttagagaaaaaaacaaaccaaaaaaaagactaaaaaatccatttaacagatgaggcacaagagtttaaataattttctctgaaaaaattagctgggtgcggtgacgtgcgccttgtagccccagctacttgggaggctgaggcaggaggatcgcttgaacctgggaggcggaggttgcagtgagctaagagagcactattgcactccagcctgggtgaatgggtgagactctatctcaaaacaaaacaaaagccaacaaacaaaaaaacaggaaaggaaatcggaccagccttacaggggtatcttgagggaaaaaaaaatgcacgtttctgcaaagcaccttgcctggtactaggaacatggtagatggttccttagagtgcatgaggatggggtcaccaaggatagggcagtgtgtgaagagggctcgggacaaagccctgaggaaccctagtattttggggtaggctagaagacaagcccatacagcaaatagaagagcaatggccggagcagcagaagggaagctgggagagtcggtcaaggaagggtgagcagtcgtgcccagtccagccaagagggccagggaggtgggcactatgaaacctccttggctttgacaacaaggagggctctgatggccacggtggaggagtagggacagggtgagagcacactgagctgatgggtgggtaggaggtgaggaagaggagatgaggaagtttggtgagaagaaaagcttcatgggagaaccagagtgtcctttacacatgtcagaaatcaattatttagaatgctccagctctacctaattttcactgttttgaaatcaatcttagtccaacctcatcagaaaagctggaagggctctaagccctctaagagctagaaggaaccgaggaggtccccccatccagggctggccctcctcccatctctcactgggaccccatccttatggggggtggagtggatgattcattactatctagcatgctctttaaatatattcactaggggaaagattagcctggtttgttaacctcgattccaacagcaaaagtgactcttcaaagcatggtgaagcctggggtagtggcctcctcctagacccacattcaaatcctgtttcatgggcccccagaagtgtgatcgtttcagcatcatagcaggaagaggaaggcctgggaggcaggaaacctggtatggagaccccagctctgctcactcgctgtgcaaactagggccagcccctcctttccctcagacctcagtttcccgttattcaggataaggggttagacaggggtgattctaagggtcctgccagctctgacatttcagcatgtggatatctattctaaagtccttgaaacagttaagtccaattctccagatggaaaacaggtccagaaaaggcctggtctccagttccctcccttctcccttcgaacatgtcttactctctagagcaagattccaggcctgaaatatggcttcccaattacctaaggatgaagcctcaaatctttggcctggcatttaaaagactccgtaatcttgttttacccaacctcacttcccattcttaggcctctcttctcaccatctcccaggtcactgccaagcctttgccaatgctgtaccccaggccttaatctttttcctgactctccttcaagatccagcttatccctgtgggctgagcatgcagtagatgctcaataaaattctcagcgagcccaaggccccctctcctgcactgcccttggcgtgttgaaatcaagtgggggccttgttttaatcatcattttcctagcttgtcgggcagcccagtccagggcctggcacaagggaccctcagcatccaataccagccaggattgggaggggctcagtgaccagccagttgggccaccccagctctttgccacaagagaaagttcagcctgggtttggactcagatcctggccccaccacttacaggctgcgtaaccctgagcaagtcactaacctcgcttttcctcaggttccacgttttaaatatggggagaccagctgtgcccactgtgggctgggtagtgaggattaaagaggaggatgcttgtacgggactagcactgggctggctcctaatgtgtcctgaatattacttgtcccgccctggccacccagtcccctcctctggtggaaggcacagcctgcccaaggctacgtctcaggttgggttcgattgtgtgtgtctgtgtagcggggctgtccccgagggtcggactcgatcctgcccggaccagtacaaggtgtggcccagcagaacgcatggacaggcagggctcggggcgggcgggacggctggggcggggctgggcggacccgcccctcggggcacgcggtctcccggcttctccgccagtatgtttgcttgcttttggggcccttctcaagccagatctctaacgtggatggagtggcgcgtttcagggtggggctatgacaatgcactgcatgtgcagccgccatcaccgcgccccctccaccggctccgcagtctcctgcccggctttcccttctccacctccatctctgcggcggtaaaatgcagcactcgcagagcgcctgcgcggctttcaggccgggcggcggcggcggcggtggctatttatagtaggtgacgtcaccttgaaatagaccgttagggccggcccgcccttcccccctcccactcccgccgctccccgccgcccggcctggccactctcactgcgcaggcgtcgtcccgtcctcccatcccccagcgcggccgcgtctcctccctcggcgttgtccgcggcgcgagccacagcgcgcggggcgagccagcgagagggcgcgagcggcggcgctgcctgcagcctgcagcctgcagcctccggccggccggcgagccagtgcgcgtgcgcggcggcggcctccgcagcgaccggggagcggactgaccggcgggagggctagcgagccagcggtgtgaggcgcgaggcgaggccgagccgcgagcgacatgggggaccgggagcagctgctgcagcgggcgcggctggccgagcaggcggagcgctacgacgacatggcctccgctatgaaggcggtgagcgcgccgggagcccgggcggctggccggggggggcctggcgttggggagggacggggatggccgcgggcgcgttcccctcccggccatgggcgacccggcgacccggctgggcgtggccgcccgcccgcccttagcccgcgcttcccgctcccgctgggcgccccgccacttcctgaggctgggcccagggtgggggatccgggagggtgcagttcgggatcgcgaaggcagccccggaaggggggcgggccggtcggggtcgccacatcttagttcggaacccggccgggggcagagggtgccctaggggacgcgaaggagccgcatttctcctagagcgtttcaccggacccgggggctccccctctcgtcttcctccgttccccaacttggaataaagaatcacctagtaagtggcgccctgtctcagctggttttctctgccacgacctgaagtctgcaattccgatctgttttgctctgctcgttcgaattgttctggttccatcttcccacgcctgggggtctggctttgtgtgcgaagacccctttcctgcagtctaggcgtggacgggggcgggagagtgggcggagggtgtggggccccactccacagccccaggtttgctgctgcgctgtctgcttggagattaaaatgaaacgtgacttctaggtgagacgaatctgtgtgtctttgcattcctgagaccctcataaatcgattctgcagcttctccggtggatgagtcgtgcccagccacaccctagcaaaataccgtgggtcacacaccacctgcatttctgagttccggttaccatctcactctctctccacgttattttacgttttctgtaaatgaatatttcctctccctgcgtcaaggtcacacagtggtagaacaactgcgaccaccaacctatgttcagtgtacaacctcctgagacctgggaggatccccttgaactccgccttagacctatacattcagaaattcgggcggtgagactcagacatctgcattgtaaccagctctcacaggcgatttttagctggcttaagtctgagaattactgcccatgattatagtaaatgtatcctttgctggccttttggagggagttccgaaaaaaaactgccaatacaaaggctccctaaaatcttaagtcatttggaaagctcatttgaaggcttttgatgttaatatcagatgaaatatgtagttggggccaatatttaggatt

SEQ ID NO: 1040 - DNA, 6000 bp, Homo sapiens
gcaacctagagacagaaattttggggcctgcataaaaatatactaaagggtgcagggagaaaaatacattaaaggcaatatggagaaacaactggtgccaagaatatgaaataatttcttaaaataccccaaataaaatgtaacatagtcctgcacttcttaactcaggagaaactcaaattcaatactttgttaagcaaaaaaaaaaaaaaaaaaaaaaaaaaaaaaaaaaaaaaggcctccaagccttcagaacaagcaaaatccagatatgtgagtttccctcttatgtttctctgttgtagctaaaacccataaatggcagattgttcttaatcgtatttggaaaaaaaaaatgacttgcacccaacagataaaattatttgtttagtaagcccacttatgaagagttcttggatttcagtcaccagtgctgacaatggttaatataccagaatgtatactagacatattatccctttgcctcatggggcattgttacatagtggttaaaatgagagctctaaatttgagtttgaatcttgaattcacaacttactagctgtttgaccatgagaaaatcaacctctgaaagtctcatttgtaaaggggagtaacagtacctatcctgaattgttaaacaagaatgtacacatggaaggtggcgggcacctgtagtcccagctacttgggaggctgacacaggagaatggcgtgaacccaggaggcggagcttgcagtgaaccaagatcctgccactgcactccagcctgggtgacagagcatgactcccccccccaccaaaaaaaaaagtacacatggactaacagctaccgtttaccaagtgcctaaaaagttaaataagttctaaccaagcgcagtggctcacgcctgtaatcccagtactttgggaggccgaggcaggtggataacctgaggtcgggtgttcaagaccagcctgaccaacatggagaaaccccatctctactaaaaatacaaaattaggcgggcatggcatggtggtgcatgcctgtaatcccagctacttgggaggctgaggcaggagaattgcttgaacccgggaggcagaggttgcagagagccgagattgctccattgtactccagcctgggcaacaagagcgaaactgtctcaaaaaaaaaaaaaaaaaaaaaagtaaaatatgttatataaacttgctaaatgtaacacacacacacataaaacgttaggggtaccctctccgaaaccgtatttctggaaaagtgtgacgctacagtctgtcactgatataaaatcccagacaaagaccaactaaagaaaatccccaccaaagaaaatacatttttggtttctttaagggagtcagttccggactgtggaagttcttctggggataattcagggacccaaacccacatggggactacagtttctatttcagtgcaagaaagccacgtaagctgtttgcccacctgaaaggaccttttaaattcaaactattacaagaataatccagagccttcttccttcctcaaagacgattacattttaaatgcccagttagtgggaaacatagctccctagtttttacatatttcaaactgtagtatcaatgtggctttaagatttcctactggttgggtgtggtagctcactcctgtaatcccagcactttaataggctgaggcaggaggactgcttgaggccaggagtttgagaccaacttgggtaccatatagagatcctgtctatacaatttaataattagctgggcacggtggcatgcatctgtagtcccagctgctcaggaggttcacttgagcccaggagctcaaggctacagtgaattatgatcgtgccacgactgcactccagcctgggttccagaacgagaccatctctttaagaaaaaaaaaaaaaatactaatcacacctcaaaatcctcctactctctgtgacactgatctgtctcacctggggcagtcagctgtgcacttttacacagcacctgctcatttccccacttcccagaatctcacagttgttgcaacaacagccttttgccagtggttgggccaaatgcccctcctctccgactcctgtttccttaaactgtagttttgtttcctgcacttaagatttctagggagccgctgtggctcaggccggttgccctggcactcggggaggtgaggctacacgttcgaggccaacctggtcaacactgattaaaaaaaaaagatttctatatatatattctgcaggtactttaaacgtgtttctgcccgttttctgtcaacactgtaatcaactggtgtatcagtgttaaaacacaatgctagcccagtaatttttacatttgataactttacagttaccatctatgttttaatataaaatagatgacttagggccataatacatgatgaaattatgtctgtctatgaatatccaccagaaatctatctggttattttccctctttccttaaatcacttagtcttctggactaacatttaatcccactttataggtttatttcagttatcaaatggtatttacagagactacgaattgtgtagcctagaattgcctagcctagaaaggacttaggttctagaatctttcacaatatttcttcccactattatactctatgcaagctggtaggtatgagatagagcttgaagatactcctttatgcttcacttcagaaacatttcttgcttcttcaaattatggagagaagcagggaagagaagttctcaacaggtttgaggcaagaccattgtttccagtatgcacgatttttcttcaagcttaccaacactgtcctccaggtgacgctggtagaatgaggaacatcaatcattacaggaaggcagtattatcaagtgagcattttaattatgaaggaaacagaaaacaagttagaagactgaaggcaaaactgacttgttaataacagcaacatcactagttttatacttcagaggacctaaagccaagatgtaagtttcaaggttacagactggtggcatcagaatatatccttaacacatgtgtcctgctccatcctccctacagcaggctacttacctgcccttccccagccctgaagaaagcccaggtaaacccagagggttactgaaacttacaccctttccaaaagccttagttaaggctgatgagattaataacatagagactgagtcatcccagtaacattaagaatttaatctacaaacaccaagttagcagggaaagtgacccctgccagtcccttccaatatattcttttttttcttttaaagaaaatacctataagcacaatatattccatttagatgatgggggagaaatgggtttatcaccattctgagatggcagaattaaagcttggattgactcttctacgctgggtggcttttccaactcattaattatttcaaatatagatattatagattcctttggtttacaaaaggctaccttaaccctccagagaagatctatggacacaagtagcttgctgcaggaaagcattttacaagcctactagaaagccagtctttttctctgctcaaactagatttcgttctggtaacatctctccattcttgcctttttcccccatttcaagttgcctcaggtttctgattgttccagaacacaccttctagccatttttccttaacctccatttccccttcctttaaacctcgtccctcctttcttttcaccacatttatttcccaaagggctccgaacactgcagtctttacgtctcacttagagggtgagcaaccacttcatgaaaatgtgtggagaggcctcagcctgcataatcccagcaccactcagttactggggaggaggggcttaagtgtgacctgctgtggacagaggcagctttatcccacagaaaattaaggttcagggtcccttccaaggaaatgcattcgtcagtcccatttttgtaaaatatgcaaaactatattttagattttcttttaaaggaccccctgaattacataaagttcagcctccagacctagaccgtcccccggtctggaagaaaacctgcctcaccacaacagcatgctaatagtgctcaagtcaagatcaccaacaaatcaacatacgggcaacggtgttgctggtttccaaacacacccagttatgtgtgtaacaaggacaccagaggaaaggcaactcttcaagcacctttcttacctgaacaatcctaaatattggccccaactacatatttcatctgatattaacatcaaaagccttcaaatgagctttccaaatgacttaagattttagggagcctttgtattggcagttttttttcggaactccctccaaaaggccagcaaaggatacatttactataatcatgggcagtaattctcagacttaagccagctaaaaatcgcctgtgagagctggttacaatgcagatgtctgagtctcaccgcccgaatttctgaatgtataggtctaaggcggagttcaaggggatcctcccaggtctcaggaggttgtacactgaacataggttggtggtcgcagttgttctaccactgtgtgaccttgacgcagggagaggaaatattcatttacagaaaacgtaaaataacgtggagagagagtgagatggtaaccggaactcagaaatgcaggtggtgtgtgacccacggtattttgctagggtgtggctgggcacgactcatccaccggagaagctgcagaatcgatttatgagggtctcaggaatgcaaagacacacagattcgtctcacctagaagtcacgtttcattttaatctccaagcagacagcgcagcagcaaacctggggctgtggagtggggccccacaccctccgcccactctcccgcccccgtccacgcctagactgcaggaaaggggtcttcgcacacaaagccagacccccaggcgtgggaagatggaaccagaacaattcgaacgagcagagcaaaacagatcggaattgcagacttcaggtcgtggcagagaaaaccagctgagacagggcgccacttactaggtgattctttattccaagttggggaacggaggaagacgagagggggagcccccgggtccggtgaaacgctctaggagaaatgcggctccttcgcgtcccctagggcaccctctgcccccggccgggttccgaactaagatgtggcgaccccgaccggcccgccccccttccggggctgccttcgcgatcccgaactgcaccctcccggatcccccaccctgggcccagcctcaggaagtggcggggcgcccagcgggagcgggaagcgcgggctaagggcgggcgggcggccacgcccagccgggtcgccgggtcgcccatggccgggaggggaacgcgcccgcggccatccccgtccctccccaacgccaggccccccccggccagccgcccgggctcccggcgcgctcaccgccttcatagcggaggccatgtcgtcgtagcgctccgcctgctcggccagccgcgcccgctgcagcagctgctcccggtcccccatgtcgctcgcggctcggcctcgcctcgcgcctcacaccgctggctcgctagccctcccgccggtcagtccgctccccggtcgctgcggaggccgccgccgcgcacgcgcactggctcgccggccggccggaggctgcaggctgcaggctgcaggcagcgccgccgctcgcgccctctcgctggctcgccccgcgcgctgtggctcgcgccgcggacaacgccgagggaggagacgcggccgcgctgggggatgggaggacgggacgacgcctgcgcagtgagagtggccaggccgggcggcggggagcggcgggagtgggaggggggaagggcgggccggccctaacggtctatttcaaggtgacgtcacctactataaatagccaccgccgccgccgccgcccggcctgaaagccgcgca

SEQ ID NO: 1041 - DNA, 6000 bp, Homo sapiens
tgaacttttcattagttctcctggctcctgtattttggtatttgaagtgttgggaactggtgctaagtatcatccatcaagattggctatccatctttttgttttaatggactgtctgattttacatgggtctataattttccagtctgggaaaaactcagttttctttagttatctggtcaagtagtaagccatcttcatttcatgtttccttttgttaactgaattataacccaggagtattaaaaaatactgtatttaaatgtatccagttatttcctagttaggctctggctggggtattaggaacaatatttgcttgctgagatatgttagtcaccctcagctaatgctgatagtgattcattcagactggcaggcaaccagatgatttttacataaacactaatactcccagtaaatgatttttcttgtgaaggtgtcatcataaatactgcccagtagccttttttggcagcttattcctgatggagaaagaatatgcttacagatacacccaaacttcacgttagtaggaagccctgccacaccttttattggtgcacaggaaaaacgaaatcatggaacattggagctgaaggaggccttggagatcatttgggctaatcctgcttattttactttggatgtccaaaaaggttgtgatttgtttaaggtcacatagctagctcagactaaacttcagatgtcttgggtttaataattataccgccttttgtgttatgcaagcattctgtattatacatacatgtatttcagatttgtactcactttaaatgatatactctgggaagttaccttggtgtatctttgccagtttcacagaagcagctttgttagtcacaggaggaagtatattgtgactccttatggatattatttgtattttaatgccaaatggccttagtttaattactacaagatgaaaggagctctccaaattctgttgttgccttatgctttgttttattgaatattgctctagaaacgcaagtcattctagaggattcaagcattctgaaatttatcagaatatttgggatggaattttgattcagaagtgttgttcgttaaaagactaagtagttactcatctttttgtagttcataagtgtgatgattgggttttgacatgcaggtgtgagatgtgccaccctcaaaccttgttacaacatagacatgtgaccctctgatgtgggcaaaaaaagactaagttattaaatatttacaaagtctctattttccgtaagaaaatgtatgtaagtgtttaaaggcacttactggaggaggaaactagtggggttataggtgttcagctggatttaaggggagcatggattgtagattcatggtagactggggcagatcacagtgagaggtatggagactactaatgaatatgtgaggatgaataatgagaaccctggcttgaccagagtggaggcagcacccctggggaatggtcaggatagctgttagccaaagaccacactgaagaaagaagtgggtaggcaaaggagagactttgcctgtgttaagggtttgtagcagaagagtaggggtcctggggacagggaaatggagaaattaagagtgagctggtatttttattttgtctggggcttgggggtagggaggactcagacaattgcttgttttactttgtgagaacttggcacgttttctgatttttacctgtaataatgattacacttgctgcttatgtccttgaaccactaattccccaaataaaccatcattgttcatgatttctgatactccactgctcagtcttctcaatccattttaagtgtgtctatttgaatatgctattgataactttccccaatgaacttggccttttccctctggaggttctgtccttacagattggtttaagtaataccttttttgtttagtgttttatggtttcctaagtgctttgctttcttttttttcattattgaaattaaagaccttttggataagcagagactgatttaataaaattaaagacctttaccagtaggtcatattaaggaatccctctactttagacgacacaccatcttttaagggcttgtgaaatgtcctgggtcaatttaggaagtcattttctttgcttgggcccagaccaactctgttagcaactctgttaggaactcttgttaggaaactctgttagtttcctagggggtgctgaacctagtacgacaaactggatagtttaaaataataaatgtattctctcatagttctggacgctagaagtttgaaagtgaggtgtaggcaggccacgctccctctgaaggctctagggaagaatccttcctaggcactctcccagcttctggtggcttctggcaacccttggtgttccttggcttgtagatgcgtcactccagtctttgcctccactgtcacatggcattcttcctgtgtgtgtgtcaaaatctcactatccttataaggacacctgtaattgcacttagggcacaccctaatgtccagtatgacttcatcttaactaattacatctgcaaagaccctatttccaaataagctcacattcacaggaacctagggtcagaacttcagcgtatcttttggcgggggatacagttcaaccactgcaaagtctaataatgctcttcctactaactgcatagctagttcacttgtagttggcatcatggagaactaagggaagttaaagcttgtgaaatttaactcttccacttaaaataattgatgcttccatccttgatgaccagagtttcctgtgaggtaggtcagagtacaacttcctgctgagtagctgtgcttcctttcactaggagctgggggtactttcatgtcacttatgaattgttcttcattttggtttgggagagggctgggagtatcagttagggttccatgtgtagccacacagggcgaagctctggccactggatctgtgtgatgttccatctgatctgtgaagccccaccatctgttaatgtgtatttgaggagtggttggttctttccagagtataaagctggaagcagagtctggaacacttccagtctgttgtctttgaacatttgacaaagggaccgtacgatcttactgttcagagtatcttttttttttttttttttttcttttgagacggaggcttgctctgtcgctagctaggctggagtgcagtggcacgatctgggctcactgcaacctccgggttcaagagtttctcttgcctcagcctcccaagtagctgggactacaagcgcgtgccaccacgcccagctaatttttgtatttttagtagagatggggtttcaccatgttggccagaatggtctcgatctcttgacctcatgatctgcccgcccttggcctcctgaagtgctgggattacaggcataagccatcgcgcccggcctgttcagagtatcttttgcagaatggctgaagctcgaggttttcttcttcaccattatgtactgctgctgtacaaccttttcataattatccttagtcccattcctctaccaaggtgaaagcaacatcttatcagacccgaattatgaatttctcaagcccctatgattttctgttttgggtgccaagtatttatctcttctgttagactatagtctttcttcacatagggttcatgtctatattggttttatccatgggtggtttttattctccagagtgactgacctgttcgtaattccgttcttgagaaggattgttgattatgttgaagggaaggcttcttaccaagattttcagattttgctttcaatgtttatctttttggggttttgcaggtgacagagctgaatgaacctctctccaatgaagatcgaaatctcctctctgtggcctacaagaatgtggttggtgccaggcgatcttcctggagggtcattagcagcattgagcagaaaaccatggctgatggaaacgaaaagaaattggagaaagttaaagcttaccgggagaagattgagaaggagctggagacagtttgcaatgatgtcctgtctctgcttgacaagttcctgatcaagaactgcaatgatttccagtatgagagcaaggtgttttacctgaaaatgaagggtgattactaccgctacttagcagaggtcgcttctggggagaagaaaaacagtgtggtcgaagcttctgaagctgcctacaaggaagcctttgaaatcagcaaagagcagatgcaacccacgcatcccatccggctgggcctggccctcaacttctccgtgttctactatgagatccagaatgcacctgagcaagcctgcctcttagccaaacaagccttcgatgatgccatagctgagctggacacactaaacgaggattcctataaggactccacgctgatcatgcagttgctgcgagacaacctcaccctctggacgagcgaccagcaggatgaagaagcaggagaaggcaactgaagatccttcaggtcccctggcccttccttcacccaccacccccatcatcaccgattcttccttgccacaatcactaaatatctagtgctaaacctatctgtattggcagcacagctactcagatctgcactcctgtctcttgggaagcagtttcagataaatcatgggcattgctggactgatggttgctttgagcccacaggagctccctttttgaattgtgtggagaagtgtgttctgatgaggcattttactatgcctgttgatctatgggaaatctaggcgaaagtaatggggaagattagaaagaattagccaaccaggctacagttgatatttaaaagatccatttaaaacaagctgatagtgtttcgttaagcagtacatcttgtgcatgcaaaaatgaattcacccctcccacctctttcttcaattaatggaaaactgttaagggaagctgatacagagagacaacttgctcctttccatcagctttataataaactgtttaacgtgaggtttcagtagctccttggttttgcctctttaaattatgacgtgcacaaaccttcttttcaatgcaatgcatctgaaagttttgatacttgtaacttttttttttttttggttgcaattgtttaagaatcatggatttattttttgtaactctttggctattgtccttgtgtatcctgacagcgccatgtgtgtcagcccatgtcaatcaagatgggtgattatgaaatgccagacttctaaaataaatgttttggaattcaatgggtaaataaatgctgctttggggatattatctctgtttggtcttgatttttcccccctcgaggaactgtttaaccagtcacaaattgtggtttgaatctctcaaacatggaagcatttgtagtacattatccaagttttcctcccctctcattacattacatattttgcagcacacacataggattcatagattttaaatagttttctgtgaacccagctaacatagcctctctgatcaattttcctgataactggtgctttttaatgagcctcgcagaacaaaatgcagtcttccacagtatagcacctctgaaacattgtgggctctgttgaacttgagagtgtatttaacactgaaggtaaatacggagcttatacacgtcctcaagttttcttaatgtaataagatactaggggcacaacttgcacccctgaaatctttagtgattattgttaagcatttagtattctttaaaatagaaaagcaaacctcattgagttaaaaagcctaacctaccccttaaacacttgcttaaccccaatgtgtctctcgagcctcagcatcactggctgactgttcttgagtgaggtggtttccagctcctcacgatttttatcacctccagagtggcacctaggaatgaacgtttgttaggtgagttggttcagttacacagaacccttaaacgcctttttctatttgtttgtttttttg

SEQ ID NO: 1042 - DNA, 6000 bp, Homo sapiens
gcgatcaatggtgttaactgctctttggactgtccccacagcacaggacaagaccatatcagttccagcaggttccactgaagaaagctcatgtgccttgcagaaacaagacctccagcccagtctaacaggagaccaaccacatgtccatcccattccctcccaaggcatgacagcacctggctgagatgcttgtgtgtattctctgtgtgaagctgagcatgcaaccttcaaagaaaccacaaaggagctactcgtttttaaaggaaaaacacatgaactccacgggcataaggaagacattaaaacagggttggggagaagttcttctccttccatttcatagtacccttcacagaaataattgactgcttgaatatatggtcattgaaacatacatacacacacatacatgcacatgaaaacaagagctggaatatttgactctgctttccatttcccaccaccctagataacacaggatacaacatggctttactgcacacatgtgttttctggcttaaaaacactgagagtagatccctgtggaaagaaatatgaaaacctgaggattcatgcgaatgtagccagaggcgaatgtagccagaggggtcttcaatttgctggcagagctgggggagagctggggcaattttactgccatgaaattggctccagatggaggcaaggaaaggtgtttaccccctgctggtgccagacacagagagatcctgcagtacctcgcatcttaggctcagaattgcccagtgctgggcagcagccccactgagggtctggccagagctcatggggatgggtggaccaggctgtctgttgcttggaaaaggccattttgaatataatgactttcacatggacggtggggcttgggggaaggcatcgtggctagggtctggaggggaagagggaggaaagcaaagaggagcttccctatgaggcaacagaaatgacagtaccttctccaggttgaatttccaaaacccagctctgccctggaagactgggactgtggcatcctctgcagtgttcccagaccgccctaaggcccccaaaccaatgattcacaactatgttgcttccccagagagcatctccccctttggttgacatgtggccagctcaggggtggaggagctccggcagccacgaacccagacgggatgttgactgagagctttgtggccatggcagatgggaggggtgagcttcacccactcaaaggcacccgcaccccaccgatgagtgtggaattgtgctctcccgccctcgcagtgagacgaccgaccaggactgcaggctgagcaaatgggtgttctctggcttatagcgccccctagcaccagccagcgggatagagctccgtgaactctccaaggagccaccacctgcctgtctgaatgctggaaaggggtcggtggtgctgatcattggacccattcaaccaatacttattaaactcgttgttaccaacacttaatccctgtgttctaggggcttagactccagcaagggaaacagatgggtaaataatcacattagagtcagctaagtattgtcaaagaagttgatacagggtgttgtggggatacatgggaggggaatcagaggaggtttcccggaggaggtgacatctaagctgaggtctgaaggatgtggaagagttcagtaactcctgaagaccaaaaaaatggtgataaaaaagacaccttcctaactttttagtgctacgatccaagagacaaacaagcaggtgaacgcataactacactgggctccaccataagccagagcctgtctctcctaggactttggcatcacaatcttctctgaaattctgttttcggcattgattcttgggggaggtagcaatataggaactcagtgttcgttgcgaaactgatggatggtcttcagtcttgggtacgttcccatgtgtcaaacctgtttaaatggcaggacccatctccccttcagaagcattcacttgtcctacaggattccccatggaatcttggagtttttgaggcgagagggatcctggataccactgagttctatctttcatccaataaacacagaagtggacgcctggacaggcaaagtgacttgaccaaggcaggtgcacagctattctgcaacattgggaacaaatctcaggtcttttgattttttgtttccactttactctcttttcatttcccagaaacaaagttttcatgtgcttttttttatagtgatatgtttggaatgcattagctagtaatttaggaagggaaaaaaataaacacacaagagataaacctgtcaggaggacaaacctgtattgcttctgattggctcagagggtgattattatcatggtagagaattatttaatcagtgtaagtaaaatttctctgtgggctgggcactgtacaaagactcaaacgaatctgtctacagatctgaaaagcagatacgagatctgtgaatggctggggtttccaagcccacagtacaagcatgggccacaccttacagcttggaggactgagccctgaaaatgggcaagttccttcacttctctgaaccttatttttcccacatttaaaacaaggatgagtagtttctgaggtcctttttacgacttctcttcctacagactctagcatcctataacttgatacaaagagggtggatatgaactcacctttcctagaaaagttccaggaaagagaataccaggtcatcctagtaggtgtgtagacaggccagatagatcttgaaacttactcagttcttcccagatgtataactctatcattgttcttagctgtcaagagaaagcaggagagcctgcatcttcattctttttttttttttttttttttttggagacggagtctcactccatcacctaggctagagtgcagtggcatgatctcagctcactgcaagctccgcctcccaggttcacgccattctcctgcctcagcctcccaagtaactgggactacaggcgcccaccaccacacctggctaattttttgtgttgttagtacagacggggtttcaccatgttagccaggatggtctcgatctcctgacctcgtgatccgcccaccttggcctctcaaagtgctgggattacaggcgtgagccaccgcacccagcctgcatcttcattcttactgttagcctcaggttcaccccacctagcttattaagtgatgttgaataaccaattcttacatattattaggctcatggacaccatgacatccagactgatgggtgcctgctgaagggggtgaccctagcaggaggactcccctacgcaaggattcatggagtttgctgtttcttttccttagggtgagaaccaaactgccttcacacggtgggcagaggggaactgactcaggtttggaataagagagaacatcccaactgaaaagctcttggaattcgctgaacttcaagacactgtgtggaccagcttaggatagggagtgagaagaaattaaccaaaaggtaatttcgttacttttcagctggaaaaaagatcagattatacttgtgctttcataattaagtagctgctggaaaaaaacgcttcagatgctttctatgagaaaactgctgcttgaagttcagcagaagttatctacttgatacttatattccaggcaaggccttccgttggagaaaatatcggcactttggacaaaactgaaatgtgaaaagaaagggaagagagggcctctatcatgtaagatgcttatccaaagtggatttggtctggaaagtcttctaaaaccttccacatgactgtggaataagtcatgtggggcgcggggataagcgaatctctcaaattccaccacgtatgccctcattcaacctggatccttagagtggcctccagggcactctgctcaggactcagtcagctgttggccacacccatgctctccagtctcctgagaccctatttggttctgagagggctaaaaagcagtgtggctaaatatcccaggcctcaaagtattcctactgtggttggggaagcaatagaatcataccccataaaacaatgaaaacagtgctagaaaaacatcgagagacagaaacatctctacgagttaggccacagttagagtgaaggcagggaaggtttttaaagctgggtggaggggacaagtcaaaaagatgtggaaactggtttccctttcctatggctaaagtgctcaaaggggaaaaaggagtttcaaaaatgttcttggaaataccatctctcacgaattcttcggcctctgctgtcccaatgtcacttgtctgagatgtaaacagaggagttctgagaaagaagctgaacttgcatttctccctgtttctatttgttccaaacttgtggcatttctaacaggatgaagcggaagagaaagggaaagagacaaaagtgtagaaagatggaagatcccagctgcaaatggccatttgcagttagatggaacagctgctgacgttcagggaaatgcatgtctctcttcagatgggaaggagcagtggaaaggggtgacgagttcctggctggccaccaatcatcccatctttctgtgccggttcctcatctggaaagtgggagtgatacttgtgcttgcttttcctacccacaaagattattgtgagagctataatacggtgagatacagaatcctgcttttaaaaatacaaagcagaatcaagatgtcaataataaggatagtaattgtgttagttatctgcaatcatctattatagctagtcgtctaggatcctggatcgttctcctggttttactacagttttggatcagctcacccccaaatcccttgctgaagggtggagctctgtcagccatgggcagggaaccacttcctcttgcctttctactttctgtctttcaaacatgcccagggtctttgcacttgctgttccccctgcctggtacctctctcctgtggcttgccccagagctgatccttgtctttgtccacttctcagcgaggatggcacttcagggagcccttcccttactatcgcagagagagcaggccctccccagtcatgtccaacccagaactctgttttgttttcttcatagccctagcatcacagaaaatcaccctgtgcattcatggatgtccacgggggcaagggctttgtgttgcttaacccagcatcctgaaccgtgtttgttgaatgaatacagaaccccgtttgctctgggagagcacagaaaacagtcttctatcatatatcatagccagctgcaaacagcagatggcttcccatatcccagagagtaagaaccagagagagagagaaagagagagagtttgggtctttctcctctgtgcctgctctctccagagaaactggaggggtagcagttagcattcccccgctggttccaccaagcacagtcaaggtctctaggacatggccacccctcacctgtggaagcggtcctgctggggtgggtgggtgttagttggttctggtttgggtcagagacacccagtggcccaggtgggcgtggggccagggcgcagacgagaaggggcacgagggctccgctccgaggacccagcggcaagcaccggtcccgggcgcgccccagcccacccactcgcgtgcccacggcggcattattccctataaggatctgaacgatccgggggcggccccgccccgttaccccttgcccccggccccgccccctttttggagggccgatgaggtaatgcggctctgccattggtctgagggggcgggccccaacagcccgaggcggggtccccgggggcccagcgctatatcactcggccgcccaggcagcggcgcagagcgggcagcaggcaggcggcgggcgctcagacggcttctcctcctcctcttgctcctccagctcctgctccttcgccgggaggccgcccgccgagtcctgcgccagcg

SEQ ID NO: 1043 - DNA, 6000 bp, Homo sapiens
ggggaagagggaggaaagcaaagaggagcttccctatgaggcaacagaaatgacagtaccttctccaggttgaatttccaaaacccagctctgccctggaagactgggactgtggcatcctctgcagtgttcccagaccgccctaaggcccccaaaccaatgattcacaactatgttgcttccccagagagcatctccccctttggttgacatgtggccagctcaggggtggaggagctccggcagccacgaacccagacgggatgttgactgagagctttgtggccatggcagatgggaggggtgagcttcacccactcaaaggcacccgcaccccaccgatgagtgtggaattgtgctctcccgccctcgcagtgagacgaccgaccaggactgcaggctgagcaaatgggtgttctctggcttatagcgccccctagcaccagccagcgggatagagctccgtgaactctccaaggagccaccacctgcctgtctgaatgctggaaaggggtcggtggtgctgatcattggacccattcaaccaatacttattaaactcgttgttaccaacacttaatccctgtgttctaggggcttagactccagcaagggaaacagatgggtaaataatcacattagagtcagctaagtattgtcaaagaagttgatacagggtgttgtggggatacatgggaggggaatcagaggaggtttcccggaggaggtgacatctaagctgaggtctgaaggatgtggaagagttcagtaactcctgaagaccaaaaaaatggtgataaaaaagacaccttcctaactttttagtgctacgatccaagagacaaacaagcaggtgaacgcataactacactgggctccaccataagccagagcctgtctctcctaggactttggcatcacaatcttctctgaaattctgttttcggcattgattcttgggggaggtagcaatataggaactcagtgttcgttgcgaaactgatggatggtcttcagtcttgggtacgttcccatgtgtcaaacctgtttaaatggcaggacccatctccccttcagaagcattcacttgtcctacaggattccccatggaatcttggagtttttgaggcgagagggatcctggataccactgagttctatctttcatccaataaacacagaagtggacgcctggacaggcaaagtgacttgaccaaggcaggtgcacagctattctgcaacattgggaacaaatctcaggtcttttgattttttgtttccactttactctcttttcatttcccagaaacaaagttttcatgtgcttttttttatagtgatatgtttggaatgcattagctagtaatttaggaagggaaaaaaataaacacacaagagataaacctgtcaggaggacaaacctgtattgcttctgattggctcagagggtgattattatcatggtagagaattatttaatcagtgtaagtaaaatttctctgtgggctgggcactgtacaaagactcaaacgaatctgtctacagatctgaaaagcagatacgagatctgtgaatggctggggtttccaagcccacagtacaagcatgggccacaccttacagcttggaggactgagccctgaaaatgggcaagttccttcacttctctgaaccttatttttcccacatttaaaacaaggatgagtagtttctgaggtcctttttacgacttctcttcctacagactctagcatcctataacttgatacaaagagggtggatatgaactcacctttcctagaaaagttccaggaaagagaataccaggtcatcctagtaggtgtgtagacaggccagatagatcttgaaacttactcagttcttcccagatgtataactctatcattgttcttagctgtcaagagaaagcaggagagcctgcatcttcattctttttttttttttttttttttttggagacggagtctcactccatcacctaggctagagtgcagtggcatgatctcagctcactgcaagctccgcctcccaggttcacgccattctcctgcctcagcctcccaagtaactgggactacaggcgcccaccaccacacctggctaattttttgtgttgttagtacagacggggtttcaccatgttagccaggatggtctcgatctcctgacctcgtgatccgcccaccttggcctctcaaagtgctgggattacaggcgtgagccaccgcacccagcctgcatcttcattcttactgttagcctcaggttcaccccacctagcttattaagtgatgttgaataaccaattcttacatattattaggctcatggacaccatgacatccagactgatgggtgcctgctgaagggggtgaccctagcaggaggactcccctacgcaaggattcatggagtttgctgtttcttttccttagggtgagaaccaaactgccttcacacggtgggcagaggggaactgactcaggtttggaataagagagaacatcccaactgaaaagctcttggaattcgctgaacttcaagacactgtgtggaccagcttaggatagggagtgagaagaaattaaccaaaaggtaatttcgttacttttcagctggaaaaaagatcagattatacttgtgctttcataattaagtagctgctggaaaaaaacgcttcagatgctttctatgagaaaactgctgcttgaagttcagcagaagttatctacttgatacttatattccaggcaaggccttccgttggagaaaatatcggcactttggacaaaactgaaatgtgaaaagaaagggaagagagggcctctatcatgtaagatgcttatccaaagtggatttggtctggaaagtcttctaaaaccttccacatgactgtggaataagtcatgtggggcgcggggataagcgaatctctcaaattccaccacgtatgccctcattcaacctggatccttagagtggcctccagggcactctgctcaggactcagtcagctgttggccacacccatgctctccagtctcctgagaccctatttggttctgagagggctaaaaagcagtgtggctaaatatcccaggcctcaaagtattcctactgtggttggggaagcaatagaatcataccccataaaacaatgaaaacagtgctagaaaaacatcgagagacagaaacatctctacgagttaggccacagttagagtgaaggcagggaaggtttttaaagctgggtggaggggacaagtcaaaaagatgtggaaactggtttccctttcctatggctaaagtgctcaaaggggaaaaaggagtttcaaaaatgttcttggaaataccatctctcacgaattcttcggcctctgctgtcccaatgtcacttgtctgagatgtaaacagaggagttctgagaaagaagctgaacttgcatttctccctgtttctatttgttccaaacttgtggcatttctaacaggatgaagcggaagagaaagggaaagagacaaaagtgtagaaagatggaagatcccagctgcaaatggccatttgcagttagatggaacagctgctgacgttcagggaaatgcatgtctctcttcagatgggaaggagcagtggaaaggggtgacgagttcctggctggccaccaatcatcccatctttctgtgccggttcctcatctggaaagtgggagtgatacttgtgcttgcttttcctacccacaaagattattgtgagagctataatacggtgagatacagaatcctgcttttaaaaatacaaagcagaatcaagatgtcaataataaggatagtaattgtgttagttatctgcaatcatctattatagctagtcgtctaggatcctggatcgttctcctggttttactacagttttggatcagctcacccccaaatcccttgctgaagggtggagctctgtcagccatgggcagggaaccacttcctcttgcctttctactttctgtctttcaaacatgcccagggtctttgcacttgctgttccccctgcctggtacctctctcctgtggcttgccccagagctgatccttgtctttgtccacttctcagcgaggatggcacttcagggagcccttcccttactatcgcagagagagcaggccctccccagtcatgtccaacccagaactctgttttgttttcttcatagccctagcatcacagaaaatcaccctgtgcattcatggatgtccacgggggcaagggctttgtgttgcttaacccagcatcctgaaccgtgtttgttgaatgaatacagaaccccgtttgctctgggagagcacagaaaacagtcttctatcatatatcatagccagctgcaaacagcagatggcttcccatatcccagagagtaagaaccagagagagagagaaagagagagagtttgggtctttctcctctgtgcctgctctctccagagaaactggaggggtagcagttagcattcccccgctggttccaccaagcacagtcaaggtctctaggacatggccacccctcacctgtggaagcggtcctgctggggtgggtgggtgttagttggttctggtttgggtcagagacacccagtggcccaggtgggcgtggggccagggcgcagacgagaaggggcacgagggctccgctccgaggacccagcggcaagcaccggtcccgggcgcgccccagcccacccactcgcgtgcccacggcggcattattccctataaggatctgaacgatccgggggcggccccgccccgttaccccttgcccccggccccgccccctttttggagggccgatgaggtaatgcggctctgccattggtctgagggggcgggccccaacagcccgaggcggggtccccgggggcccagcgctatatcactcggccgcccaggcagcggcgcagagcgggcagcaggcaggcggcgggcgctcagacggcttctcctcctcctcttgctcctccagctcctgctccttcgccgggaggccgcccgccgagtcctgcgccagcgccgaggcagcctcgctgcgccccatcccgtcccgccgggcactcggagggcagcgcgccggaggccaaggttgccccgcacggcccggcgggcgagcgagctcgggctgcagcagccccgccggcggcgcgcacggcaactttggagaggcgagcagcagccccggcagcggcggcagcagcggcaatgaccccttggctcgggctcatcgtgctcctgggcagctggagcctgggggactggggcgccgaggcgtgcacatgctcgcccagccacccccaggacgccttctgcaactccgacatcggtaagcgctcctggtgccccgcccgagccccacgctgcagccaggactgcagcgctgcttagggaggcagggcgagccccactcctttcctctgccccaggagaggggcagacggggttggggcggagtggagaaactcgatgtccttgggcgggggcgctggcatagctgagaggggaagatgccctgcagaggaaactcacagtggctgagggagcccctggccgcctttgctttcctaacttaggtcgtgaggttcctaccggtccttttgacatctggaaaatgtccccattcactactaacggaggaagggctagaagagaagggtggggaaagggttcccaaaacttggaatgctaactaaagtgctgggaaattgaatagttaaaaaaaaaaaaaaaagttgcccgccatgtgcacggaaagttgcaggagaaacttggagtactccgagtctgcatcatctcctgcgcctatgaaattcattcttttcactgagacccaacccagctgcaggcttcccaggcaagcgctaaccgagcttctgggactgccaagtttgggtggatttaagggggaaaatgaggagaaagctgtggcattgaccc

SEQ ID NO: 1044 - DNA, 6000 bp, Homo sapiens
agagatgtctggctttgtattaattactgtaggtaaattaataccaaatgccaggaagtaaagtagaggcattttcctattataaacccttgggacaagcccagagaccaccagcagtccagggcttgtgtacgctgagaactgaggggataacagaattgtgcaacaccttggtgccccaccgcccccgttaccaaatctcacagttcacagtatcgccttggcacactgggcttgtgtaatactcatggacttgacctggaatcacaaagcggactcagcttctgttacattcattcaccccagtgactctgggcacacactgtgcctctgaaggaggcacagtggccataaatggaaatagcatttgcctgcttctggggaccttggtcatagacttctgaggctttcctgggagccagtctaagataatgggtaagagtatggactctgaaggcagagtcctctgcttggaatcctagccctgccatttcccaactgtgtggccttaacaagctacttagcctgcctgtgactcaggctcctcatctataaaatgggcataatagttcctacctcatagggttgtcatggtgattcgtgggctaatattaaaggagatttctcaacctcagtaccattgacatttggggccggataattctttgttctgggggctgtcctgagtattatgggatgtttagcaacctccctaccctctacgaactgttgtgacaaccaaaattgtctccagacattgccacatgtcccaaatatttcctaggggggcaaaattgcctccagttgagaaccactgtattagattatgtcgtagatacaaatagccaaatatcagcaatttcacgtggttcaatctaacaattataaagtatttaacagttaaaactctttgaactttgtagatacatttatgtgcttcatctgggataaacgaacccaatgctttcaccagacgctcagaagaataaaaaacatggagaatttctagcttgaattcaacgttcaccagccaaatagaatttctataaagtggggtttgtaatacatccctcccagggctcttttaaggatactgcaaggagaatgtgagtgagaatgtttttgtgggctggaaagtgtcacagagatatcatgagaatgctggctgagttcacgggactcaggtcctaaggttgacaaagaaaaaggacctttgtcacagctacttctctggatttctgaaaaggtgctgggatgtcagacatgtgtagccgaaggagtgttgtggggcagttggaatggggggtatggctggctgcacaggaaggtttctctgggaaggcaccaacctggctagtcaagaggatcggtggcttcatctggggtgaagggggccctggggtgggtagatcagtgaccggccactggacagctgaataggggagcgagattccctcagatccaatgtcagcaagccttctgggtactgagactcctctcctgtgttcctcttattttattgatacataataaatggacatattttgagagtccatgtggtattttgatatattcaaaaatgtatagtaatcaaatcagggtaattgggatattcataaccttaaacatttatcgtttcttcatgctgggaacatctgaattatcctctactagctactttgagatatacaataagttattgtttactgtagtcattctactgattcaatgaacactgggtcttacttgttctgcgtactcgtatttttgtacccattaattatatctctttgccccaatccttattacctttcttgcctctggtaaccaccaatccactgtccatctttatgagatttactttcttagctcccacatgagtgagaacatggtgtatttgtctttctgtgcctggcttattccgcttagcaaaacgacctccagttccagctgcattgccacaaatgacaagatttcattcttttttctggatgaatcatattccattgggtatagataccaggttttgtctatccattcatctgttgatgggcacttaggttgatttcatatcttggctattgtgaatattgctgcagtcaacatgagagtgcagacccctcttccatattccgatttcctttcctttggatacatacccagcagtgggattagggatcatacgggtgtccaaactgggaaagaagaagtcatgatgttccttttgcccacagatgtaccgaggcttcaccaagatgccccatgtgcagtacatccatacggaagcttccgagagtctctgtggccttaagctggaggtcaacaagtaccagtacctgctgacaggtaatggccaactctagcttctaggccagggtttggccaaggtccactgtttcttgacttcagaagaacacatacggagtagttgactcaccaaatgtccagtaaattgtaaggagtctctaatgttgaattcatcccacttacccagtgctaggagcttgaggctcctacacttaggctggactttggaattagctccaccactcacctgggggaggaaatctcctaatttgtagcttctcaactttactgtaaataaaaagggagtatctgttcctctccacctcacactcgacctgttaggcccgtctttgaaagttattcatctttaggcagtcagtgtagtaaaggagaaaacaaaaacaaaaatcattataaagggagtgaagagttggcctctagtcctagctccagtatttaatgggcttgggacctttggcaaatcactttacctctccaagcctcattatcctcatctggaaaatggggctacagtccattttaaaaggtgttgggtagggtgaaataaaatcatgggtctgaaaagtacccagccacagtgcctgggctaagtgggaacatagtaggtgtgaattctctctgggctaggctctggacaaaacaacctctccttgttttcttctttcctcctgtaggtcgcgtctatgatggcaagatgtacacggggctgtgcaacttcgtggagaggtgggaccagctcaccctctcccagcgcaaggggctgaactatcggtatcacctgggttgtaactgcaaggtaagctctggggtcactgggggaaggaggggaggtgctgacttgcagccctagaaacatcagctcccaatgcactgggtgccaggccctcggctgggaagggtatgcatgtgttaggccagggcagaggggcaggtctgagcagatatagtaaggattgttgccccaggtggggcagtgaggaaggcagggaaggaagaatgcctttctgctgtaatcggctgcctccatgatgaccacttggaagctgctggggcatgagggctcttgagtccctggccccacctggcagttcaaggctggaggtataggatcctgacactggcaggttctcccaagtggtttcaagtgggctcaccctggtagctgactcatcgctaaccccaccccaggtaggcaaatgggcccaggactgcagagaccagatgctacagaaggtctctctttaccaggcccatccccctgacccaagtatagggccaaggtgcagcctgcctgctgtgggaggaagttgggccattctctcacttcatcttcaaaacagtcctgtgtggttttaattactatgatctccattctgcagatgagagctcagagaacttaagtaactagccctaggtcccacagttcactgaatctggtttccaacctagggcagctagactccaaagtttatgctctaacctttctaattcctcgattccctaaaacaactgagatctcccacctgagacgaaaaagtcctctcagtagtctaattctgctacttactggctgtgtgacctgcagcaagttacttaacctctcagagcctcctaaaactgtgataagaattaaagagaataatatcaaagcacttatcagaatgtctgttagacagcagatgctcaagctagtgctatttatattatgatcactgagggactgatgtggctaggcttcccatgcagtggccccagggtctgaatccaggctcggtagcctcaggcctgggcataccatggcagagtccatcaactgctgcctgttatctaattgcagatcaagtcctgctactacctgccttgctttgtgacttccaagaacgagtgtctctggaccgacatgctctccaatttcggttaccctggctaccagtccaaacactacgcctgcatccggcagaagggcggctactgcagctggtaccgaggatgggcccccccggataaaagcatcatcaatgccacagacccctgagcgccagaccctgccccacctcacttccctcccttcccgctgagcttcccttggacactaactcttcccagatgatgacaatgaaattagtgcctgttttcttgcaaatttagcacttggaacatttaaagaaaggtctatgctgtcatatggggtttattgggaactatcctcctggccccaccctgccccttctttttggttttgacatcattcatttccacctgggaatttctggtgccatgccagaaagaatgaggaacctgtattcctcttcttcgtgataatataatctctatttttttaggaaaacaaaaatgaaaaactactccatttgaggattgtaattcccacccctcttgcttcttccccacctcaccatctcccagaccctcttccctttgcccttctcctccaatacataaaggacacagacaaggaacttgctgaaaggccaaccatttcaggatcagtcaaaggcagcaagcagatagactcaaggtgtgtgaaagatgttatacaccaggagctgccactgcatgtcccaaccagactgtgtctgtctgtgtctgcatgtaagagtgagggagggaaggaaggaactacaagagagtcggagatgatgcagcacacacacaattccccagcccagtgatgcttgtgttgaccagatgttcctgagtctggagcaagcacccaggccagaataacagagctttcttagttggtgaagacttaaacatctgcctgaggtcaggaggcaatttgcctgccttgtacaaaagctcaggtgaaagactgagatgaatgtctttcctctccctgcctcccaccagacttcctcctggaaaacgctttggtagatttggccaggagctttcttttatgtaaattggataaatacacacaccatacactatccacagatatagccaagtagatttgggtagaggatactatttccagaatagtgtttagctcacctagggggatatgtttgtatacacatttgcatatacccacatggggacataagctaatttttttacaggacacagaattctgttcaatgctgttaaatatgccaatagtttaatctcttctattttgttgtcgttgcttgtttgaagaaaatcatgacattccaagttgacatttttttttcattttaattaaaatttgaaattctgaacaccgtcagcaccctctcttccctatcatgggtcatctgacccctgtccgtctccttgtccctgcttcatgtttgggggcctttctttaactgccttcctggcttagctcagatggcagatgagagtgtagtcaagggcctgggcacaggagggagagctgcagagtgtcctgcctgccttggctggagggacacctctcctgggtgtggagacagcttggttccctttccctagctccctggtgggtgaatgccacctcctgagatcctcacctcttggaattaaaattgttggtcactggggaaagcctgagtttgcaaccagttgtagggtttctgttgtgtttttttttttttttttgaaataaaactataatataaattctcctattaaataaaattattttaagttttagtgtcaaaagtgagatgctgagagtaggtg

SEQ ID NO: 1045 - DNA, 6000 bp, Homo sapiens
ctggggtgaagggggccctggggtgggtagatcagtgaccggccactggacagctgaataggggagcgagattccctcagatccaatgtcagcaagccttctgggtactgagactcctctcctgtgttcctcttattttattgatacataataaatggacatattttgagagtccatgtggtattttgatatattcaaaaatgtatagtaatcaaatcagggtaattgggatattcataaccttaaacatttatcgtttcttcatgctgggaacatctgaattatcctctactagctactttgagatatacaataagttattgtttactgtagtcattctactgattcaatgaacactgggtcttacttgttctgcgtactcgtatttttgtacccattaattatatctctttgccccaatccttattacctttcttgcctctggtaaccaccaatccactgtccatctttatgagatttactttcttagctcccacatgagtgagaacatggtgtatttgtctttctgtgcctggcttattccgcttagcaaaacgacctccagttccagctgcattgccacaaatgacaagatttcattcttttttctggatgaatcatattccattgggtatagataccaggttttgtctatccattcatctgttgatgggcacttaggttgatttcatatcttggctattgtgaatattgctgcagtcaacatgagagtgcagacccctcttccatattccgatttcctttcctttggatacatacccagcagtgggattagggatcatacgggtgtccaaactgggaaagaagaagtcatgatgttccttttgcccacagatgtaccgaggcttcaccaagatgccccatgtgcagtacatccatacggaagcttccgagagtctctgtggccttaagctggaggtcaacaagtaccagtacctgctgacaggtaatggccaactctagcttctaggccagggtttggccaaggtccactgtttcttgacttcagaagaacacatacggagtagttgactcaccaaatgtccagtaaattgtaaggagtctctaatgttgaattcatcccacttacccagtgctaggagcttgaggctcctacacttaggctggactttggaattagctccaccactcacctgggggaggaaatctcctaatttgtagcttctcaactttactgtaaataaaaagggagtatctgttcctctccacctcacactcgacctgttaggcccgtctttgaaagttattcatctttaggcagtcagtgtagtaaaggagaaaacaaaaacaaaaatcattataaagggagtgaagagttggcctctagtcctagctccagtatttaatgggcttgggacctttggcaaatcactttacctctccaagcctcattatcctcatctggaaaatggggctacagtccattttaaaaggtgttgggtagggtgaaataaaatcatgggtctgaaaagtacccagccacagtgcctgggctaagtgggaacatagtaggtgtgaattctctctgggctaggctctggacaaaacaacctctccttgttttcttctttcctcctgtaggtcgcgtctatgatggcaagatgtacacggggctgtgcaacttcgtggagaggtgggaccagctcaccctctcccagcgcaaggggctgaactatcggtatcacctgggttgtaactgcaaggtaagctctggggtcactgggggaaggaggggaggtgctgacttgcagccctagaaacatcagctcccaatgcactgggtgccaggccctcggctgggaagggtatgcatgtgttaggccagggcagaggggcaggtctgagcagatatagtaaggattgttgccccaggtggggcagtgaggaaggcagggaaggaagaatgcctttctgctgtaatcggctgcctccatgatgaccacttggaagctgctggggcatgagggctcttgagtccctggccccacctggcagttcaaggctggaggtataggatcctgacactggcaggttctcccaagtggtttcaagtgggctcaccctggtagctgactcatcgctaaccccaccccaggtaggcaaatgggcccaggactgcagagaccagatgctacagaaggtctctctttaccaggcccatccccctgacccaagtatagggccaaggtgcagcctgcctgctgtgggaggaagttgggccattctctcacttcatcttcaaaacagtcctgtgtggttttaattactatgatctccattctgcagatgagagctcagagaacttaagtaactagccctaggtcccacagttcactgaatctggtttccaacctagggcagctagactccaaagtttatgctctaacctttctaattcctcgattccctaaaacaactgagatctcccacctgagacgaaaaagtcctctcagtagtctaattctgctacttactggctgtgtgacctgcagcaagttacttaacctctcagagcctcctaaaactgtgataagaattaaagagaataatatcaaagcacttatcagaatgtctgttagacagcagatgctcaagctagtgctatttatattatgatcactgagggactgatgtggctaggcttcccatgcagtggccccagggtctgaatccaggctcggtagcctcaggcctgggcataccatggcagagtccatcaactgctgcctgttatctaattgcagatcaagtcctgctactacctgccttgctttgtgacttccaagaacgagtgtctctggaccgacatgctctccaatttcggttaccctggctaccagtccaaacactacgcctgcatccggcagaagggcggctactgcagctggtaccgaggatgggcccccccggataaaagcatcatcaatgccacagacccctgagcgccagaccctgccccacctcacttccctcccttcccgctgagcttcccttggacactaactcttcccagatgatgacaatgaaattagtgcctgttttcttgcaaatttagcacttggaacatttaaagaaaggtctatgctgtcatatggggtttattgggaactatcctcctggccccaccctgccccttctttttggttttgacatcattcatttccacctgggaatttctggtgccatgccagaaagaatgaggaacctgtattcctcttcttcgtgataatataatctctatttttttaggaaaacaaaaatgaaaaactactccatttgaggattgtaattcccacccctcttgcttcttccccacctcaccatctcccagaccctcttccctttgcccttctcctccaatacataaaggacacagacaaggaacttgctgaaaggccaaccatttcaggatcagtcaaaggcagcaagcagatagactcaaggtgtgtgaaagatgttatacaccaggagctgccactgcatgtcccaaccagactgtgtctgtctgtgtctgcatgtaagagtgagggagggaaggaaggaactacaagagagtcggagatgatgcagcacacacacaattccccagcccagtgatgcttgtgttgaccagatgttcctgagtctggagcaagcacccaggccagaataacagagctttcttagttggtgaagacttaaacatctgcctgaggtcaggaggcaatttgcctgccttgtacaaaagctcaggtgaaagactgagatgaatgtctttcctctccctgcctcccaccagacttcctcctggaaaacgctttggtagatttggccaggagctttcttttatgtaaattggataaatacacacaccatacactatccacagatatagccaagtagatttgggtagaggatactatttccagaatagtgtttagctcacctagggggatatgtttgtatacacatttgcatatacccacatggggacataagctaatttttttacaggacacagaattctgttcaatgctgttaaatatgccaatagtttaatctcttctattttgttgtcgttgcttgtttgaagaaaatcatgacattccaagttgacatttttttttcattttaattaaaatttgaaattctgaacaccgtcagcaccctctcttccctatcatgggtcatctgacccctgtccgtctccttgtccctgcttcatgtttgggggcctttctttaactgccttcctggcttagctcagatggcagatgagagtgtagtcaagggcctgggcacaggagggagagctgcagagtgtcctgcctgccttggctggagggacacctctcctgggtgtggagacagcttggttccctttccctagctccctggtgggtgaatgccacctcctgagatcctcacctcttggaattaaaattgttggtcactggggaaagcctgagtttgcaaccagttgtagggtttctgttgtgtttttttttttttttttgaaataaaactataatataaattctcctattaaataaaattattttaagttttagtgtcaaaagtgagatgctgagagtaggtgataatgtatattttacagagtgggggttggcaggatggtgacattgaacatgattgctctctgtctcttttttcagcttatgggtatttatcttctattagtatttgtatcttcagttcattccactttaggaaacagagctgccaattgaaacagaagaagaaaaaaaaaaaaagcagcagacaacacactgtagagtcttgcacacacacaagtgcccaggcaaggtgcttggcagaaccgcagagtgggaagagagtaccggcatcgggtttccttgggatcaatttcattaccgtgtacctttcccattgtggtcatgccatttggcagggggagaatgggaggcttggccttctttgtgaggcagtgtgagcagaagctgatgccagcatgtcactggttttgaagggatgagcccagacttgatgttttgggattgtccttattttaacctcaaggtctcgcatggtggggcccctgaccaacctacacaagttccctcccacaagtggacatcagtgtcttctctgtgaggcatctggccattcgcactccctggtgtggtcagcctctctcacacaaggaggaacttgggtgaaggctgagtgtgaggcacctgaagtttccctgcggagtcgataaattagcagaaccacatccccatctgttaggccttggtgaggaggccctgggcaaagaagggtctttcgcaaagcgatgtcagagggcggttttgagctttctataagctatagctttgtttatttcacccgttcacttactgtataatttaaaatcatttatgtagctgagacacttctgtatttcaatcatatcatgaacattttattttgctaaatcttgtgtcatgtgtaggctgtaatatgtgtacattgtgtttaagagaaaaatgaaacccacatgccgccattttcctgaatcaaattctgcagtggaatggagaggaaaatacttctaggcaagcagctagactggtgaattgggggaaatagaaggaactagtaactgagactcctccagcctcctccctattggaatcccaatggctcctggagtaggaaaaaagtttaaactacattcatgttcttgttctgtgtcactcggccctgggtagtctaccatttacttcaccccaagtcctgctgcccatccagttgggaagccatgattttcctaagaatccagggccatgggagatacaattccaagttctcgcttcctcctttgggcatctcttctgcctcccaatcaaggaagctccatgctcaggctctcagctctcgggccagtgctctgctctgtccagggtaggtaatactgggagactcctgtcttttaccctcccctcgttccag

SEQ ID NO: 1046 - DNA, 6000 bp, Homo sapiens
aatacataggtgagatcttttatttaaaaaaaagttatcagcctgtaatccctgctactcgggaggctgaggcaggagaatcgcttgaacctgggaggtggaggttgcagtgagccaagatcgcaccactgcattccagtccgggcaacagcgcgagactccgtctcaaaaaaaagaaaaaaattatcaggctgggcgaggtggctcatgcctataatcccagtactttgagaagctgaggtgggaggattgcttgaggcctggagtttgaggctagcttggccaacatagggagaccctgtttcttttaaaaaaaaaattaccatgggtatgtaaaacatcatacaggaaaaaataatagcatatatatacaggttcactataatccacggattcaggcatccactcagggtattgggatgtatgcaccgaggcataaggggcataaagcggggactattctactggtttctaaatttacttgcaaacagtactttgataaaataaaagcaaattaaaaaatcattgcattacagataaggaatcctgaaggagggagtgttggagaaggggagggctctggagaaggctgccagagcaggggatgcctaaccaggctgaaggtgaagagggggacccggagtggcctgctagggactcgcggcaccggtgagtttcagatggaggccctggtgctttagaacgagaagagggccgagtggcggaagcgcaggctgaggctcgttacatggggtccctaggccgcggtcgggactgtggattttatttgacgaagaacaggtggccataggaggttctcaaggaggcagctgggatgacttatgtttgtaatggactcactctctctgctgagtagggggcgagggtggaagcaggggagtacaaggtgatggtggggtggaggaggaaaaacccttctttactgtcttagggtctctggctgggctgaagaattaaactgacataaggcagatcagcaggagaaaaacatacagatttcatttacatgtacaagggagcccccccgcctcccgcccaaatgaccaagacccaaagaagtgactaggcataaaggcttttgtaccaggttgaacatagaatggcaattgtgtaactaggaagataaggattaaaagatctgttcatacagatttcttttggcctcgactctccttatctggtaatgtctttcctcctcctggcatagggagggcgtctttcacaaggcgttttagctcctgctttcaggaagaaaaggggaggtcagagccccctttctgcacctgctgtttctgaagtgcctttagtgcagagaaatcaatatgccagagtggtgtattctggggtggcgtgtcctgaaccccttcagtggcctggctcagacgggagcctgtggatggagagcagtggacgggttccaggctggagcagtaaggctcggtgctggggaggtgtgtggcagggggcacactgatgagcattcactcctttaaccttcgcaagaacccccaggccaggcagtcaggtgtgtacaatctactgaaggagaaaaccgaagtttaagttcagtgcacggcaggggtagagctggggctcaaactcccctgtccagtcttcagcccctataccccaacctgcaggaataagtgaatgaatacatgaggctgggtacgcctggggcacagaggagcgagtgaaatcagcagaggaggaggcccgcgcaggcggcaggaatcaaggatgcagtgccaggtgggctgcggcgagagagctttattctgagggcagtgagaagccgtgggtaggggtgggtggtcagtgccatggaaaacccacccttgaccctgaggacacgctcccaggagcccacccacacctcatgaacttgtacggacaaggacaatgggaggctgagacctggagcaagggccttgtcccgggcacaaggcaaagggacgggcagcgttaagagaccaggccggctccggctggaagtgggtgtgtcctactgtgtgctgccgcatgcatggtggcacctctggatgcattcaacttccagttctctgcagtgccaggtacctagtgacaaaggaggtccagccctggtcccagggaatggcccagtttggaaagcagcctaggtacagcctggcacatagtaggtgctcagccaagacgtgtgtccttttcccttccgtctctgactgttcctttccttatcactcctgtgctgaggcaggaatcagcacaggcaggggcacggcatcccaagacatctgggcctgtgctcaggactgtacggcagagtctcttagaccaaagatcagtaaatatggcccacggggcaaatcccacccactgcctgtttttgtacagcctaggagctgagaatggtttttacggatgaacatttgcaatcggtttgatgaaacactaactctaaactccaattaagcaaaaggtgatgtctgtaaaaagaactctattcttctcatgagtggacctacattacaaaatactggcctcaattattattattctattttgagttttgtcagttacaaaatagtaaaaatctgttttctcactgcacaatgattttgccctcaaagcctaaaatattggttctctgttctgtccttccactcctcaccctgcctggggctctccagatgtaaccaatcccaggactaatgacccccacccggcctccccagtggtccgtgctgcggccggtgtgcccgactgcagggctggactgtggactcccgggctggccagccccacacccagccttgccttgggacacagctgctgccccgggggacctgtgccgcagtggcctcacgagctgctctggctactggctggcagcctcggctcccctgagcactgagcacattcttctctccaactccctgcaggagccaaggccagcgggcgtgggtggctgaaatctccccggtaacagggtctgcgcccctcctgctccctctccgggcctcctcccttaacctgcaccccgcccccaccccccacacctgctctccggccctcagcccctccctgcttactccctccttcacgggctccatgtcaccatctgtggcacagtccctctctgtcactctccctgccaccccctcattctccttcctccctcctgcctctctctgcatctctccctctcacccgtgtctcctctcctctctttccttctcgtcttctccctgtcacgcatctctcatcactccccctcattctgcctttcctcctactcacggtctcctctccctctccctctctctctctccccctccctctttctctctctctctctttctccacctcctcccgaccccctttcccctctatttctattggcttctgtgtcccttgctcccctcttctcttcctcaccctgggaagcttctcccccctatccttgcccctgcccccccaggatgtgtcctggagatggggggtgacgtaccaggctctggttgggaagtcagggccggagaccagatgggagaggctctgtggacagccgtggccgagggcctgggagggaacctgagcccgcaagcggtctagaagtgggtgccttgtggggaccctagttaggagtgccctgggggcacctggggactgggcagggagaggggacagcagaatgataaccagcctggcggcaaggagggaagccctcaccccatgggcaggtaaggaggctggggcccggatgatgtcccgaagggtggggtcctggaagcccatcctctgcccaggatgaacttgggaggctggggctggggaggcagagggtggggactcccagggaggcaggagggaggccttcctgtgacctcccggtcggctgcaggggcaggggcgttagtctcagaatctcgtgccatgattctaggatctcggaatcacagaatcgcaggctgtcagggctggagggagccagatgtatcatgtcgttggcttccccagctcacgtggcagctctcctgagctccccctccatacccggcactgtgcttggcacgcctccgtttaatctctgcaaacaaccctgggaggtgggtccgcttgtcttccatatgacgaaactgaggtgcagcggggagaagtgacttgcccgaggtcacacagcaatttggcatcatcgctgtgcagcagagcccaagcccccagcgctgggcctgtagggtgtgctcctgggatcaggccccaggcctggggtgccagtgagtcagtcggcactggcaagcataagccaggtgtctttggggggaaggccgaagcatgtagaggacaagcagagagccaggggccatcgccctgcactattcaggactgtcatggcctttgatccttctcagcctgaggccttcagaggagccagtgtggccaggaggtactgatggtttagaagtagatagaactgggttcgaattctggcttcccactctccagctgggtgaccctttgcagcttactcaacctctctgagcctcaacttcttcctctctaaaaactctccctcttgggcttcttgaggatctcatgatgtgagtctgaggcttccatccggggacaatgtcccaccttggagctctccttgttgaacggcttggctgttcacatttatggctgttctgggtgatgtcctaggttctggggttaagaaataaatcattcagggcccctgccttcaagagccagtgttctagcgggtgggagatgggcaaatggagaatgattggggtgcctggcctccctgaactgttagggctgtgcggctcaggacagccactcaccctctctgtgctgtctcctcctgaacagtcctccaaggagtccgcccccagctttcaggcaagcttgtgccaaagataaaccagacagggaggaaaagtccctccttctcaaggatgaactagatcatgcacaggattccagctctaaagaaaagacggcacctcaattgcaggtctggcttacgtgcgtggaaagctgtaatttccctgcttctgctgcctgggcccctcaaactttgacagggaagaccggctgagataagggtggagacagggttttccaggagggggccaggggttctgggaggggcgactgcatgccctggtacaaaggagggtctggctaggcacgccgtgttcctgccaggaccatgtgtgtgtcagcgcatgcgcttgtgggtgcacagacatgtgctgggcaggcgtgggggtggggcaacctcagagcttacccccagcgggctaccccaggggcatatgtccctgaagcctggaaattaggcctgcccagctccttgcttctctcaggagcctggtgctcccctccctcatctagccctggcttgtgattggctgaccagcagggatgctataaagaggatctgtgcacagcacagggcagcaaggtggatggtgacgcgggtcccctaccagggaggcaggactctaaggttccaggttgcacaattccaggtctaagaaggactcattctagcattctggaattctaacattctctgattcaaggatactgagtctaaaatcctatggctgtaagattctctgcctgttctaagaattcaaaattctatttttagatctctaaggtccattaggctttgagtccatgatcctcatagctcaaagccctgggggcaactgggaaagcggatgccagctgggcactcaggtgggtgccttcccaggcctggcttcagtttgccagcctgtggaatgggcgtagaggtggtcactacagatctttccagatttgccccttcctagctgtgaccagaacatgtgacctcacgtttgctccccatctgtgcagtggggatgacagtagtgcctccctcgtaggacatcataggatactgcagctcaccagcttagcctggcacctggcacagtcagggctcagtgatga

SEQ ID NO: 1047 - DNA, 6000 bp, Homo sapiens
ttaagttacacaatggattgggattaagaattgtgctggaagctggagacaccgacagacgccttccatcagctgagtcagagtcattctcaatctcaaattctatacctagcctacctatcaacatgtgtgagaggggaattcactattttgaaacatgcacaccttctctgaaagttactgggagctatgctacatcaaaatgagagaggaggccaggcgcggtggctcacgcctgtaatcccagcactttgggaggctgaggcaggtggatcacttgagcccaggagttcaagaccagccttggcaacatggcaaaaccccatctctaccgaaaatacaaaaactatctgggtgtggtggcatgcacctgtagtcccagctactcaagaggctgaggtgagaagatcgcttgggcctgggaggcagaggtggcagtgagccgagattgaaccactgcactccagcttgggtgacagagcaagaccctgtctcaaaaacaaaacaaaacaaaacaaaaaaaccccaaggcccccataaaatgagagagtaaaacatcaaaaaggaagacatggaatctaaggaactggattcatacaggaaaaagctgaagggaatccccaaacaacaatggagagagaatctcgggatgtcagctgcgcacaggcccaaggggcagctggcccagataagaggagctcgtcagtctccaggacgaaatcgtccctgaggctggactctggaaactccactgtgtggtttttacgaagctataggaacgtgtggaaatgcttagtccaagaaatcgaagatatttttaaaaaccaaaaaacgaagcaattatgaactcctggctgagcaggaaataatatttacattgcattaatcatgggaacactggatatgcatttaaccgaaactcatattgagaagatggggagaaggggtgagagtgcgtaagaaatgtaaacttctcctgtactgtaagaggagtcagtagataatgggtaaaattgagggattaagacataaaaaaatcaatatgatatttagcgagaaagagcttaactgagggagcaattgccgagcgggtgggattacctgtgggatgggggggtgggagggatgggggaggactgctgttttttgctgttacaaaccttttcagcgctacagtagtccacttagcgcagtttcagttacctgtggtcaaccacagtctaaaaatattaatagattttgaaagaaaaagagacagagaggtcaccatcatataacttctgttatgatatattgttatattgttttattgtatattgtattattaattattgctgttcgtctcttaactgtgcctaatttataagttaaacattatctttctccaccatcgtggtgtgtggttgactccgtttctcgccacagcttctcacaagactttcaggatcaagtgattcctgcacaagaaacaaaagcaaaattgtcccattccccagtggatctgtatgaaaactggtaataacatcaggtacagctccaaaaggagatattggaaagaaccaagctgggtctataaggaattgagcatgagatgctacacatattcatgttgtatcaaggttgtgatcatattaccatagcaagctgaaaatgtcaccactatctggacagctggacatgtttgattgggaaggtactttttctctttgttcatatgctctgcactagtaggctgggttcagtaatacataggtgagatcttttatttaaaaaaaagttatcagcctgtaatccctgctactcgggaggctgaggcaggagaatcgcttgaacctgggaggtggaggttgcagtgagccaagatcgcaccactgcattccagtccgggcaacagcgcgagactccgtctcaaaaaaaagaaaaaaattatcaggctgggcgaggtggctcatgcctataatcccagtactttgagaagctgaggtgggaggattgcttgaggcctggagtttgaggctagcttggccaacatagggagaccctgtttcttttaaaaaaaaaattaccatgggtatgtaaaacatcatacaggaaaaaataatagcatatatatacaggttcactataatccacggattcaggcatccactcagggtattgggatgtatgcaccgaggcataaggggcataaagcggggactattctactggtttctaaatttacttgcaaacagtactttgataaaataaaagcaaattaaaaaatcattgcattacagataaggaatcctgaaggagggagtgttggagaaggggagggctctggagaaggctgccagagcaggggatgcctaaccaggctgaaggtgaagagggggacccggagtggcctgctagggactcgcggcaccggtgagtttcagatggaggccctggtgctttagaacgagaagagggccgagtggcggaagcgcaggctgaggctcgttacatggggtccctaggccgcggtcgggactgtggattttatttgacgaagaacaggtggccataggaggttctcaaggaggcagctgggatgacttatgtttgtaatggactcactctctctgctgagtagggggcgagggtggaagcaggggagtacaaggtgatggtggggtggaggaggaaaaacccttctttactgtcttagggtctctggctgggctgaagaattaaactgacataaggcagatcagcaggagaaaaacatacagatttcatttacatgtacaagggagcccccccgcctcccgcccaaatgaccaagacccaaagaagtgactaggcataaaggcttttgtaccaggttgaacatagaatggcaattgtgtaactaggaagataaggattaaaagatctgttcatacagatttcttttggcctcgactctccttatctggtaatgtctttcctcctcctggcatagggagggcgtctttcacaaggcgttttagctcctgctttcaggaagaaaaggggaggtcagagccccctttctgcacctgctgtttctgaagtgcctttagtgcagagaaatcaatatgccagagtggtgtattctggggtggcgtgtcctgaaccccttcagtggcctggctcagacgggagcctgtggatggagagcagtggacgggttccaggctggagcagtaaggctcggtgctggggaggtgtgtggcagggggcacactgatgagcattcactcctttaaccttcgcaagaacccccaggccaggcagtcaggtgtgtacaatctactgaaggagaaaaccgaagtttaagttcagtgcacggcaggggtagagctggggctcaaactcccctgtccagtcttcagcccctataccccaacctgcaggaataagtgaatgaatacatgaggctgggtacgcctggggcacagaggagcgagtgaaatcagcagaggaggaggcccgcgcaggcggcaggaatcaaggatgcagtgccaggtgggctgcggcgagagagctttattctgagggcagtgagaagccgtgggtaggggtgggtggtcagtgccatggaaaacccacccttgaccctgaggacacgctcccaggagcccacccacacctcatgaacttgtacggacaaggacaatgggaggctgagacctggagcaagggccttgtcccgggcacaaggcaaagggacgggcagcgttaagagaccaggccggctccggctggaagtgggtgtgtcctactgtgtgctgccgcatgcatggtggcacctctggatgcattcaacttccagttctctgcagtgccaggtacctagtgacaaaggaggtccagccctggtcccagggaatggcccagtttggaaagcagcctaggtacagcctggcacatagtaggtgctcagccaagacgtgtgtccttttcccttccgtctctgactgttcctttccttatcactcctgtgctgaggcaggaatcagcacaggcaggggcacggcatcccaagacatctgggcctgtgctcaggactgtacggcagagtctcttagaccaaagatcagtaaatatggcccacggggcaaatcccacccactgcctgtttttgtacagcctaggagctgagaatggtttttacggatgaacatttgcaatcggtttgatgaaacactaactctaaactccaattaagcaaaaggtgatgtctgtaaaaagaactctattcttctcatgagtggacctacattacaaaatactggcctcaattattattattctattttgagttttgtcagttacaaaatagtaaaaatctgttttctcactgcacaatgattttgccctcaaagcctaaaatattggttctctgttctgtccttccactcctcaccctgcctggggctctccagatgtaaccaatcccaggactaatgacccccacccggcctccccagtggtccgtgctgcggccggtgtgcccgactgcagggctggactgtggactcccgggctggccagccccacacccagccttgccttgggacacagctgctgccccgggggacctgtgccgcagtggcctcacgagctgctctggctactggctggcagcctcggctcccctgagcactgagcacattcttctctccaactccctgcaggagccaaggccagcgggcgtgggtggctgaaatctccccggtaacagggtctgcgcccctcctgctccctctccgggcctcctcccttaacctgcaccccgcccccaccccccacacctgctctccggccctcagcccctccctgcttactccctccttcacgggctccatgtcaccatctgtggcacagtccctctctgtcactctccctgccaccccctcattctccttcctccctcctgcctctctctgcatctctccctctcacccgtgtctcctctcctctctttccttctcgtcttctccctgtcacgcatctctcatcactccccctcattctgcctttcctcctactcacggtctcctctccctctccctctctctctctccccctccctctttctctctctctctctttctccacctcctcccgaccccctttcccctctatttctattggcttctgtgtcccttgctcccctcttctcttcctcaccctgggaagcttctcccccctatccttgcccctgcccccccaggatgtgtcctggagatggggggtgacgtaccaggctctggttgggaagtcagggccggagaccagatgggagaggctctgtggacagccgtggccgagggcctgggagggaacctgagcccgcaagcggtctagaagtgggtgccttgtggggaccctagttaggagtgccctgggggcacctggggactgggcagggagaggggacagcagaatgataaccagcctggcggcaaggagggaagccctcaccccatgggcaggtaaggaggctggggcccggatgatgtcccgaagggtggggtcctggaagcccatcctctgcccaggatgaacttgggaggctggggctggggaggcagagggtggggactcccagggaggcaggagggaggccttcctgtgacctcccggtcggctgcaggggcaggggcgttagtctcagaatctcgtgccatgattctaggatctcggaatcacagaatcgcaggctgtcagggctggagggagccagatgtatcatgtcgttggcttccccagctcacgtggcagctctcctgagctccccctccatacccggcactgtgcttggcacgcctccgtttaatctctgcaaacaaccctgggaggtgggtccgcttgtcttccatatgacgaaactgaggtgcagcggggagaagtgacttgcccgaggtcacacagcaatttggcatcatcgctgtgcagcagagcccaagcccccagcgctgggcctgtagggtgtgctcctgggat

SEQ ID NO: 1048 - DNA, 6000 bp, Homo sapiens
tttcccaatgtcctgggattgaaggaatttttttttttttttttttgagatggagtcttgctttgttacccaggcttgagtgcagtggtgagatctttgctcactgcaacctctgcctcccacgttcaagcgattctcctgcctcagcctcctgagtagctgggattacaggtgtgtgccaccatgcctggctaattttttttttgtatttttagtagagatggggtttcaccatgttagccaggctggtgtcaaactcctgacctcaggcgatctgcccgcctcagcctcccaaagtgctggattacaggcatgagccactgtgttcagccggattgaaggatttctgagttggctctcagcactgctgaggggcggtggctggcaggtaggagtgctcccctttctttacccagagggcttccccttttttctgaaacagacatggggcttgctgtagggttttctcagaagaaataatttactgcttagagaggacggcgtgagggctgcaggctgggggtactgggaggggctgcagccctcacggcttgtcccacctttgggttgggtgtgatgcgattgggagatgtcctgcgtgtgtggccatctgggggctgctgggacaggggagggggatggaaaagagatggtcggaggtgcctctgtagtctgcaggtcatctgcctctacgcagagtggctgctttttcctattttagggacctaagaagtgaaattggccaggcgcagtggctcatgcctgtaatcccagcactttgggaggctgaggcgggtggatcatgaggtcagaagattgagaccatcccggctaacgtggtgaaaccccgtctgtactaaaaatacaaaaaattagccgggcgtggtggcatgcacctgtggtctcagggactcgggaggctgaggcaggagaattgcttgaacccgggaggtggaggttgcagtgagtcaagattgagccactgcactccagcttgggcgacacagcgagactctgtctcaaaaaacaacaacaaaaaaagaagtgaaattaaacttagctactataaatttaccttaatttataatttatgtttggagcttttctgctccaaaattaacaaaggtgttgcagatggatctgaacagagcacctgatcgtgcctggcttggcggcttgcatccccacctcccataggcaggtgtgtggcggctgggatttaataccctgttttataaggtgcaaatttaatgagctgttatttctaagcaacataaactgaaggaacgaacgctataattttgtgctcagtgagtttgtacgccgggattaaatgcatccgtatttcctgttgctcgtcggagactcccaggtgtcctgtcctctgagctcatcagggaagccggctggccaggggtcaggcaggaggccctggtgtgtggctgcggtttgctgagagggtgtgaccacagttgtccttgtaacgagctgtctttctctggctgttcacaaagcatgttttgtgagtggaaaggaatgcgggagtcatgaatttctttctgagtctcttgcggaggaggaggagtggactgttaatttgtagaattgcctgacccagcctccagacccgtgtgtgtgtgtgtgtgtgtgtgtgtgtgtgtgtgtgtgtgtgtgtgtgtgtgtggagggggggctgccattctaacctctcaaggctggggaactagcaagtcactttccaagagaggccaggggactcctagggcaccaaatattgcatgcctgactgtagcaccagaagtcattgtgaccttttcccaacaatgacttcattttatggcctgccacctgctgccactcttgtcactgtctggccacctcagaccccacatgcgtcacgcttggctgagtgcactcatagtccagcaaactggccatgcacgtctgctcccagcttggtggtcacaccacagctgcccaccccccataccaggccaacttctggctgcacactccgaactggtgattggttaggggcatgggattttgtttgaagctgtgaagacagccacggtcacactgtggcagctctgtagcccttcatagtttagaggcctctgcccacttgctgtcttgtttgattcttgcaacacctttgggaggcaaatgatggggccaggggattgactgggcccattttactgatgaggaaactgaggcccagaggaggtaagtgacttgctcaggatgacagagcctagaagtagcaaaattgaaacctgaaccctggaactggagctcttgagggagatgaaccaacagccaaatcttctggagtggaggctttgttaggaattcctttcagggtggaccagaccaagtctgagtctctgagagtgtgttgaggtgagatgttggcttgttgcggggagcatctggttcccggactggatgagtccctcaactctcaaaaccattgccctctcctctcccctcacaccccccccgtacagatgagatgattgaggcacagagaggggccatgacttgcccagggtcacactgagctagagacggagctggggtctgaccctgttttttttttttttctccttctttctttcttctttcttccttcttccttctttcctcctcccactctgccctcctcccgcctcctccttctccttctcctcctcctccttctccttctacctcttccccctccctcctcctcccctcctcctcctcacccccttctccttcttcttcttttttttttttttttttttgagacagggtctcgctctgttgcccaggctggagtgcagtggcacgattatggttcactgcagcctcaacctcccaaagctcaagtgattctcccgcttcagcctcctgagtagctgggataataggcgcgcaccaccacacccaactaatgttttaaattttttttgtcgagacgaggtctcactgtgttaactaggctagtctccatctgcccgcctcggccttctaaagtgttaggcctggtttcccttattcttttttttttttttttttttgagacagagtcttgctctgctgcccaggctggagtgtagcggcgcaatcttggctcactgtaacctccatctcctgggttcaaatgattctcgtgcctcaatctccctagtagctgggactacaggcatgtgccaccacgcccagctcatttttgtatttttagtagagacggggtttcaccatgttggtcaggctggtctcaaactcctgacctcaggtgatccactgagggcccgcctcagcctcccaaagtgctgggattacaggcgtgagccactgtgcctggccccacttcttcttgatgcggccctcctccttttctgccatgagaatactgggctaaattgacgggagtcagtgtcagaagtgcgggacagacagcgtgtcgtgatgcagcatgtccgcccacaagttcttagagtggattcccctgggagggtgtccttggccttgctacccactgctccttcctcagccctgtttgttttatatctgtccagcctgtcctgttttcatagacaagcctggggaggactcctgcttcggcttctctgggaatctgggaggcacccaggagtgagggagcaggtcttcccacccctgtaacccgtggctcccagtgtgtctccctctgggctgacccatgtcttgggctccaggtggatcagctcaagctcaaagtgagtcggctggaggaagagtgtgcactgcttcgaagggccaggggcccgccccctggggcagaggagaaggagaaggagaaggagaaggagaaggagccagacaatgtggaccttgtctctgagctgcgtgctgagaaccagcggctgacggcgtcactgcgggagttgcaggagggcctgcagcaggtaccagggccagggcttgtgggcacaggctggggggtggtcaggagggcctgcagcaggtactggggcttgtgggcacaggctgcggggtgggggatcaggaaggcctgcagcaggtagcagggccagggcttctgggcacaggctgggtagcggggctcaggagggcctgcagcaggtaccagggctggggcccatgggcacgggggtggggggtggtcaggagggcctgcggtaggtaccagggctggggcttgtgggcacaggctggcaggaggtcaggagggcctgcagcaggtaccagggctggggcccatgggcacgggggtggggggtggtcaggagggcctgcggtaggtaccagggctggggcttgtgggcacaggctggcaggaggtcaggagggcctgcagcaggtaccagggctggggcccatgggcatgggggtcgggggaggtcagaaggacctgcagcaggtaccagggctgggcctcgtggccatgggggttgagggggggtcaggagggcctgcagcaggtaccagggccagcgttcatgggcacaggctgcggggaggtcaggagggcctgcagcaggtactagggccagggctcgtggacatggagtgggggtgggggtcagacccggaaaacaggccctcttgctgtttgcttatcctcccaaggcctgggaagctgaggatttcagaaccagggatctgagatctggatggagtcccggtagcctcttgcctgaagctctgagctgagggcccttagcacgtggctgtccctggttgtctggtctagggtgtgtgagcagcctccagaaggtcctcaaactccctaaaactgcccccctgattttgagtgtgagcatttttctggggaaagggccccagctttaatttgatttgtagagggtgtggcctgggggccctagggcttgcttagtgtcctgcggcaggtcagtggcaggtcagcagctgcatgggcctgcctcctggccattgttccacacaggaagtgggggatgagagccagtgtgtttcatggggttggggcacttggctggggtgtgggtctgggggcaagatcttgggcccagggtctacctgtatgggccaggctcagccccttgaagacccctagtcatgggggtgggagtaggtcttgggaatggcctccgtctgctgccctggatggtgggtgagggccagagcacgagtgtgtgcctggtgcttgtttaggaataatcctgggtgaacttgtccagtcacacccttctccacttagcttattagcttacttgtaccccagatactccctggagggtgggtagggcttgtggggccacacccactctgccgatggggagacagagatccagagagggtcgaggccccgggccagcatggcagagctggtcaggtgggtttggagggctgagagctgcgtgtccccttccttcccacacccagggtgggcccctagccagaccctgaggtggccctgccctgtgatccccaggaggcgagccggccgggggccccgggctccgagcgcatcctgctggacatcctagagcatgactggcgggaggcgcaggacagcaggcaggagctgtgccagaagctgcatgccgtgcagggggagctgcagtgggccgaggagctgcgcgaccaggtggggccctgcccgtgccctgccccttgtgcgggagggtgtcaggcagggcctgtgtgctcacgccttccctgagcatctgcttgacgcaggcgccgcgctgagaactgcattcatttgttctcagatgttgacggaggcacccttctaggcgcttgagatgccgcagtgagcaaaacaaaggtgccttttccttgagggggaactccagcaggggagactggcagtatgtgagatacacagtcccacgtcagctatttcatgtagtcaaaggcgatgagcaccgtgggagatgcagagctggggaaggggccggttgcagtttgagtggggaggccaagggtggccggatgggtgaaatgatgatcattcttctc

SEQ ID NO: 1049 - DNA, 6000 bp, Homo sapiens
aacatccttgtatgtgcgtctttgtgcaaatgtgtctcaggcgaagaggttctgagaagaatttctcaaagagtctgtgtattttaactgttaaatcaacatacctcctaccaggaatgtgtaagggcccatttgaatcctggggatcatgtttaaacgtttttaccattctgatatgtaaaaaataatgttattgttttaagtttatatttcattgagtgatacagttcacaggttactagttattaaaccttgggtaaataactgctctgtgcttcagtttttctgtctttaagatgggtacaataatagtacctaccttacagtgttgtcataaagattaagatatatctagcacaaagaatgaagttaacaaatattagtagctactgtaattattgttgataggttggtgcatattttcctgtatttattaactatttttattttgggacttgcctattgatagtttttgtccatatttttatttggttgttgatcttattgatttgtaggagctctttatatattacggctctgagttcttgttatattttctcccactctgttgcttattaactttgttacatctttcatttttcaaaggtttaaacatttttatatggatttgtccatcttttttctcttataactcctggattttgtgtgttgtttaggaagacctcccctgctcccaattctacaaatatattccagaatttccctctagtgtttttatggtttgagttttttgacacagtatgttatctcctggattttacttgcctgagctgcctattctgtcccctgttctgtcctggcagatgaggaggggcctgagggcctgacccaattcttgatgacagaggtgcgacggctgcgggaagctcgcaagagccagctgcagcgggagcagcaactgcaggcccggggccgggtgctcgaggaggagcgggcagggctggagcagcggctgcgggaccagcagcaggctcaggagcgctgtcaacggctgcgggaggactgggaggcgggcagcctggagctgctgcggctcaaggatgagaactacatgatcgccatgcgcctggcacagctcagtgaggagaagaactcggctgtacttcgcagccgtgacctgcagctggcggtaggccctggggagatgggtcggggaggcaagggaaggggcagcttttgcaatgtagtagccagccagcctgtgtcccagagccaccattgctggctctttgacgtggataagtccttttagtgctcggtgtacctacttcattgggttatgactgtggttctcaatggggggtgattctgaccccctagaaacatctggccatgtctaggaaatatttctggttgtcacaattagtggggatttattggcatctggtgtgtagaggccagggatgctgtcaaacgccctgcagggcacaggacagtccccagcaaagaattacctagcctaaaacatcggtagggccggggccaagaaacactgggttatgaggatttgataagttgttttttttttttttttttttgagatggagtctcacccttgttgcccaggctggagtgcagtggtgtgatctcggctccttgcagcctctgcctcccgggttccagcgattctcctgcctcagcttcccgggtagctgggattacaggctcgtgccaccacacccagctaatttttgtatttttagtagagatggggtttcaccatgttgacccggctggtctcgaactcctgacctcaggtgatctgcccgcctcggcctcccaaagtgctgggattacaggcgtgagccaccgtacctggcccggtgagtttaagacacagtttcaaacatgtacagtccctagcacactgctcacaacttgtgtcatcagtagccattgttgatattattatcaagagacacataggttaaacatcatgtcttctaatcctcaccaaagcaccatacgccaagccctcatttgcaaatacagactctgagactcagattagtgaaaggacttgctcaaggtcacagagccaggaagcggcacagcctggatttgaaccgggtccggctggctccagtgccagcccccttcccacgctgctgttccgcctactccctgtgtggggaagtctcacctgactccctccagcagcaagtgaggctgtgcctcctactgcatctcactttcttggtttctgactgggactcagcagggggataataccagtatttgactgccacagggcgttgttccaaggatttaatgagctgatccacgtcaagggcttagcagtgcaggccgcacggcacgcaggaggctctctccagccatgttgctcgaggctgcacagtgggttctgaccgtggagtttgaagcctccctaccccaggagccttgggccgtggctacagcattgcaggtggctgtgaggctgtagatgtgggtgcactggtgtgccagtcctcggtttgtgcacgccaggtgggtcgatatcttggggaggtgagccctgatgggggtgttgaggccaccagttgaagggtccaggctgctggtcctgcttgaggatgtaggtggctggtttgaggttgtgagatgaccttgaggctatcgttcgagggcctggttggtgtgtggcaggagacggaggctttctgaggagtgatgggcagggacagggacatgtcccaggcctgctctactgtgaaaaaccatgtggcatggggaaggctttcctttctgtgcctcagtttcctcatcctcatcacagataaggatgatgtaacaattataaaacggccttgtgctttatagataccatcctcagtgcttgccatgcacagacccctttaattttccagccaccctacgctggggtggacaacactatcttccccatttctagaggaggaaactgaggcacagagaagttggttagagcactttcccaatgtcctgggattgaaggaatttttttttttttttttttgagatggagtcttgctttgttacccaggcttgagtgcagtggtgagatctttgctcactgcaacctctgcctcccacgttcaagcgattctcctgcctcagcctcctgagtagctgggattacaggtgtgtgccaccatgcctggctaattttttttttgtatttttagtagagatggggtttcaccatgttagccaggctggtgtcaaactcctgacctcaggcgatctgcccgcctcagcctcccaaagtgctggattacaggcatgagccactgtgttcagccggattgaaggatttctgagttggctctcagcactgctgaggggcggtggctggcaggtaggagtgctcccctttctttacccagagggcttccccttttttctgaaacagacatggggcttgctgtagggttttctcagaagaaataatttactgcttagagaggacggcgtgagggctgcaggctgggggtactgggaggggctgcagccctcacggcttgtcccacctttgggttgggtgtgatgcgattgggagatgtcctgcgtgtgtggccatctgggggctgctgggacaggggagggggatggaaaagagatggtcggaggtgcctctgtagtctgcaggtcatctgcctctacgcagagtggctgctttttcctattttagggacctaagaagtgaaattggccaggcgcagtggctcatgcctgtaatcccagcactttgggaggctgaggcgggtggatcatgaggtcagaagattgagaccatcccggctaacgtggtgaaaccccgtctgtactaaaaatacaaaaaattagccgggcgtggtggcatgcacctgtggtctcagggactcgggaggctgaggcaggagaattgcttgaacccgggaggtggaggttgcagtgagtcaagattgagccactgcactccagcttgggcgacacagcgagactctgtctcaaaaaacaacaacaaaaaaagaagtgaaattaaacttagctactataaatttaccttaatttataatttatgtttggagcttttctgctccaaaattaacaaaggtgttgcagatggatctgaacagagcacctgatcgtgcctggcttggcggcttgcatccccacctcccataggcaggtgtgtggcggctgggatttaataccctgttttataaggtgcaaatttaatgagctgttatttctaagcaacataaactgaaggaacgaacgctataattttgtgctcagtgagtttgtacgccgggattaaatgcatccgtatttcctgttgctcgtcggagactcccaggtgtcctgtcctctgagctcatcagggaagccggctggccaggggtcaggcaggaggccctggtgtgtggctgcggtttgctgagagggtgtgaccacagttgtccttgtaacgagctgtctttctctggctgttcacaaagcatgttttgtgagtggaaaggaatgcgggagtcatgaatttctttctgagtctcttgcggaggaggaggagtggactgttaatttgtagaattgcctgacccagcctccagacccgtgtgtgtgtgtgtgtgtgtgtgtgtgtgtgtgtgtgtgtgtgtgtgtgtgtgtggagggggggctgccattctaacctctcaaggctggggaactagcaagtcactttccaagagaggccaggggactcctagggcaccaaatattgcatgcctgactgtagcaccagaagtcattgtgaccttttcccaacaatgacttcattttatggcctgccacctgctgccactcttgtcactgtctggccacctcagaccccacatgcgtcacgcttggctgagtgcactcatagtccagcaaactggccatgcacgtctgctcccagcttggtggtcacaccacagctgcccaccccccataccaggccaacttctggctgcacactccgaactggtgattggttaggggcatgggattttgtttgaagctgtgaagacagccacggtcacactgtggcagctctgtagcccttcatagtttagaggcctctgcccacttgctgtcttgtttgattcttgcaacacctttgggaggcaaatgatggggccaggggattgactgggcccattttactgatgaggaaactgaggcccagaggaggtaagtgacttgctcaggatgacagagcctagaagtagcaaaattgaaacctgaaccctggaactggagctcttgagggagatgaaccaacagccaaatcttctggagtggaggctttgttaggaattcctttcagggtggaccagaccaagtctgagtctctgagagtgtgttgaggtgagatgttggcttgttgcggggagcatctggttcccggactggatgagtccctcaactctcaaaaccattgccctctcctctcccctcacaccccccccgtacagatgagatgattgaggcacagagaggggccatgacttgcccagggtcacactgagctagagacggagctggggtctgaccctgttttttttttttttctccttctttctttcttctttcttccttcttccttctttcctcctcccactctgccctcctcccgcctcctccttctccttctcctcctcctccttctccttctacctcttccccctccctcctcctcccctcctcctcctcacccccttctccttcttcttcttttttttttttttttttttgagacagggtctcgctctgttgcccaggctggagtgcagtggcacgattatggttcactgcagcctcaacctcccaaagctcaagtgattctcccgcttcagcctcctgagtagctgggataataggcgcgcaccaccacacccaactaatgttttaaattttttttgtcgagacgaggtctcactgtgttaactaggctagtctccatctgcccgcctcggccttctaaagtgt

SEQ ID NO: 1050 - DNA, 6000 bp, Homo sapiens
aagactccatctaaaaaaaaaaaaaaaagaataggacctagggaaagctgctatgtaaaggtgccccgggggacactgggcaatggggaggggaagtgacatctctggacgaattcaattgaggatgggcatttagcatctgtcttgtgctcaggctgtgctagagtccctcagatgaggggtagagaaacgtttaggaacttgaccaagatcacaggcacacattgtcctggaatttgaaccctgggcgttctggctgtggtgtagtgcagctcatcacaggaattctccccactcttgggcccactcactcgtctcctgctgaacacctgactgccaggtcctgtgctgggatccatgcggcccaggccctgatcctagtgaagagatggccagaggaggcgagatggggctgggggttggggtcagggagcacagattcaccaggcacccagacttatggactagataactccagacccacattcctggatgcaatcagaggctgacaaagaggaacggaagggttgcttgggccaggggcatccttgaaggaatgaacaaaaaggtggatccctgcttctgtggcctttgtggctgatttgtggaagacaatgatagcggcgtattactaccaagaaaagtaaaggccaaagtcctcataatgatcttcaaggcctttgctctgtctgccccccttccaatcctccttcaacctcctctcctcccctgctccactcctcatcctcaccactcttggaacattccagctcactcctgctagccaaggacggctctgttcttgggatggaagtaggcaacaaacaggttgctgacattttcctggtgcagcaaagcaagcaccaggaaaatgtcagatagagaggaaatagctctcggggctcagaaagtgatacctgccaaataaggcgctttgataggctgaataaagacgcaacctcaaggtctctctgccaacctttcccccatcctctctgtcaatcctctgtctctcccaaagcacaggaggaggctgttctccgaagttcccttatctgctagaaactggaccccaaagaggaacacgattgctttcgatcccttccctgaaatttcattaactggagattaaaattcatatcacagaggaagagaaaattaaacaccacatctagagtccagacaaactttgtcccaaatgagtgtttcttcttcggtcccactcaatttccaaagaaaatcatctgtaagataatgtctgcctcccaggcccattaatgcctcctaacagtcattcactcctacagccccgtctccccttccccagcgaagaagcggatataaacatctggacctcaatggataactgggtaatcattctcctatgattcccctgtgctaggcatgttaaatacattttttatgctttttttcttctatttatctgcctattgtcagtgcatttccggcaaacctctagagggagaaggagaagctgtcctttggcccctacgtagcacagaattgcttggatggggtgtatggaactccctgctggagggtgctcctgaatcaagggagggggaatttgatctgagacctgaaaagctagaaggaaccctccgtaccaggagtggagggatgagcagtcccagcagaggcaacagggtggacaagggccttgatgtggaagaagctgacaggttccaagaacagaatgagactagtgagcgagtggggcagtgggaagtgggaggcgggggagccagcagggtctgggggcagtttgcattttattccagtttggtggaaaccattaagaggttttaagccagagaaaaacctgttatgtttttaaaaccatcattctttccagcttaggcaacgtggcaagacccctctctaccaagggtaaaaaaagtagccgggcatggtggtgcatatgtgcagtcccagctatgtgggaggctgaggcagaaggattgcttgagcccaggagttcaaggctgcagtgagctatgattgggccgctgcaccctaggctgggtgacagagccagaccttgtctaagaaaaacctcccaaaccaaacaaacatcattaaggctgcagagtggagaacataccatagcccatagcactgtgggtgggagtttgtgggggcatgtgtggcttggaccagtggggctacaggcagtaggacgcagactggtttgaaacatggaggcatgccttttgatgagttgggaagaggactgacattcctgtacccacttcacatatggagagactgcaactcagaggcagtccctgcacatgggggactattgtccacttttcagatgtagaagttgagagggggaggaatttgtccgagtagatgcagctaaggctgaatgttggtctccagggcaccctccactcctggactgtctgcctttgtaggtgtggctgggactactcaccgcctgccttttgcagacagggaaatggagactcaaagaagaacaatactcatagcggtgagcccgcgatagaacccagggcccctggtacaaagtctagattctcggtgtccctgctgtagtccctgcccgccttcctggcatagctatagagagaagatgaatgtagcagaactcacaagaggacaataatgaacatggtacctaatcacacgcttgcacactcggtgctatggacgcccggggacaggggaaagatgaggaggctcagatgtttgtggggaagtgggtacgcccctgtctgcctcctgcctggcttgatgcccacagtgggtgggtgtgtatgtgtgcatgtgtatgtgatggtgcgtgtgcatgcctgtataattgtacatgtgaatgtgggagtgtggtacccaaaggaactctgtcgcttcccctggaatgctgggcaccaggggcactcggtgtacccagctacctgcctgttcagacccagtgtgccctcacttctctgtccacttatctgcagagacctcttggcttctgtgccttatctttaggccctgcttagcttctcgatgaaaaaataattaaccatagcctcattttccaaggcgtccatcccgctctgctggccaagttaaaaatattcacgaggagtagggctgctggtgggaggagctgccgctctgcgtgggagggcaaccaaggccacagagaggggaaggacgtattgaaagggaggtctggtgtgtgcctggactcggggcttggagaggacagaggccaggggctgggctccggcctattcccattgtggcctcgctgtgtgaatttgggcaagttccttgccctctctgagctctgcttcctcctttgttaattgaggaatttgcactagaattcagttctcccaaagcatttcttctgcatgtaaacaggtgacacccaaaacaaaaacaaatgtacaacaaatgcaaaccaaaaaaaggctgtggttaattaagtttggaaaaggacaccaggatatataaagttaaatctgtttctttactgctggggctttttttttttttttttttttttttgagggggagtctcattctgttgcccgggctgctggagtgcagtggcacgatatcactgcaacctccgcctcctgggttcaagcgattctcgtgcctcagcctcccgagtagctgggattacagacgcgcactaccacgtctagctaatttttatatttttagtagagatggggtttcgccatattggtcaggctggtctcgaactcctgacctcaggtgatccactcgcctcggtctcccaaagtgtcgggattccaggcatgagccaccgcccccggccttaatttaagcagggcttttcagagcctttattgattgaaaccttaattctttggataagtaatacatatgtccacggcatctaattcagaagttgtggaaggcgattagggagctcacacctctttcctgtaccggttgtgcctcctctgttcctccctggcagcaggtacctggcagcttctaatgcatagcgagactgtatcgcatgcaccagcagataccgtgtagactcggccagtatcatggtaagacaccaccggcctcccaggcaggagcgggagtatggatggctagtcacagcccgcccccagcatctctgggaccaacacctggaggaataccctttgagaattgtggggtccctggtcctcaagtgccacgggagtttgcgtaagaggggagttggcagtgctgccctgcaggttcagacccccatcttgcagaaagcccccatgacctctgcccattgctgtcccccgcggggctgtcctgcgctccagggaagctcccgcgcccgcagtgcatgtggggacccgagaagggcaagcccagcttgagtgcccgcgggctgcgccgggcgtgagcggctagccccgcacgggcgggcgcgctgtgggcgtggggaggcgatgcgcgtggcccggggaaggtgtgtcgcggcgcgcggggggtgtgagcgcgcctgcccgcccccgccccgcccagaggccgggcaggtgtgggcgggcggccaggaccccgccgagccgggctggagagccggcgggaaacaggaagcagggggaggcgcagccggacggccgggagggagggcgtgcagacggacgcgcggggtggccgggggccggacgcacgacccggggcgggcggcaatgtggggaggcccgggcagcccaggaggctgcggggacgggggcggagccgggggcgccacgggcaccgcccccctgcgccggcggagccgccgcccgagtgcggacccgggagcccgaggcgactgtagcgtgcggggtgagtcgcggggagctcggggcgcgcccccgacggcgggtctgcggacgacgccccgggggtgcttggccgcacatctagccctagggagccctggtcgacccccgtgcgcctcttgcccgcagaccctgaggacacggccatgccgggccgggcggaggcgggggaggccgaggaggaggccggggccggctcggggtctgaggcggaggaggacgcgctgtgggagcgaatcgagggcgtccggcatcggctggctcgcgccctgaacccggccaagctcacgccgtatctgcgccagtgccgggtcatcgacgagcaggacgaggaggaggtgctgagcacctaccgcttcccgtgccgcgtcaaccgcaccggtgagccgcgggtcccgagtgggccacgacctgggccggccgtgccctggggcgcagcgcccacagccgtgtagcgcgaagctagggctctgctgccctggggctcggtctccgcatcagtagagtgggccggctgggtatgcccaccagcctgcctcctccccacccaccactgcgccttggcggtccgcgttgcccacaccggggtcagagttttgtctcttggggttctctcccacttcctgggtccacattagagcagaaggttggatgtggctgccagggccggctgggcctgggacctcccggtcacagccggtggacttggcacctttcctgcgctctttgatctccgagttctgtctgtcccctcctctgtgcaccatacactcctgggggagtcctttttcaagtgtcaagatccgtctcagctttacgtgggtccccactcccacagggtgtgcctttgaaccagaactcaaaaaggcatgatggaatggtctttaatggtggaatttcaggcatggccaatgggagaagtattttctttgcttctggggatagagggggcttctctgtgccattgaaaaggcaggctgcatttgcgggccggcatctgtgtctgtggggggtgttggggagctctgggagcccaggagtcatgagggaatgtgctcccctggctgtggcagaatggctctcttctcttccctgatgtgttgggacaggcccctgtgtgtgtcactggctcaaaaatctggggaacgtgggcctg

SEQ ID NO: 1051 - DNA, 6000 bp, Homo sapiens
actttaggaagcgaagatgggaggatcgctcgaggctaggagttagagagcagcctgggcaacataacgagatcctgtgtctccaaaaataaaaataaattacccaagcccagtggtgtgcacctgtagtcagtccaagctcctcaggaggctgagtcaggaggattggttgatcccagaagtttgaggttatagtgagctataatccactccagtctgggtgacagagtgagaccctgtctcaaaagtaaaataataaaatataaaataaaataatataaaataaaatgctaaaagcattgtaaaggttcaggcctgagtctgggagggctgtgaatgaaaggacctggcccccacccagaccttacctgagaggagcggcggggccctaaccgagggctgaggcctgcagtcagaagagatacagacaagaagtgggaaggccaatggcaggtgtggagggggctgtctggacaaaggctgggaggtgagaatggatgagcagggttgaaggggcgggctgaggtgccacctggctggaaaagggcccaggttgccaggggcatcccccaccttcatagagtaggagggaaaagatagcttttcaagcccaggtatctttagttcagcagatgaaagcgggtcggccctagctacctgtgtgactttggtcaagtggccaccctctctgggtggtttccccgaccttaaactgcatcattaaatgggggagcaggtcaggcacggtgtctcagggttcctccctgctctgacttctaggactcagaagctggctctgacctcccctaccttccctggctggagcacccaggttggctgcgggtgtggatggcgcctctgtgggccgccctccttcagcaccgccagctgaaggaggtacagcttccctttccccgcctctgccccctgtccctggcagggcgggaatgaccgagctggcctggatgacttgtctagaccaagctgagcccatttctcatggcagcagccaagatccagcccaggacaaaggaattccagagagctcactgcctctatttcaggacagttataacgtggggaggagaatccctggggtggtggccttagcctgggggatgcaggagggagcactaacatcgagcccctccttagacatcactcctatcatcctccaagcagtggccttattcccatcttccaggcctggaaacgggttcagagaagccaaggacctcagctacagctgcagccactcagcccccaaaccagaactcaccactcgtctcatctcctgattctttttttttttttttgtgatggagtcttgctctgtcacccaggctggagtacagtggcactatctcggctcactgcaacctccatctcctgtattcaagcaattctccctgcctcagcctcctgagtagctggggttgcaggcacccgccaccacactcagctaatttttgtatttttagtagagatggggttttgccatgttagccaggctggtctcgaactcctgtcctcaggtgatccacccacctcagcctcccaaagtgctgggattacaggcatgagccaccgtgcccggcctcttctgattctaactgcagcttcatttccctgtgcagaaattcaaccaagttggcagacacaaagtaggggcgaggggaagatgagaggggagataatgaaagcaaggcgccgggcacagggcctggcaagataagtgggcgctgccactaggaggccctgaggactagggggaggaggcccacgatgcacctgtgtccctgccttccctccccgccaggaaaaccgcagctcctgtcacaggggacactggaatctggagagacttcttgccccaacctcggcaagaggagactgttggggacctgttgggcatgacatgtagacctcccagaggtgctgcaaagacctagggaaggtaacagcctgggaagagacaagaaggaagtgaaaaccttctgagcctccatgaaaacacgaatcatctgtttagtacaacagacctcagttccaccctgtattcacctcgtgcaaggaaagcaggatttcatctccccaatttacagatagggagactgaggcaagtgggagaagcagcttgccaggaggctctgaggggacatagcaagcagggccagcacccgcgtgtctagactcccaaataggcctttctagggacctcttcaccatgccaccctgcctccctgccagccccactcatgccagacgctgcagaggagtaaattgtccctccatccaacagcaaacagtccctgatgccgggcccattttccagggtggaggaggatgcaggagcagctcctgaggctacaagaacccaattattgggctgggctgggaaagtggccacacccacccgcccgcagcccggcgaggaccacacctgaagcgcctctgaccctcggtctaggactccgcctgagatgccccattccttgatctggcagagaggggaggcatgggggaggggcagtggaactaggctgggccccatccagcccttcctatggttgaggttttggggaggcccggaggaaaaagtgaagctgctgtggttggtttccaagcagccacttggtctggaaggaggggtaaggcactcacaggggtgcaaccccatcccctctctgggtccgccttgcggccctacacactcccctctcatcctgtaccagagtgggctttgggcatctggaggaaggtgcccctgagaggcagggtgggtgtgttggcctggcttccagatgtgagtcactcctggtccgcatcttcgtccctctttggtgccagcagtttcagaagggggacggccaggtggagaaggaggtccccgtgacaaccccccagcatgcccctcattttgcccagtgctccccacgccccttcctccaccaggttcctgagtgtaaggtgagcacccctcccacccaccctcaattctctgccacagtgatcttccctagagcccaaatctggcctcagtactcaccctccctctagccctggctccccagcctcctcccatacaacaatgtccaagccctgtgcccagcccatgaggccctccatggtccaggtcctgttggcttcccagcctcatccccgtttttcccccacatgcccggaacactgttctccagccctggccttctcattctggagcttctgcccatggtggaaagccaggcacttctccgcctacccttcacgacccacctcctttactcatgcagccgccagcccaccatagcactttctcatggcttcccttacagccatcatcatctacttctttttatttttatttttattttttattttttttaattgagactgagtttcactcttattgcccaggctggagtgcaatagactgatctcggatcactgcaacctctgcctcctgggttcaagcgattctcctgcctcagcctcaggagtagcagggattacaggcatatgccaccatgcccagctaattttgtatttttagtagagatggggtttctccgtgttggtcaggctagtctcgaactcctaaccttaggtgatccgcccgcctcggcttcctaaagagctgggattaccggcgtgagccactgcgcccagcccatcatctacttcttaacgtggttgtggtcagattccaccccaactatgcgctccttgagagtggggactgggaggggttcagctttgaatcctcagagcccagggccaggtacatagtaggtgctcagtaaaatacctgctgaacactcagggaagggagggctgtgccgggcctcagaggagatgttaagagagcagacagggtggccaggcatggtggctcacacctgtaatcccattactttgggaggctgaggcgggtggatcaactgaggtcaggagtttgagaccagcctggccaacgtggtgaaaccccgtctctactaaaagtacataaattagccgggtgtggtggtgggggcctgtagtcccagctactcgggaggctgaggcaggagaatcagttgaacctgggaggcagaggttgcagtgagctgagatcacgccactgcactccagcctgggcgacagagcgagactccatctcaaaaataaatatataaataaataaaaataaaaaagagaaaggacagggtgcacagagccaggaccccaccccctcctggtctggaccaccctgggccatctcctaagcttgacactctcaggcctgaggctgtcaggccagggcgctttgactatcccctgcctgcccctgaacgcggccaagcccgaggccttagccaagccctgcagcctcaggcttggcgcccggcccagcctttctttagccttcccgaggagccagcgagagagcgctgcagcagccgcagtccttgcttccggggaaggcccgggtggggccagggcctgtggttaagtcagtggccctctgcagacgcgcacgcagcaggagccacgccctggtccctgcccgggagtggcctggtctcccccagctctgattccctgaaggaccctgcacctcctcagccatcttctctgggcaccccctgagcccagcctgctggccacaggccccttcccgccaacttgtgggcctagctcatcatcaaactattttccactggcttcccccaatctctgccacagcacaattttggtggggaggtggagagggatgaaggagaataggaggtggagcttggactctggccgggggcggcggggtgagggggggcagcagctcgccactctgattggtcacctctgctccaaaactggcttcaaaattccacggactccgcccccagtggcccccagccctatcctgacttgcaattggctgaactttcagggggcggggctcacccggtccggtccagttaaaagggtgggagcgtccgggggcccatctctctcgggtggagtcttctgacagctggtgcgcctgcccgggaacatcctcctggactcaatcatggcttgtgtgagtgtggggacccccccccaaggtccaggggatagggcaggaactgatggccagaggagagctgggcagatcgggagcagattctagccccagctgtgtggcctggaaccagtgccttctcttttctggacctcagtggccacatctgtaaaatgggggtgggcgccatggtccctcaaggccttctctgcattgataattgtctggattcctccagggtctgaaagcacagttatttctgcccagggttgacattctgcagctctctgagaagtgagcgtgggaagggtgtggccaactgggggacacccaggccactatccctttccccctcctccaccccaaagagcctcctgtcccctcccccctgcagctgtcccggtcaccaggccagggcagagttaccctctgctccagagaacgctgaaaagttgccaggacccgagacaagctgcccaggatgggcccttctaggtcgggggtggagggtggttgtgtccaggctggtggcggggggggcgggggaaattcccttccaccacccccaagctgggaggttggggtggcagggaggtgagaatcttcctcgggccccagggaaagggttcaagtttctggcagaagaaaccactcaaaccagttaactcttgcccacccactcggggtgccagggaacagcagtgcccagcagtttgctcaatcttgttaaccctgagccagcccagccacagcccgactgcagggctattctccctaatgcagagaggccgtgtttttcagggtctcctctctagcccctgggcctctttgcagagaggggcttgaaggagaatagtggggtcgcccgcccctagccacttcctctccagcagaggggccggcccctccattcagtgtgacggtgggccaagtgtcggcccctccccagcctgatc

SEQ ID NO: 1052 - DNA, 6000 bp, Homo sapiens
gccttgggaggctgaggcgggagaatcgcttgaacctaggaggcggaggtcgcagtgagtcaagatcgcaccactgcactccagcctaggcgacagggtgagaatatgtctcagaaaaaaaaaaaaaaaaagggctgggcgcggtggctcacgcccataatcccagcactttgggaggccaaggtgggcgaatcacgaggacaggagttcgagatcagtctggccaacgtggtgaaaccccatctctacaaaaaattagccaggcttggtggcaggcgcttgtaatcccagctacttgggaggctgaggcaggagaatcgctagaacctgggaggtggaggttgcaatgagccaagattgtgccattgcactctagccggggcggcaatgcgagactcagtttaaaaaaaaaaaaaaaagttttcagaggatgtacaacagctctgtccatggagggcctcacagcttcggagctgagtccaggctgggtgtgcagaatgccagctgacggatgtactgctggccagctgtgggtcggggggcagcctgggtacgccaatcagttggacggaggctgcaatacctctatttaggagccctgggcactctcggagacaatgggcattattttcccttcaatacccctccgcatggctgctagattccaattccttaacctcttgttcctttccagctcagtgtccttccatagctccccagtaccgacaggataattaggccacattcacctttctattctggttggaatccagtcccttctttgaattcccctcaaatatctcctcctccatgaagctttccctgatatatttgtgtcctctgtgggagcctggcgcttagttttcccttgcttgacgccacagtcactttctgtctgtccctgcattgccactgtcttgaaggtaggcatttggcattgtctctggcttggctctggcttcagttaagaccaaacatagttttcttcctcttctaaaaaaagataatgtttttgcacgtttatctagacaatccggaaaatacatgaaaacacaaggcagaaaactaaaccacggctgggagcggtggctcatacctgtaatcccagcactttgggaggccaaggtgggcggatcccttgagcccaggagttccaggccagcctggccaacatggtgaaaccctgtctctactaaaaatacaaaaattagctgggtgtggtgatgcacgcctataatcccagctactcaggaagctgaggcacaagaatcacttgagcccaggaggcaggggttgcagtgagccaagatcacgccactgcactgcactccaacttggatgacaaagtgagacgctgtctccaaacaaaaacaaaaacaaaaacaaaaaaacaaactaataggaccaggcgtggtggctcacacctgtaatcccagcactttgggaggccgaggtgggcagattccctgaggtcaggagttcaagaccagtctggccaacagggtgaaatcccgtctccactaaaaatacagaaaaaaaaaaaaaaaaaaaaaacattagccgggcgtggtggtgcatgcctgtagtcccagctaccctggaggctgagacaggagaatctcttgaacacaggaggcggaggttgcagtgagctgagatggcatcactgcactgcagcctgggtgacagagtgagactccatctcaaaaacaaaacaaaacaaaaacaaacaaacaaaaactcaatacacctgtattagtattgagtttaattgacataccaaaacatgcacagttcctaagcattcagctgtttgcatacatatgcacccctgcagccaccatctgtgtcaccccagaaagttccataatgccccttcccagccaatacccatcttcaccctggagagggagccgccaatgtcacctctagcgccatagattaggtgtgcctggtaatgaacttcatgatgcccagagatgactactattcccattttgctgtgctatatttccttccagactttcacacatggatttttttttttttttcttgagacagagtctcgctgtgttgcccaggctggagtgcagtggcacaatctcggctcactgcaagctccgcctcccgggttcacgccattctcctgcctcagccccctgagcagctgggactacaggcgtccaccaccacacccagctaaatttttttgtatttttagtagagatggggtttcactgtgttagtcaggatggtctcgatctcctgaccttgtgatctgcctgcctcggcctcccaaagtgctgggattacaggcacctgccaccttgcccagccatacatggatttttaaagaatataggattctaatggacacagtgatttatacagcatgccatttcattcaatagatcatgcgatcatgcatctccaagacagtttccttcgtgagcttttttttttttttagacagaagaatcttgctgtgttgcccaggctggagtgcagtggcacgatcttggctcactgcaatcaaggcctcccaggttcaagcaattctctgcctcagcctcccaagtagctgggactacaggtgagtgccatcacacccgctacttttttttttttttttttgagacagagtttcactcttgttgcccaggctggagtataatggcgtggtctcagctcactgcaacctctgcctccctaattctcctgcctcaaccttctcgagtagctgggattacaggcatgtgccaccccgcccagctaattttgtatttttagtagagatggggtttctccatgttggtcaggctggtctcaaactcctgacctcagatgagccgcctgccttgtcctcccaaagtgctgagattacaggcgcaagccaccgcgcctggcctagttttttaatttttagtagagatggagtttcgtcatgttggccaggctggtctcaaacacctgacctcaggtgatccacctgccttggcctcccaaagtgctggggttataggcgtgagccaccatgcccagccatctcttcctccttttgatcagcatattgtcttgggattttgcaaagtaaataagtactgtatttgcacccactctgcccttgaatcatccagtgtccccaaacggtccttctttctccatcttttctgctaatgtttactgaacatctcctacatacctggcactgtgcctccagccttaagacccctctgcaagcatctcacatatatcaggtctttcggacccatgagaccccgtgtcattgctttacctccctgagtctcaattttttcatctgcaaaatgcattcagagggaagcccccattatgaagggttccctgctcctgactgtaaggcactctgtggctgttagccacagtcagggcgagctgctttgtaggggttgatgtagtttggaggccctagaagaaaagactacagggccgggagtggtggctcacgcctgtaatcccagcactttgggagcccgaggccggtggatcacctggtgtcaggagttcaagaccagcctggccaatatggcaaaaccccgtctctactaaaaatacaaaaactagccgggcatggtggcacacgcctgtaatccagctactaggggggctgaggcgggaggattgcttcaacctgggagacagacgttgcagtgagccaagattgtgccactgcactccagcctgggcaacagggctagactctgtctcaaaaaaacaaaaacaaaaacaaacaaaaaaaccccacaaaagcaaagaaggtccagagcccggaaggcgggaggggctctgaagactttatcacactttacctcctctgttcctcccaacagcccagctcttggtaggtgctgttgtccatttcacagatgagaacattgaaggggaagtaattaccctagaggtgggaagaacagagtgagggtacccaacaggtagcaaacgacagagctgggggaggggaacccctgtccctgcccctcccctaatctctgaggggatcaagacagaagtaaacaagctttgccgtgcccaggacaattgttactttgttattccaggagcgctctgccttctcccacccccaatataccccagggctggagttaggtcctacccatccccgcgtagcaggctgcccacccgcccaccccgcctggaagctttctgatttctctgttcgccccgccaggcgctgtggggtccgtctcaccaggtctgcacgtgagccccctgcccccaatccctcccagtcccgcccgcctctcgcggacccggagccccgacgggagggggaaggcagtgggtgtgtcatgcagctggaaggctgcggacgggcggcagtggaggggcagccccctggcttcgggtatggatcactggatgctgctgctaaccaaatgtgaacctcggttttcatatttgtgaaataggctttaaaacacctaaatcccaaagctgccagcctaaggagcacacgtctttgaacgctggcttcacgctgtcatttaagtcatttcgtcctcttggagcctcggtttccacgtgggtaaaatgatcgtgaaaaaaagcaccgaggagtactttgagctcgaacggaggccatccgtgtaaagggccagattctgtcaatggatcgatccccccgatattgatggaaacccctgagtgcacgcccgtgctgggcgcaggggaaacagcgacgcacgggacaaaacaagcttgcagaacagcagggggcagagaggctgtaaacaagccaacgggctgcacttgtagcggttctgttgccaatgccattcagaccccagtccgggattccgcgctcggggtgcgagaggccgctcccggggaggggcgggacccgggcggggcgggaggggcggggcgcccgggcctattaggtcccgcgccggcagccgggccgcagacacgaagcctcccgggtggcttacagacgctgccagcatcgccgccgccaggtgagtgcccccgaccctgctgccgcccgctgctccgcccagctcgagcccggcggttagcgcccaggccgcggcccgggtgccgagcggctggaagtgtggggagccgtgcccaggttttaccgctccagcaagtcgctggcggggcgacgtctcgggactccggctccgaaacgtaccctctctgtccggggctccaggtccccgacgggcgatcgtgccaggcgcggcccctgcgggcctcagtctccgcgcctgtgcaatggggtggtccctctgcgtctcgccgcgacggctggacgccccatcgccgccgcacagtcctccagtgcggcttccgggcacccggctccgaactctggggtcgtgcggacccggccagaccgtagcgcggcaacgccagcccacggccgcggccgcacagccccggtgcccttaaaagagggaagatggcgtcgtgcccggtgccgccgggaccggctcccggaggcgctgcgcacctgaggaagggccgaggaaaggcttcgtaacgggacgcccagaaagtccggaacaggaacgtgcacacggagcggcgcgcagccgcccgccctcgcttgcccacgcgccctgcacaggtgcgccccagactgggcggggactagagcccggctggggcatgcgaccttgtttggtaaattggaggtgcgcccctgcgggtgacccgcgagggggccccccgcctgcggggcgcggtcacgacaaggcttgtggggttcggagctggtcgtcgtctgggctctggcctcctaaatgcgatcgctttcaagcccttcattgtcaattttgctagaatgagccactcgtggggtaggacgtggttgttgatgttactgttgtagctcttactattgtaacatttttgttgctgttttaacgcagtgtttactgtggtctgggagcccgagcttcccagggagcattggtgtcagcctcatgtccc

SEQ ID NO: 1053 - DNA, 6000 bp, Homo sapiens
agtgaatggtgatgaggacacatttgggttcatttttcttacacacagttggaggagacagctcagtgacaccctcaggcctggccgctctctgcctccccactctgctcttcttggtcagccactgcagctccatctttgaaggagctgccctggctgtgtctactccctggcatccaacccctgcctccagcctctgagccctcattgaccagaactgggttacatggttgtcaccagctgcaagggatgctgggaagctgagggagaggagggccatggttggcttagatgaatgaggatgcagggccaccccgaagaaaattggggttctatcagcaaggagccaggtggaatggatatcggagaggtaaatagcatctgccagtaaagaaggctgtaagacactgtatggggtgatcccatttgtgaagaaggatgtgtgatgcgcacaagtgtttaggaaaaacactagaagaattagcgatggtctctctgggaatggggattgtgatacgtttttctcatgctgcctctctgcctttcttctcaagagaaacagcagacaccaaagaacaggtgtagccttctgttaagtggtacagaggaatcgccctgcagcctggcctctgtcccctgtgctgacagcaggtgcctgggttttctgctttgacaggttcttgagggctggtgtccgaggagaacttctaatatttatttatactctgattttgtttcacaaagaagaaaaaggctgggcgtggtggctcatgtctgtcgtcccagcactttgggaggccgaggtggggtggatcactttgaggtcaggagttcaagaccagcctggccaacatgatgaaacccccgtctttactaaaaatacaaaataattagccaggcatagctcatgcctgtagtcccagctactcgggaggctgaggcaggagaattgcttgaacccaggaggcagaggttgcagtgagccaagattgtgccactgccctccagcctccagcaagactcagtatccaaaaacaaagaaagaaagaaagggcccttatgaatcatcttcaagttcctcccttccaagaacagagatgctaggcgacttgcccagaggcacacagccagcatgtagcaggattcatgcctgtgggagctggggttgggggatattgacggctttagcggatcaaaagagctggtgagtagggctatacaatctgggggtcatcctgtgagagagcccccagactgctcagttcttaggggtccagtcatatgctgtctttttgccccagaggagaaatgtctgaagtaagacccctctccagagacatcttgatggagaccctcctgtatgagcagctcctggaacccccgaccatggaggttcttggcatgactgactctgaagaggacctggaccctatggaggacttcgattctttggaatgcatggagggcaggtaggtccccatggcctgccctaccccctgcctgatagtgacttcaggggtgggctggatgagcagacattctatgagcgggggagcgcctgcagatgcctcccaggcagggcctccgagaggaagatttcccggatgtgggcatggaggcttctgccctgggagcggcttcactttgctgccccaccctcccctgataccagctcacagacccctggacagccagcatgttcacagtctcaagatggacctggggcccctggctgtcaaaatggcacagtgtttgggcctcagggagctagacaggcccttagcgacctgctgaggacatcagggcctcttgaaggaggtgactctgttgccagaaaggggacccgatccagatcccaagagagggttcttagatctcaagcaagaaagaatttgggccacacgcagtggctcgcgcctgtaatcccagcacttagggaggctgaggcaggcggatcacttgaggtcaggagctcgagaccagcctggccaacatggcaaaaccctgtctctactaaaaatacaaaaagtagctgggcctggtggcacatgtctgtagtcccagctagtcgggaggctgaggcaggagaatctcttgaacccaggaggcagaggttgcagtgacccaaggttgcaaaaatgcactccagcctgggcaacagagcgagactccatctcaaaaaaagaaaacctactctataggcagagcagcggcatgggctgctcaactgaatatacttatagttatttcctgattacatgctaaacaaggggtggattattcatgagtttccgggtaaggggtgggcagttcccggaaccgagaattcctcctccttttagacaatatagggcaacttcctgacgttgccgtggcatttgtaaactgtcgtggcactggtgagtgactccaacatgctaatatagttggtgcacaatgaatagtgaggatgactggaggtcacttttgtgcccatcttggctttggtgggctttggctggcgtctttgccgaatcctgttttatcagcagggtctttgtaacctgtatcttatgctgatgtcctatctcatcctgtgacttagaattcctagcctcctgggaatgcaacccagtaggtctcagccttttgttacccagcccctaatcaagatggagtcgctctggttcaactgcctctgacggctctcattttagaaaaccagaaccgggccgggcgccgtggctcatgcctgtaatcccagcactttgggaggctgaggtgggcggatcacctgaggttgggagttcgagactagcctggccaacatggtgaaacccaacctctactaaaaatacaaatgttacccaggtatggggccgggggtggggggatgggcgctggtagtcccagctactcaggaggctgaggcaggaaaatcacttgaacccgggacgtggaggttgcagtgagccctgagattgcaccactgcactccagcctgggtaacagagtaagactccgtttcacaaaaaaagagaaagagaaaagaaagaaagaaaaaagaaagaaaaccagaacctatggaagagcctgaggaggccatgcagttcctggtcccggcttcaaagaatcactgaggcatgaagaagggatcttccttggactgacaaggaccctggaggcagcaggatttgcctggggtttcaggggccaaggtccagtaggacctgacccttgcactctgccaactgctcccagctatgtccagcacacggcagcatacccagatgtccaggcacacccggccatcccagcggcaggaaggacctgcactttttttttttttttttgagacagagtctctgtcacccaggctggagtgcagtggcatgatcttggctcactgcaacctccacctcccgggttcaagtgattttcctgcctcagcctcctgagtagctgggagtgcaggcgtgcaccagcatgcccggctttttttttttttttgagacggagtctcgctgtgtcgcccaggctggagtacagtggcatgatctctgctcaccacaagctccacctccctggtttacgccattctcctgcctcagcctcctgagtagctgggactacaggcgcctgccaccacacctggctaattttttgtattttcagtagagacagggtttcatcatgttagccaggatggtctcgatctcctgacctcgtgatctgcctgcctcggcctcccaaaaagtgctgggattacaggcgtgagccaccacacccggccaggactggcactttcattcttcccctggtacagatgaggaacgtgaaggcccaggagcagctgacctcagtagtttctaccctgagcctggaagagaatggtcaggcctgacctgggctgttgctttctgctggggaatcctgtctctgatgtggcacctcccacaggccagggaccagctccatgttccacaggattcttttctgctcaggattttttttttcagcctcaggatttttagtcattaaggattttagaactggaggcacctgtccattaatggacaaggttggaggacatgaagcctggggcagtattttcctgaggtttcccagggtaacagaaggtaggaccacagcccccaaccctgattgccagcccacacctgtacccctcccacccgcatcccctccaagtagggagtgtaggcccagggcattggcaggtcaggtgggtggggccagggcccagggccggcctcagctcagggcccctaggagtcccacttccctgggagttcccccggtgtagtcactgggatggaatgcacacaggtccctggtagaggcccagaccagcaagctgggagggtggggagtgtcttagtctttgtgtgggagtgaatgcgggtggggtgtaggatcaaggatgtggtttagtggggggcctactaggggcttcttagtccccccatttggagaggggtggtgccagcagggctggtttcaggattgggaccaggacacaggtcttagagccccctcacctcccacaaaggaaggtaagctgcaacccctgtgggaagggggctcaagggggctcagccatccgggggactcagcaccaccagacctgtccattccccttggtcagcctcagccatccgggggctcagcacccccagacctgcctgttccccttgtccaccatttccaccaaagcccacaggtgggcctgccccaggattctttttgaaatagcttgcacctctggggccacccacggatgggacctcatgggtatctctgaatccaagtgggagccggaggagggatacagggaggcccactcactgcctgccccaaatctgacaccatctcttatcctctgggccactcccagctgcacacaatccgttggctgggtgggtccaggtgcatgtggcctccacggcacagccacacccgactcctgtgtgtgctccctgcagtgacgcattggccctgcggctggcctgcatcggggacgagatggacgtgagcctcagggccccgcgcctggcccagctctccgaggtggccatgcacaggtagccggcctatgccctatgcctctacacctggggaggggccctgggcggtgggtggaggccctgaacacagcacagggctgggccctgaggaagctctgtgggggatgtgccttgacactggggctatactgaaacccttggctgcttcccgcacctctcctgggagcccccagctcctggcactcgccccctgccacctgtccctggcattcctgggcaacaaagcagagcccagggcccttttctctctcgccgtcctcattgagcccagatggtacatttccaccgtggtcttaagagggggtgctacgtgagctcggatcctagatcctgggggctgggcctctcagcgagtctccggtgggggaatagagtgggcagtggcttgtgagggccctgtagaatgggggtttattttccacgtggccagctctggaagacagggccaaacacccggtgggctggcgggcggctggctggcggaggaagcaggaagttggaatgaatttgaccacaaacagtccataccacgcggcccctgcaggtggaggcgcccacggaaagggccccgggtggctgtggggtgggagggcacaggcccctgctccccacagctgtgatggtgtcatctaagtacaggctgcccctacctgctcctgcagtaatggctttgtccccccatcctctttgtctatagcctgggtctggctttcatctacgaccagactgaggacatcagggatgttcttagaagtttcatggacggtttcaccacacttaaggagaacataatgaggttctggagatccccgaaccccgggtcctgggtaagagccttgagatccctgaccctgacttgcgctgcggccagtgggggctgtcagagccgctccttggggcgccacagtccccacca

SEQ ID NO: 1054 - DNA, 6000 bp, Homo sapiens
cctataatcccagctactcgggaggctgaggtaggagaatcacttgaacccaggaggtggaggttgcagtgagccaagatcacaccactgcactccaacctgggtgacagagcgagactcttgtctccaaaaaaaaaaagaaaagaaaagaaactaccctgagaccacgatgcaggagagcccagtggatatgctggtgacagccgcagcagagcccccagctcacactcagcatccactgccaaccttctgaatgaaccatctcagacctcgagccaggcttacctccaactgcaaccaaacctcaaaagagacccaggcaagaacttcccattggagtccttcctgaatttccaccctcaaaacaaacaattgtaaataacaacttaattgttttaatccactaaatttgaggataatttgttacacagtaatagtaattgaagcacatttcttatggagttaaaaaaaaaaaaaaaggcttgacacagtggctcacgcctgtaatcccagcactttgggaggctgaggtgagtggattgcttgagctcaggagtttgagaccaggctgagcaacatgatgaaaccctgtctctacaaaaaataaaaacattagccaggtgtggtggcacacatctatagtccaactactctgaggaatgaagtgggagaattgcttgaacctaggaggcagaggttacagtgagctgagattgcaccactacattcctgcctgggtgacagagcaagaccctgtctcaaaaaaaaaaaaaagtgggtattgtagtaatgcagcaagagaccaagaaaagtaggaggtagtgatcagagacctggctgcataaaaatgaagattcgggaaatggtggcgttaggacttcaccatggtgaaggtagaactcttaattttcatctttattaaatgtgtctgtttgcagttttaaccattggcatatttattttgtgtttgtgatttctgtgaaatatgagtacaataaatactgatagtttgcatttgttttctaatctctcagaaagttgtcagaaaatgttctctgactttttagaattgctgtggtcaggactgtggaagctgttgcgattccaactctcccttctaagtccaatcaattttgtgctttgtaatgtctatgccattcgtgcaccatagagggaagaaagcgttaaaatggtcgcgtcacaacatcttgatttgtcattgaaggagaaggagtctggaaggacgctgacaacgggtggtggtcaggaaggaaaacccagtgcctgtggcccagaggctggaggaggaacttcaaggagggatgttcagctccctgtggacccccatttgttcatccatacaatgatgctctgaggagcacacaaggaaggtgcaaatttgataaaatgtgcatgatgtaaggagcataaaccccctcaggaaagagttgctgccttttcactaatgtatccctgagctgcacagagcagccctgggggactgggaggacatgtccccggtgtgaggagcaggggaaaggtgagccttaaatgatcaccaacaaacaacagggcctgtgtctggggcttacaccacgacatgtggtcctcgcagcaccattgctcagaggaagaaaccaagatctcgaggaactgagtaatttgcccacgttcaacaagttggtgcaaaatgaagagtggctcccgtatttcagactttaaggccgacgatcttccatctgtgctctgggggcaagatgggaggtccacagataaaattgcgggcggtatcccccatctcatggtctttacgctcatgggacctgggagtgaccatcttttaagagggagggaaggaaggggagaggcttgaggaaggttttggggattaggatctaagatgaaatttgagactataagacttcagattggatgctgtggctcatgcctgtcatctcagcactctgggaggccatcacctgggcttgggcccaggagtttaagaccaacctgggtaacatagtgagaccctgtttttacaaaaacaaacaaaatgccaggtatggtagtgtgcacctgtggtcctagctactcagaaggctgaggcagggggattccttgagcccaggagtttgaggctacagtgagctagggacacaccactgcactccagcctgggtgacagagtgagaccctgtctcaaaaaaaaaaaaaaaaaaaaagattttaagcttgctgcaattccagatgaaggtagatcctggaggcactttgtgggagaggtcactacacttgagtattaaagactgttgacagatcagaaatcaaggaactgactgaccagggtattggatgggtcatttatgtggatgtccagatgaaccagtttggtgaaaagactcaggatcaaaagccaatctggaaagttgaggtcaaactctctgtgaaatctgggaagggatctggattttttgggaaaggcagggagtggttaataggcccagactccctcagaaatggggaatgttcttagtgcttctaaaagggaaaagactgttatggcaaagacctgatgccccagactgggttagagaccataagctctctcattcattcattcacatgtctgctaagcacctactgtttgccaggcaccatgcttggagcctagggcttcacagagagatgacagcctctcttctctccagccaacccaagtcaagaaggcaagcataaactagtaaatggctttttttttttttttgagatgggatctcactctgccccccaggttggatgcagtggtgtgatctcagctcactgcaacctttgcctcctgggctcggccaattttttttatttttggtagagacatgtttccaggctggtttcaaactcttgagctcaagtgacgcacccaccttggcctcccaaagtactgggattacaggtgtaagtcactgtgcccagccaagtaaatgccattcttagaaaaatactgtaattggcataaaatataaattgtgatgggacaccaaagagtgcaggttcaatcaggccctggccacaggcctctctctgagctggaatggtgataccccccttcccgacttgcatgagctccttctgccatgtcgtttctggtgtttgtcactcaagtgccttgtcctttcctaaggaataattttccaggccaggggcggtggctcacgcctgtaatcccagcactttgggaggccaaggagggcagatcacctgaggtcaggagtttgggaccagcctggccaacatggcaaaaacccatctctactaaaaacacaaaaattagccggacatggtggtgattgcctgtaatcccagctactcgggaggctgaggcacgagaatcggttgaacccgggaggtggaggttacagtgagctgagatcgtgccactacactccagcctgggcaacagagcaagttctgtctcaaaaaaaaaaaaaaaaaaaaaaaaaaaaaaaaaaaaaagaattttccgcagaactaagacataaagaaatcttagggcacataactttcatcaagggggaaaagggattgcgcttttgttgaaatgccagcctccttctttagccaatatttagccaggtgctgtggttcacacctgtaatcccagcactttgggaggctgaggccagaggatagctgagcccaggagtttgagaccaacctgggcaatacagagagagccggtctctctctctctctttttttttttttgagacggagtcttgctcttgccaggctggagtgcagtggcgcaatctcgtctcactgcaacctccgcttcccgggttcaaatgattctcctggctcagcctcccaagtcgccgggactacaggcgcccgccaccacgcccggctaatttttttgtatttttagtaaagacggggtttcaccatgttggccaggatggtctctggtctcgatctcttgacgtcgtgatccacccgccttggcctctcaaagtggtgggattgcaggcgtgagccaccgcgcccagccaccggtctctattttagaaagaaaaaaagtgtcctgcagtctctccctagttctgcgccctcaaccctgatctcccgcctcctcccacagccaccgtctcgagctcagcttcaaccatggccctccccacagggctccatcccaagccagagcgggtcagttccctacacagggcccagcaacacggtgcccaagaaaaagtgtttccagtgggacgcatgtcgcctccgtgggtgctaacttctcccagtgcccgtcggtacgtccgtccggctgtgcagtctctactgagtgctcaaagtccacttttagccccagccagcatcctctgagtaccttgtgctcgattctgaatccagccctgctcggcgaccctcgtgcagacgtccccgtgcagccccggtcagcaccccgtggggacagctccgatcagcacccgacggcggacagctcctcccgcgcctcccgcctcgcccgccaccccgctccgggccgcacccgggttagggttcctggggggatcctgggcgcggcggcgcagctcccggggccgccccggcctctcgcccagaggaaacagcccacggcgaacccgaggcccgcggaccccggcgctgcctcctcggcctcccgccccgcgcgggtcctccagggcggggcccgacgcccacccgcccgccccttccctcccgcccctccccgggaaaaatcctcatcgcacgcccggcccttccccaaccagcgcccggcagtgaagccgccgcctctcctccaaccagcgtccccggccgcgtccctcccccgcctcccccgccgccctccccgcgccgccgcggagtccgggcgaggtgcgcggggcggacgccgcagggcgtgtcacgaggtgagcggggcgggccgagcgccggcgcggggcgcggcgaggctcccgcaccccccgccgcagtcgcgggcctctcccggagaagatggcggatcgcgcggagatgttttctctctccaccttccactcgctgtcgccgccgggctgcaggtacccccctcggcgcccgggccgggcggaccctccgctccctgcgcacccccccgaccccgacccggcccggacccccgtccccgccgccccagccccgccgccggcgcggacccggccccggccccctgcggtccctgagcctcggctcgggcgccccacccccaccccgctcccactccctccatcttcaccgcgcgtccccagcctcagtgacccccgggccccgccgggattctgagccgcgcccggcctggacggctgacctgtcaagggtggaggccctgggccgaccctctgcgggggaggatgcgggcgggatgcgggcacaccctcccggcgcggcgtgtcccggtggccttggcctctttcagtggacgccagacctggccgatagggcccggccgggagagagtggaaatcaagcccggagccctgcgggaagggactggggttgggaggacgctgggcctctgggtttaggcctcactccgccggagagggggagacaaacaggccagactctcttcccagagcaggagcgacccctccccatctgccgctgccgcgttgcagctccccctcccctgctctgcaagaccctgaccccaggggcctggagctgcgagtggagggaggagaggctgctggctctccagggaggcggggtgggaggggtgggggcagggttggctcctccgggcaggcctggctcagatgggggaggggatccacaggcgagcagagcttgggggtcaagatgatggcaggatgtgttccgagagctgggggctgtggaaaccactgggtgtaggagctgacgcctccctctgcccctcctcagggccagttgccaggcagggagtccagggttggtggctctctgaccctggtctcctttccaggcctccccaggaca

SEQ ID NO: 1055 - DNA, 6000 bp, Homo sapiens
ggatctggattttttgggaaaggcagggagtggttaataggcccagactccctcagaaatggggaatgttcttagtgcttctaaaagggaaaagactgttatggcaaagacctgatgccccagactgggttagagaccataagctctctcattcattcattcacatgtctgctaagcacctactgtttgccaggcaccatgcttggagcctagggcttcacagagagatgacagcctctcttctctccagccaacccaagtcaagaaggcaagcataaactagtaaatggctttttttttttttttgagatgggatctcactctgccccccaggttggatgcagtggtgtgatctcagctcactgcaacctttgcctcctgggctcggccaattttttttatttttggtagagacatgtttccaggctggtttcaaactcttgagctcaagtgacgcacccaccttggcctcccaaagtactgggattacaggtgtaagtcactgtgcccagccaagtaaatgccattcttagaaaaatactgtaattggcataaaatataaattgtgatgggacaccaaagagtgcaggttcaatcaggccctggccacaggcctctctctgagctggaatggtgataccccccttcccgacttgcatgagctccttctgccatgtcgtttctggtgtttgtcactcaagtgccttgtcctttcctaaggaataattttccaggccaggggcggtggctcacgcctgtaatcccagcactttgggaggccaaggagggcagatcacctgaggtcaggagtttgggaccagcctggccaacatggcaaaaacccatctctactaaaaacacaaaaattagccggacatggtggtgattgcctgtaatcccagctactcgggaggctgaggcacgagaatcggttgaacccgggaggtggaggttacagtgagctgagatcgtgccactacactccagcctgggcaacagagcaagttctgtctcaaaaaaaaaaaaaaaaaaaaaaaaaaaaaaaaaaaaaagaattttccgcagaactaagacataaagaaatcttagggcacataactttcatcaagggggaaaagggattgcgcttttgttgaaatgccagcctccttctttagccaatatttagccaggtgctgtggttcacacctgtaatcccagcactttgggaggctgaggccagaggatagctgagcccaggagtttgagaccaacctgggcaatacagagagagccggtctctctctctctctttttttttttttgagacggagtcttgctcttgccaggctggagtgcagtggcgcaatctcgtctcactgcaacctccgcttcccgggttcaaatgattctcctggctcagcctcccaagtcgccgggactacaggcgcccgccaccacgcccggctaatttttttgtatttttagtaaagacggggtttcaccatgttggccaggatggtctctggtctcgatctcttgacgtcgtgatccacccgccttggcctctcaaagtggtgggattgcaggcgtgagccaccgcgcccagccaccggtctctattttagaaagaaaaaaagtgtcctgcagtctctccctagttctgcgccctcaaccctgatctcccgcctcctcccacagccaccgtctcgagctcagcttcaaccatggccctccccacagggctccatcccaagccagagcgggtcagttccctacacagggcccagcaacacggtgcccaagaaaaagtgtttccagtgggacgcatgtcgcctccgtgggtgctaacttctcccagtgcccgtcggtacgtccgtccggctgtgcagtctctactgagtgctcaaagtccacttttagccccagccagcatcctctgagtaccttgtgctcgattctgaatccagccctgctcggcgaccctcgtgcagacgtccccgtgcagccccggtcagcaccccgtggggacagctccgatcagcacccgacggcggacagctcctcccgcgcctcccgcctcgcccgccaccccgctccgggccgcacccgggttagggttcctggggggatcctgggcgcggcggcgcagctcccggggccgccccggcctctcgcccagaggaaacagcccacggcgaacccgaggcccgcggaccccggcgctgcctcctcggcctcccgccccgcgcgggtcctccagggcggggcccgacgcccacccgcccgccccttccctcccgcccctccccgggaaaaatcctcatcgcacgcccggcccttccccaaccagcgcccggcagtgaagccgccgcctctcctccaaccagcgtccccggccgcgtccctcccccgcctcccccgccgccctccccgcgccgccgcggagtccgggcgaggtgcgcggggcggacgccgcagggcgtgtcacgaggtgagcggggcgggccgagcgccggcgcggggcgcggcgaggctcccgcaccccccgccgcagtcgcgggcctctcccggagaagatggcggatcgcgcggagatgttttctctctccaccttccactcgctgtcgccgccgggctgcaggtacccccctcggcgcccgggccgggcggaccctccgctccctgcgcacccccccgaccccgacccggcccggacccccgtccccgccgccccagccccgccgccggcgcggacccggccccggccccctgcggtccctgagcctcggctcgggcgccccacccccaccccgctcccactccctccatcttcaccgcgcgtccccagcctcagtgacccccgggccccgccgggattctgagccgcgcccggcctggacggctgacctgtcaagggtggaggccctgggccgaccctctgcgggggaggatgcgggcgggatgcgggcacaccctcccggcgcggcgtgtcccggtggccttggcctctttcagtggacgccagacctggccgatagggcccggccgggagagagtggaaatcaagcccggagccctgcgggaagggactggggttgggaggacgctgggcctctgggtttaggcctcactccgccggagagggggagacaaacaggccagactctcttcccagagcaggagcgacccctccccatctgccgctgccgcgttgcagctccccctcccctgctctgcaagaccctgaccccaggggcctggagctgcgagtggagggaggagaggctgctggctctccagggaggcggggtgggaggggtgggggcagggttggctcctccgggcaggcctggctcagatgggggaggggatccacaggcgagcagagcttgggggtcaagatgatggcaggatgtgttccgagagctgggggctgtggaaaccactgggtgtaggagctgacgcctccctctgcccctcctcagggccagttgccaggcagggagtccagggttggtggctctctgaccctggtctcctttccaggcctccccaggacataagcctggaagaatttgacgacgaagatctgtctgagatcactgatgactgtggcctgggcctcagctacgactcagaccactgtgagaaggtgggagaagagttggggacacagatccagctcaagggagggcctcattaggttcttcttagcgttcacttggggttttagggtgggtgtgagctcagccttgaaccggggactcctctgatggctcctccccacttaacccttgaggtttccttggtatcaactctctcttattccaacacattgcaggcctccacgcagggccttccccagcattctccccgaccccatcggtggccagcccggggcagggaggtgctcctttgctttgggtgccctctgtcctcagatcactcccagaaagatctaatccctggcagctgccatcacaaccttgtcccctctgcagccctgtgccctcgtctgcagctcccatctgtctgtttcatgtctccccctgctgaaatcttttctcgtccatctcttgcttctcctcctccctgtctctccacatttctgctttcatttattgaagaacatttctgagcaactgccatgtggcaagtactgggggcttctgggtgctgggagtggaacaggacagctgctctctggagctgcaacttagtaggggagaaagacttgtaagggacaatggctgcccacgtgtcaagggctgcattccaacagggacataagttccacgagggggaagggaacccaatccacactgaaggaatcagggagaatttccagaggaaatgtcaaccatgccctgaggttagcagagccaggcagatggggtaggtaggagggaatggaggagaggaagtgccagcatggggaataactgtgccaatggccctggggttggcgcaaagttggtgaatcctcagagtgcagaggctgtctctccatttctgcatctgtttgatgtttactgaacatccgctgagccccaggtcttgttcttgggggcgggtgcaacagtgcataacatggacatgaccctgccctggtggggcttgcaacagaccaaaaaccatgtccagtaactgtaagttgtgttaaaacgctgcgaagggaacacagtgctggtgtcaaatgtgatggggttctgcagttagatgagtctgaaagtggggctggggctgctctgagaatccctgtcattcagctgtagagtttaggcccttcccaagaactggagtgatcccaatgtgtgttaggcagattttgaaaacatcgccctgtagacagaggggcagagtgagctggaaggggctctcctttgactgatgctccccgatttcccttctcctagcacctgggcccctgggctactgctgccctctggcccagccctgctatctccctccgtcctgcaggacagcctctccctggggcgctcggagcagccgcaccccatctgctccttccaggatgacttccaggagtttgagatgatcgatgacaatgaagaggaggacgatgaggacgaggaagaggaggaggaggaggaggagggagatggggaaggccaggagggaggagaccctggctcagaggcacctgcccccgggccccttatcccctccccttccgtggaggagccccacaagcaccggcccaccaccctccgtctgaccacactgggggcccaggtgagtgcccggacccacagctccctggagctgagcctgggttcatagcacctgggctgcagccagccctgctcaccccctgggagctggccctcctcaggaccgccgtcatgtatctccaccccaggactccctaaacaacaacggaggctttgacctggtgcgtccggcctcctggcaggagacagcgctatgctcacccgccccggaggccctcagaggtgaggggtggtgggcccgcggggcgcggggaagcgggggaggagggcagggaggatggactggctgctggaagaggcctgggtggtgcagagagggtgaccccacctccctgcccagcagagctcccgggccccctccctgccacggacaccgggcccggcggggcgcagtcgccagtgcgcccgggttgcgactgcgaagggaaccggcctgcggaaccccctgcgccaggggggacttcgccctcctcagatcccggcatcgaggctgacctgagaagccgctcgagcggcggccgcgggggacgtcgcagcagccaggagctgtcctcgcccggctccgactcggaggacgcgggcggcgccgcctggggcgcatgatctcgtccatctcggagacggagctggagctgagcagcgatggcggaagcagcagcagcggccgctcctcgcacctcaccaactccatcgaggaggcctcgtcgcccgcctcggagccggagcccccgcgcgaacccccgcgccgccccgccttcctgcc

SEQ ID NO: 1056 - DNA, 6000 bp, Homo sapiens
tctgaattttaacaaacccgccagctgattctgatgtaccaaagtgtgaaaaaccctgtgttaaaagaaagatgaggttaaatgtttttttaaaaaacacagctttattgagatagaattcacatcacccactcaagtgtacaagtcaatgatttttagtatatttacagggttgtgcaaacatcactgaaataatttgtaattaataggtaaaaaaaaaaaaaaaaaaaaaggaaacctggccgggcgtggtagttcatgcctgtaatcccagcactttgggaggcagaggcgggcagatcacttgaggtcaggagttcgagaccagcctggccaacgtggtgaaacccccgtctctactaaaaaatacaaaaaatagccgggtgtggtggcaggcgcctgtaatcccagctacttgggaggctgaggcaggagaatcacttgaacccgggaggcagaggtcactaaaaatacaaaaattagctaggtgtggtggcacacgcctgtgggaggtagaggttgctgtaagctgagatcgcgccattgcactccagcctgggtggtgacatagcgagactctgtctcaaaaaaaaaaaaaaaaaaaaaaaaaaaaaaaaaaagaagaaggccgggcgcggtggctcacgcctgtaatcccagcactttgggaggctgaggcaggcagatcacgaggtcaggagatcaagaccatcctggctaacacggtgaaaccccgtctctactaaaaatacaaaaaaattagccaggcgtggtggcaggcacctgtagtcccagctactggggaggctgaggcaggaaaatggcgtgaacccgggaggcggagcttgcagtgaggcgagatcgtgccactgcactccagcctgagtgacagagcaatgctctgtctcaaaaaaaaaaaaaagaaagaaaagaaaaagaaaaggctgggtgcggtggctcctgcctgtaatcctagaactttgggatgcccagccgggtgggtcatgaggtcaggagatcgagaccatcctggctaacacggtgaaaccccgtctctactaaaaatacaaaaaattagccgggcgtggtggcgggcgcctgtagtcccagctgctctagaggctgaggcaggagaatggcgggaacctggggggcggagcttgcagtgagcggagatggtgccactgcactccagcctgggcgacagagcgagactccgtttcaaaaagaaaagaaaaaaaaaaaaaagaaaagaaaaccctgaaagaaaccctgtactaattagcagccactccccattcccctcccatcccctactcccagcccgaagcaaccactaacccattttgtctttttttttttttttttttttttggaggcggagtctcgctctgtcgcccaaggctggagtgtagtggtgcgatctcggctcactgcaagctccgcctcccgggttcacgccattctcctgcctcagcctcccgagtagctgggactacaggcgcccgccaccacgcccggctaattttttgtatttttagtagagaccgggtttcaccgtgttagccaggatggtctcgatcttctgacctcgtgatccgcccacctcagcctcccaaagtgctgagattacaggcgtgagccaccgcgcccggccctactttgtctttatatagatttgcctattctagacatttcatataagtggaatcatacaatatgtatatgattcctgtgactggctttgtctactttctgtactgtttgcaaggttcctccatgtggtagtatggatcctttttgataaataatatgccatgtatggataggcacatttaaaaaatcgatttataaattgaacattcatgtgtttctaccttttggctattacgaataatcctatggatattcacatacaagtttttgtgtagacatatttttcatttcttttggatatgtatgtgtatatatatatgtgtgtgtgtatatatatacacatatatatgtaattttgtttggttttggttttgtttcttttcttttgtaaagacagggtctccctatgttactcaggctaaattttaattcctgggctcaagtgatcctcctgcatcagcctccttctgagcagctgggacaacaggtgtgctctgtatgacacacatacaccacacgcacacacacagaagtggaactgctgggtcagagatcttacactcttaaccactccacatttcagcttgtcttactctctgctatgatttaatatgtacattatcaaattgagaaaaagacaaaaaaattaaaaataataaaataaaaataaaaaattatcagtaatactaataatcacttcgatccattgagtgtttatgtttgcaaagcctttatttttatttatttttatttttttgagacagagtctcactctgtcacccaggctggagtgcagtggcgtgatctcggctcactgcaacctctgcctcccgggttcaaatgattctcctgcctcagcctcctgagtagctgggatttcaggcacccaccaccacgcacggctaatttttgtatatttagtagagatggggttttcgccatattgaccaagctggtctcgaactcttgaccttgtgatctgcccacctcggcctcccaaagttctgggattagaggtgtgagccaccgtgcccggacttttttttttttttttttttttttgagacagggtctcactctgtcacccagaatggagtgcagtggtgtgatctaagctcaccgcaacctctgcctcccaggctcaagcgattctcctgcctcagcctcccagatagctgggattacaggcacacaccaccacgcctggctcatttttctatttttagtagagacggggcttcaccatgttggccatgctggtctcaaactcctgacctcaagtgatccacctgcctcggcctcccaaagtgctgggattacaggcgtgagccacggcacccaggctacttttttcttttttcttttcttttctttttttttttttttttcagagacagggtctcactctattgcccaggctgtcctccaacccctgtcctcaagcaatcctcccgcctcagcctcccaaaacactgggattataggcatgagccactgtgcccctttacttttattgtcactaatcctcaccactaccctataaaacaagaatcattatcgtcattacacagagaagagaaacgggctcacagaagtcaagtgatctgtctaagctcaagcaagctgatatggggtggagttgggaccacaacccacatctgcctgctttctgtgccctctgtgcttgatctcatgtcatgggccatccattttgccaaagctttcgaaacatgccttctcccctccttttaggccttttctggaagtcaggctggcttgcagctctcaccccaagctcttttccccagctggggctgaaggctggggaggagcttcatgggggctggaaataaatgaagggagggctgggcgggacagggcagtatttccaggaggctgtgagggggaggtaaggagtttgttattgttttgggtttggggatttttttttctttgctcctggagagcaggttaggtagctcttggcagagttttgctagggatacgaagtgggtgaggctgaggcaagcagaatcctcctgcctcagcctcccacgtagctaggactagagcttctgcagtgctaagtgggaaaggggctttctgcctctgtggggcctggtctggaaagtcccccaaattgttaaaagcaaagagtgattgtccccagctggcaaggggacttttgttttatgtccaccccttgtgccccttgctctgcgaagccctacctgtgccgggagcttcgaataggaagaggacctcagggccaggcatccagggactgaggggctacagcagaaacagacccagaggcacccttggctaggaagagcaggatgaaggtgtaataattttgggagtggtctaagaagactttccttttaaagagtggaaagcaatgaaactgaggcttcaaggctgcaaaaatttcgtcctggatcagagaagggcactacaggtggagggaactatctgtgcaaagggttgggcccttcaagagttggagcacagaggtttaggagaaaaagtggtgacagatgagcccagggctatctgcttagacctgtgatctaatatgggtgccaacagccacatggcaatgtggctatttaaatttaaattagttaaaattcaataaagtaaaaaatacagctcctgtgccaggtgcagtggctcacgcctgtaatccccgcactttgggaggccaagacagggagatcacctgaggtcaggagttcaagaccagcctagccaacatggtgaaacccagtctctactaaaaatccaaacaaaacgaaactaaactaaaaattagctgggcgtggtggcaggtgcctgtaatcccagctacgggggaggctgaggcaggataattgcttgaacccaggaggcggaggttgtagtgagcaagatcgccccattgcactccagcctgggtgacaagagcgaaactcaaaaaaaaaaaaaattcagctcctgaatcacactagttatgtttcaaatactcaatagccacatggggctagtagcaatggtattggagagtatgtacaaggcatgcctctatcatcacagaatgttcttttggccactgtgaagcctcaggaaggggctcggattgctcaaggacccatgggagagaggaggctttgactgggctgcctgcctgtgaggtctctggactagaggtgagggaacggtccccagaagtgtgaggtggtgtgactcacctcctgccagcgtaaagtggactctgtccccatggacaggaacaaatcgggcaaggcttcttcagccctgagttgggttatctgctcagtgtgaccagagccaggggatgagaaacatggagtgagtgggactggggcaggagcagcagctgctgagtgaggctgagcctgagcacccggtggggagaggggtggggtctccagcttggtcttggttggcatgcatggggccggacaggagaagggctgggggaggtatgtgtgagttgggatagaagaatagggaggaaggttgctgaacaggggttgggttgcaccttgcctaacaatgagagagatgggaaccctctcatctcaccctgatgaattgtttctgcctccttcccaggtccaacgcagtccagctgacaaggatggaatacgccatgaagtcccttagccttctctaccccaagtccctctccaggtgaggaaagtcatgggcagaatggaaagagagccacctatgagctgtaagccagaacttctcaaactttaatgggtatacaggtcacaggggaccttgttcaagtgcagattctgattcaggaggtctggagtgggacccgagattttgcactgccaagaagtccctgggtgatattaatgctgctgcttacaccaccaccacaccatgcataaaaaggagtagacactatgcttggtgcttttactcctgatctcatgtaagcctcacaacaactttgggaagtgggggttattataccaaattaataggtgagagaactgaggcacatagtgggtgctctcaatcacccagcaaatccatgagggagccaagattctaaattgggactgcctgactgtaaaatccaggtcctttcctttcctttggttctaaattgagtgcttcagttaaaaaaataccttacattgacttcaggcttcccccacttcatccaactttacaggtgaggagagtgaggccaagacaggtggtaaatggggaatgtggggtgggtcttttattactttgctacttactcctcatggtctgagaaccagcgttatcaacatcacttgggaacttgtgaaacatttggaatctcag

SEQ ID NO: 1057 - DNA, 6000 bp, Homo sapiens
ctagactctgtagcaagtacatttcacgattatctcttttaatctgcatggaaaccagatgcagtagagctatttttatccccagttgttggatcaaactgaagcttagaaaatttagctcacacagctagcgctagaccactggttctcaaagtgggctccctgagcagccatggcttctgaatcatctgggaacctttagtaacgcaaattcctaggcaccaccccagacttactaagtgagaaattctggggtggggcctagcaatctgaattttaacaaacccgccagctgattctgatgtaccaaagtgtgaaaaaccctgtgttaaaagaaagatgaggttaaatgtttttttaaaaaacacagctttattgagatagaattcacatcacccactcaagtgtacaagtcaatgatttttagtatatttacagggttgtgcaaacatcactgaaataatttgtaattaataggtaaaaaaaaaaaaaaaaaaaaaggaaacctggccgggcgtggtagttcatgcctgtaatcccagcactttgggaggcagaggcgggcagatcacttgaggtcaggagttcgagaccagcctggccaacgtggtgaaacccccgtctctactaaaaaatacaaaaaatagccgggtgtggtggcaggcgcctgtaatcccagctacttgggaggctgaggcaggagaatcacttgaacccgggaggcagaggtcactaaaaatacaaaaattagctaggtgtggtggcacacgcctgtgggaggtagaggttgctgtaagctgagatcgcgccattgcactccagcctgggtggtgacatagcgagactctgtctcaaaaaaaaaaaaaaaaaaaaaaaaaaaaaaaaaaagaagaaggccgggcgcggtggctcacgcctgtaatcccagcactttgggaggctgaggcaggcagatcacgaggtcaggagatcaagaccatcctggctaacacggtgaaaccccgtctctactaaaaatacaaaaaaattagccaggcgtggtggcaggcacctgtagtcccagctactggggaggctgaggcaggaaaatggcgtgaacccgggaggcggagcttgcagtgaggcgagatcgtgccactgcactccagcctgagtgacagagcaatgctctgtctcaaaaaaaaaaaaaagaaagaaaagaaaaagaaaaggctgggtgcggtggctcctgcctgtaatcctagaactttgggatgcccagccgggtgggtcatgaggtcaggagatcgagaccatcctggctaacacggtgaaaccccgtctctactaaaaatacaaaaaattagccgggcgtggtggcgggcgcctgtagtcccagctgctctagaggctgaggcaggagaatggcgggaacctggggggcggagcttgcagtgagcggagatggtgccactgcactccagcctgggcgacagagcgagactccgtttcaaaaagaaaagaaaaaaaaaaaaaagaaaagaaaaccctgaaagaaaccctgtactaattagcagccactccccattcccctcccatcccctactcccagcccgaagcaaccactaacccattttgtctttttttttttttttttttttttggaggcggagtctcgctctgtcgcccaaggctggagtgtagtggtgcgatctcggctcactgcaagctccgcctcccgggttcacgccattctcctgcctcagcctcccgagtagctgggactacaggcgcccgccaccacgcccggctaattttttgtatttttagtagagaccgggtttcaccgtgttagccaggatggtctcgatcttctgacctcgtgatccgcccacctcagcctcccaaagtgctgagattacaggcgtgagccaccgcgcccggccctactttgtctttatatagatttgcctattctagacatttcatataagtggaatcatacaatatgtatatgattcctgtgactggctttgtctactttctgtactgtttgcaaggttcctccatgtggtagtatggatcctttttgataaataatatgccatgtatggataggcacatttaaaaaatcgatttataaattgaacattcatgtgtttctaccttttggctattacgaataatcctatggatattcacatacaagtttttgtgtagacatatttttcatttcttttggatatgtatgtgtatatatatatgtgtgtgtgtatatatatacacatatatatgtaattttgtttggttttggttttgtttcttttcttttgtaaagacagggtctccctatgttactcaggctaaattttaattcctgggctcaagtgatcctcctgcatcagcctccttctgagcagctgggacaacaggtgtgctctgtatgacacacatacaccacacgcacacacacagaagtggaactgctgggtcagagatcttacactcttaaccactccacatttcagcttgtcttactctctgctatgatttaatatgtacattatcaaattgagaaaaagacaaaaaaattaaaaataataaaataaaaataaaaaattatcagtaatactaataatcacttcgatccattgagtgtttatgtttgcaaagcctttatttttatttatttttatttttttgagacagagtctcactctgtcacccaggctggagtgcagtggcgtgatctcggctcactgcaacctctgcctcccgggttcaaatgattctcctgcctcagcctcctgagtagctgggatttcaggcacccaccaccacgcacggctaatttttgtatatttagtagagatggggttttcgccatattgaccaagctggtctcgaactcttgaccttgtgatctgcccacctcggcctcccaaagttctgggattagaggtgtgagccaccgtgcccggacttttttttttttttttttttttttgagacagggtctcactctgtcacccagaatggagtgcagtggtgtgatctaagctcaccgcaacctctgcctcccaggctcaagcgattctcctgcctcagcctcccagatagctgggattacaggcacacaccaccacgcctggctcatttttctatttttagtagagacggggcttcaccatgttggccatgctggtctcaaactcctgacctcaagtgatccacctgcctcggcctcccaaagtgctgggattacaggcgtgagccacggcacccaggctacttttttcttttttcttttcttttctttttttttttttttttcagagacagggtctcactctattgcccaggctgtcctccaacccctgtcctcaagcaatcctcccgcctcagcctcccaaaacactgggattataggcatgagccactgtgcccctttacttttattgtcactaatcctcaccactaccctataaaacaagaatcattatcgtcattacacagagaagagaaacgggctcacagaagtcaagtgatctgtctaagctcaagcaagctgatatggggtggagttgggaccacaacccacatctgcctgctttctgtgccctctgtgcttgatctcatgtcatgggccatccattttgccaaagctttcgaaacatgccttctcccctccttttaggccttttctggaagtcaggctggcttgcagctctcaccccaagctcttttccccagctggggctgaaggctggggaggagcttcatgggggctggaaataaatgaagggagggctgggcgggacagggcagtatttccaggaggctgtgagggggaggtaaggagtttgttattgttttgggtttggggatttttttttctttgctcctggagagcaggttaggtagctcttggcagagttttgctagggatacgaagtgggtgaggctgaggcaagcagaatcctcctgcctcagcctcccacgtagctaggactagagcttctgcagtgctaagtgggaaaggggctttctgcctctgtggggcctggtctggaaagtcccccaaattgttaaaagcaaagagtgattgtccccagctggcaaggggacttttgttttatgtccaccccttgtgccccttgctctgcgaagccctacctgtgccgggagcttcgaataggaagaggacctcagggccaggcatccagggactgaggggctacagcagaaacagacccagaggcacccttggctaggaagagcaggatgaaggtgtaataattttgggagtggtctaagaagactttccttttaaagagtggaaagcaatgaaactgaggcttcaaggctgcaaaaatttcgtcctggatcagagaagggcactacaggtggagggaactatctgtgcaaagggttgggcccttcaagagttggagcacagaggtttaggagaaaaagtggtgacagatgagcccagggctatctgcttagacctgtgatctaatatgggtgccaacagccacatggcaatgtggctatttaaatttaaattagttaaaattcaataaagtaaaaaatacagctcctgtgccaggtgcagtggctcacgcctgtaatccccgcactttgggaggccaagacagggagatcacctgaggtcaggagttcaagaccagcctagccaacatggtgaaacccagtctctactaaaaatccaaacaaaacgaaactaaactaaaaattagctgggcgtggtggcaggtgcctgtaatcccagctacgggggaggctgaggcaggataattgcttgaacccaggaggcggaggttgtagtgagcaagatcgccccattgcactccagcctgggtgacaagagcgaaactcaaaaaaaaaaaaaattcagctcctgaatcacactagttatgtttcaaatactcaatagccacatggggctagtagcaatggtattggagagtatgtacaaggcatgcctctatcatcacagaatgttcttttggccactgtgaagcctcaggaaggggctcggattgctcaaggacccatgggagagaggaggctttgactgggctgcctgcctgtgaggtctctggactagaggtgagggaacggtccccagaagtgtgaggtggtgtgactcacctcctgccagcgtaaagtggactctgtccccatggacaggaacaaatcgggcaaggcttcttcagccctgagttgggttatctgctcagtgtgaccagagccaggggatgagaaacatggagtgagtgggactggggcaggagcagcagctgctgagtgaggctgagcctgagcacccggtggggagaggggtggggtctccagcttggtcttggttggcatgcatggggccggacaggagaagggctgggggaggtatgtgtgagttgggatagaagaatagggaggaaggttgctgaacaggggttgggttgcaccttgcctaacaatgagagagatgggaaccctctcatctcaccctgatgaattgtttctgcctccttcccaggtccaacgcagtccagctgacaaggatggaatacgccatgaagtcccttagccttctctaccccaagtccctctccaggtgaggaaagtcatgggcagaatggaaagagagccacctatgagctgtaagccagaacttctcaaactttaatgggtatacaggtcacaggggaccttgttcaagtgcagattctgattcaggaggtctggagtgggacccgagattttgcactgccaagaagtccctgggtgatattaatgctgctgcttacaccaccaccacaccatgcataaaaaggagtagacactatgcttggtgcttttactcctgatctcatgtaagcctcacaacaactttgggaagtgggggttattataccaaattaataggtgagagaactgaggcacatagtgggtgctctcaatcacccagcaaatccatgagggagccaagat

SEQ ID NO: 1058 - DNA, 6000 bp, Homo sapiens
atggtgttataaatttaacatgcagaatatatttttaaatttagtggcttctcaattttgagttgtagccacagtccttttccaatccgaggtgtcccagatgattttcatgtactacagagtttgagaaccatgctcagacattgcctttctcactggaatgtgaattccccaaaggcagggacaagaactaagtcatccatgtccccagcagctcatagtgtctggcatagtgtaaaaatttcaacgcctgtaatcccagcactttgggagctcgaggcgggaggatcgcttaagcccaggagttcgagaccagcctgggcaacatggcaaaactccatctctattaaaagaaaaaaaagaaaaaaaatttaaaaagaaagaaatgctggttgaatagataaattccaatggagccaaaaccgtctccctctcctaattgctgtgaagaatccccgggtttatccttcatccctggacagtgctctctggctgtagctcgtggttatcttcgtctttctgtgtctggttttctgtcagggccagacctctcctgagtcatctattggcctatctatctcaggacatcaagtacacagtagagcaataaatatttgagccatgactgttgaagggaggggccccgactctttctccagaacctcttccctaaagggttttgcttgtacctttctcctggctcttggtctgtccttaagtttaagttatatgtgttcctgtctcctcactctctcttcatgctcccttctcaaatcctttgcaatgatgtttcctttgtcttgatcatcccccaggatttagtcaggatttacctcaaagctcacctccttggaggcgtttcttgaacgcataggccaatctaactctccagctgttattatatcacctcgttttgttttcttcccagaacatcattatctgaaattattttgtttatttgcatatttattcatggtctgagttcccaccttcctcaggaatgtcagctccttgaagtgtgggacaaggctgtcttgtttcctgttgtattcttagccccagaaggactggcatatagtaagtgcttaataaatatttcctgaatgaatgaatgaatggttgcctgagagcccctccagggaaggatttagatctaaataataataatttccatttattgagctctaaggatgcactagactctgtagcaagtacatttcacgattatctcttttaatctgcatggaaaccagatgcagtagagctatttttatccccagttgttggatcaaactgaagcttagaaaatttagctcacacagctagcgctagaccactggttctcaaagtgggctccctgagcagccatggcttctgaatcatctgggaacctttagtaacgcaaattcctaggcaccaccccagacttactaagtgagaaattctggggtggggcctagcaatctgaattttaacaaacccgccagctgattctgatgtaccaaagtgtgaaaaaccctgtgttaaaagaaagatgaggttaaatgtttttttaaaaaacacagctttattgagatagaattcacatcacccactcaagtgtacaagtcaatgatttttagtatatttacagggttgtgcaaacatcactgaaataatttgtaattaataggtaaaaaaaaaaaaaaaaaaaaaggaaacctggccgggcgtggtagttcatgcctgtaatcccagcactttgggaggcagaggcgggcagatcacttgaggtcaggagttcgagaccagcctggccaacgtggtgaaacccccgtctctactaaaaaatacaaaaaatagccgggtgtggtggcaggcgcctgtaatcccagctacttgggaggctgaggcaggagaatcacttgaacccgggaggcagaggtcactaaaaatacaaaaattagctaggtgtggtggcacacgcctgtgggaggtagaggttgctgtaagctgagatcgcgccattgcactccagcctgggtggtgacatagcgagactctgtctcaaaaaaaaaaaaaaaaaaaaaaaaaaaaaaaaaaagaagaaggccgggcgcggtggctcacgcctgtaatcccagcactttgggaggctgaggcaggcagatcacgaggtcaggagatcaagaccatcctggctaacacggtgaaaccccgtctctactaaaaatacaaaaaaattagccaggcgtggtggcaggcacctgtagtcccagctactggggaggctgaggcaggaaaatggcgtgaacccgggaggcggagcttgcagtgaggcgagatcgtgccactgcactccagcctgagtgacagagcaatgctctgtctcaaaaaaaaaaaaaagaaagaaaagaaaaagaaaaggctgggtgcggtggctcctgcctgtaatcctagaactttgggatgcccagccgggtgggtcatgaggtcaggagatcgagaccatcctggctaacacggtgaaaccccgtctctactaaaaatacaaaaaattagccgggcgtggtggcgggcgcctgtagtcccagctgctctagaggctgaggcaggagaatggcgggaacctggggggcggagcttgcagtgagcggagatggtgccactgcactccagcctgggcgacagagcgagactccgtttcaaaaagaaaagaaaaaaaaaaaaaagaaaagaaaaccctgaaagaaaccctgtactaattagcagccactccccattcccctcccatcccctactcccagcccgaagcaaccactaacccattttgtctttttttttttttttttttttttggaggcggagtctcgctctgtcgcccaaggctggagtgtagtggtgcgatctcggctcactgcaagctccgcctcccgggttcacgccattctcctgcctcagcctcccgagtagctgggactacaggcgcccgccaccacgcccggctaattttttgtatttttagtagagaccgggtttcaccgtgttagccaggatggtctcgatcttctgacctcgtgatccgcccacctcagcctcccaaagtgctgagattacaggcgtgagccaccgcgcccggccctactttgtctttatatagatttgcctattctagacatttcatataagtggaatcatacaatatgtatatgattcctgtgactggctttgtctactttctgtactgtttgcaaggttcctccatgtggtagtatggatcctttttgataaataatatgccatgtatggataggcacatttaaaaaatcgatttataaattgaacattcatgtgtttctaccttttggctattacgaataatcctatggatattcacatacaagtttttgtgtagacatatttttcatttcttttggatatgtatgtgtatatatatatgtgtgtgtgtatatatatacacatatatatgtaattttgtttggttttggttttgtttcttttcttttgtaaagacagggtctccctatgttactcaggctaaattttaattcctgggctcaagtgatcctcctgcatcagcctccttctgagcagctgggacaacaggtgtgctctgtatgacacacatacaccacacgcacacacacagaagtggaactgctgggtcagagatcttacactcttaaccactccacatttcagcttgtcttactctctgctatgatttaatatgtacattatcaaattgagaaaaagacaaaaaaattaaaaataataaaataaaaataaaaaattatcagtaatactaataatcacttcgatccattgagtgtttatgtttgcaaagcctttatttttatttatttttatttttttgagacagagtctcactctgtcacccaggctggagtgcagtggcgtgatctcggctcactgcaacctctgcctcccgggttcaaatgattctcctgcctcagcctcctgagtagctgggatttcaggcacccaccaccacgcacggctaatttttgtatatttagtagagatggggttttcgccatattgaccaagctggtctcgaactcttgaccttgtgatctgcccacctcggcctcccaaagttctgggattagaggtgtgagccaccgtgcccggacttttttttttttttttttttttttgagacagggtctcactctgtcacccagaatggagtgcagtggtgtgatctaagctcaccgcaacctctgcctcccaggctcaagcgattctcctgcctcagcctcccagatagctgggattacaggcacacaccaccacgcctggctcatttttctatttttagtagagacggggcttcaccatgttggccatgctggtctcaaactcctgacctcaagtgatccacctgcctcggcctcccaaagtgctgggattacaggcgtgagccacggcacccaggctacttttttcttttttcttttcttttctttttttttttttttttcagagacagggtctcactctattgcccaggctgtcctccaacccctgtcctcaagcaatcctcccgcctcagcctcccaaaacactgggattataggcatgagccactgtgcccctttacttttattgtcactaatcctcaccactaccctataaaacaagaatcattatcgtcattacacagagaagagaaacgggctcacagaagtcaagtgatctgtctaagctcaagcaagctgatatggggtggagttgggaccacaacccacatctgcctgctttctgtgccctctgtgcttgatctcatgtcatgggccatccattttgccaaagctttcgaaacatgccttctcccctccttttaggccttttctggaagtcaggctggcttgcagctctcaccccaagctcttttccccagctggggctgaaggctggggaggagcttcatgggggctggaaataaatgaagggagggctgggcgggacagggcagtatttccaggaggctgtgagggggaggtaaggagtttgttattgttttgggtttggggatttttttttctttgctcctggagagcaggttaggtagctcttggcagagttttgctagggatacgaagtgggtgaggctgaggcaagcagaatcctcctgcctcagcctcccacgtagctaggactagagcttctgcagtgctaagtgggaaaggggctttctgcctctgtggggcctggtctggaaagtcccccaaattgttaaaagcaaagagtgattgtccccagctggcaaggggacttttgttttatgtccaccccttgtgccccttgctctgcgaagccctacctgtgccgggagcttcgaataggaagaggacctcagggccaggcatccagggactgaggggctacagcagaaacagacccagaggcacccttggctaggaagagcaggatgaaggtgtaataattttgggagtggtctaagaagactttccttttaaagagtggaaagcaatgaaactgaggcttcaaggctgcaaaaatttcgtcctggatcagagaagggcactacaggtggagggaactatctgtgcaaagggttgggcccttcaagagttggagcacagaggtttaggagaaaaagtggtgacagatgagcccagggctatctgcttagacctgtgatctaatatgggtgccaacagccacatggcaatgtggctatttaaatttaaattagttaaaattcaataaagtaaaaaatacagctcctgtgccaggtgcagtggctcacgcctgtaatccccgcactttgggaggccaagacagggagatcacctgaggtcaggagttcaagaccagcctagccaacatggtgaaacccagtctctactaaaaatccaaacaaaacgaaactaaactaaaaattagctgggcgtggtggcaggtgcctgtaatcccagctacgggggaggctgaggcaggataattgct

SEQ ID NO: 1059 - DNA, 6000 bp, Homo sapiens
ggataaccattatcagccatcttgcagatggaaaaactaagtcttgtcagcacgtccggcttccaggcacccgcctttaacacgtgcgataccatctggcttccagaaaagcccaacagaagtgagatgaggccgactgcctggattagttcatcgggaagcgggtgagggtaaaagcctttctcgtttccgcattttaatgacgcagaaaggtacctgtggggattatcccatctcagggcagatgaggaagccaaggttcggggcgcggagccccagaggagaacgccgaccgcggcccggacttagagattaggccgcaggggagcggggcctcgagagactacgaccattgctccacttactcaccgagaagccgtcgccgcccgtagttttcgactttcccgccaggcccgacgccgctctgacgccaccgaggcgcgccatgacgtgacgccaacttccgcgccggaagtggaaggccgggcagcccagctgaaggcaataagctgggctcaccgctgcagcagagttctgtgctagccgggcataggggcgagagaaggcccagaggcgacgtcagagagaagcaactgcgccccggtgaagagaagctcgcccatcaccggctgggagccagctttcagtgaagatggcagggccagaactgttgcttgactccaacatctgcctctgggtggtcctacccatcgttatcactcttcgtagacatgatccgccactacgtgtccatcctgctggagagcgacaagaagctcacccaggaacaagtatctgacaggtcagcgccctcccttccccagcctacctcacaccgccgtgaccttggacaagaaagtgcaggcgttgtgtcagtttgcctaggttcacgtctcgcccccactggcaaggtgaccttacccgttacctctgtgtttcacttttgtcctctgtgaaatggggataataacagtacctccctcatagacaggtgggaatcaaattagatgatgtctgtaaatcccttagcacaggatctaggacgtattgagtgttaaaaacaaaaaacaaaaacggtgctgttaatcctttaggttagtcgccaaccctcggtgggtttacctatgaactatcccatcccaccctttcgttgggaagagtgcctggtgctttatagcttttagtatttgtaacatccagtcaagtgagtgtgataatctgcattctaccaaattactgttccaatggttagctgagatgctaagcaccaaagcgctttgcaatctgtaacactgctgttagacatgtaaggaattgtaattatcatttcccttcctagggtggaggcaacttcctcacatacttcattgcagtatttatttatttatttaatttaacttaatttaatttttgagacggagtttcgctcttgttgcactagattaagtatctattatttttccgtttgcatattttatcacttgaacagaaactctgagcgcagggtcatgaccttgccttactctataccccatagcatgcagcagagtgcaaggcacatggtaggccatcaaaaaacttgttcacagccaggcgtggtggctctcacctgtaatctcaatactttgggaggctgaggtgggaggatcgcttgagccctggagttcaagaccagcctgggcaacacaatgagaccactgtctctacaaaaaaatttaaacattagccaggtgcagtggtgtgtgcctgtagtcccagctactcgggaggctgaggtgtgaggatcacttgagcccgggagttcgaggctgaagtgagccatgatcgcaccactgcgattgcagcctcaatcactgcagcctcgacctttttggtccagcctgggtgacaaagcaagaccctgtctccagaaaaacaaacgaaaaaacacttgttcagtctacgataattcaagacttttccaggcagtgtaatcaaaagaaattcatctagctctcctatatttacgctgctgaatagttttgtagaaatggagttgaatatcatgaccctgaggtattttaagaccctaaataagcaatcttaaattatcctgtattttctaaacactcaatatctgtgttatctgaagtttgcaaattccgcaagaaatttttaattttgtatttttatttttgtgaatatctaaaaataagtccttgtactgttataaagataaagctttgtaatttgtaactgaaagacatctatttatttttggcagagacagggtctcactatgttgcccagttggtctcaaattcctgggctcaagggatcctcccatctcagcctcccaaagtgctgggattataagtgtgagccactgtaccaggcctaaatgacattgtcttagaataaaactttaaactcggtacctctcaaaccagagttccatattcttaagaatctatgtcttctcctttccaaaaagtcagtagtatattcttcaagttcgagaaccattttttacacacattctatccccaaacctagtctaatatattttattcatgtatttttcagctttggtttaatacctgtcagaatttttttttttttttttttgaaacattgtcttgctctgttgcccaggctgaagctggggaataaggtcagtgatgcttctgccatccctatggagccacagagccagtctgggaagccccacttcatagctccttggctgccagggaaagaacaagtgggctggactctatgaggtggaactggagcccaggccctctgttgtggaatcactacccagagactttatcagggtacctcttggctcctggcttcagggttcatagtctagaaaaatattgtccaataaaatataatgtaagttacatttaccttttaattgtggtatggtttccttcctctaaaagtttacaattcagggttttttagtatattcacaaagttgtgcaatcatcgccactatctaacactgcggtgactaataggctggaatgcagtagtcataagcctatcataagcgtaagtagagagtctttaggggtgctaaccatctggttgtctcgatgcaggggacgaggcacccacagtccctctcccataagcctgccaagaagattgatgtggcccgtgtaacctttgacctgtacaagctgaacccacaggacttcattggctgcctgaacatgaaggcgactttttatgatacgtactccctttcctatgatctgcactgctgtggggccaaacgcatcatgaagtgagcaaattggggtttcctggggacaaggtgggtacgggcaatgggagagcccctgtctgttcacatggactcagccttctcagcacctgggtctggctttggtgctgacaaagcatagcctgtatcagacaacacggagcctgatgggctctcgaagtgctgtggacaacactggcgtgtgcccaggggtgcacatgttcctcctggtggaacctggatgcattttatttttatgactactttccactctagcaactacattttttcattgaaataggaagttttcctaagtagtcttctagtcagttttttaaaaatgaacatgtgttggccaggcatagtggctcacgcctctaatcccagcactttgggaggccaaggtgggtggatcacttgaggtcaggagtttgagaccagcctggccaacatggcaaaacccaatctctacaaaaattagctggacatggcagtgcatgcctgtaatcccaactactcaggagcctgaagcaggagaatcgtttgaacccaggaggtggaggtgacagtgaggcgagattgtgtcactgcactccagcctgggcaaaacagcaagtgtcttaccaaaaaaaaaaaaaaaaagtatgtgtcaaagatttcattgaattcattaattaatgagagaactagcaagaagttacaatcagttcaaaggagaattcaaaatcccacacatatataggtccagtaagaatgatgagataggctgggtgcagtagctctcacctggaatcccagcactttgggagttcaaggcaggaggatctcttgagcccaggagcttgagaccagcctcggcaatagtgagagagagagagagagacacacacacttacacacacacacggcaggaggatctcttgagcccaggagtttgagaccagcctgggcaacacagtgagagagagagacacatgcgcacacacacacacacacacacccctgggcaacatagagagagacacacacacacacacatacacacacacacacacacacacacacacacagtttgagaccagcctgagcaacatagtgagaggcatgcacgctgggagcagtggtagtatgtgcctataatcccagctaggtgggaggattgcctgagcccaggagtttgaggctgcagtgagatatgaccataccattgtgtactccagcctgggcaacagcatgaggccttgtctctaaaaagaagaaaaaaagagataaatgtatacatacaaaattgggttttttctcccatggggatgggagggatgaaataatcttccctccataggacagaattagtttgcaagtcttatggaccagagtcatttgtactatataatgaacttttcttaaaacttattttgaaagcctaaccaagtgtctcaggaagcatgagaatatgtgaggttagaagctgcatgccgttatggtgatgtttcccaaattctgccgctccagtggcgccctggggcatccttccccattgggtggatgtagccactgaggctgaagtgattgaatcagtccaaagccgcaaaacttgcaagcagcagagcatggctgctagtccatctttccgatagtctattcttctccagttccttcattcagtgtttcctgagtgcccactgtgtgcctggccctatgctgtaactacagattcagagatgaacaaaataccagatagaacaagttccctgagggcaggaatttttgtggccttcagcaccttggtgaatgctgacacatagtagttatttaaatgattgtagaataaatgaagacacaggcgatctctattcacatggggcttctgagaaatcctgctcaggatcccaagagttctaccagatcacatgtagctagaacatatcagaccttcttgctttcttagttgatctcctgcagacccaatctgcagttgaggaaactgaggctgtgtgggtctgcttgccagagacaacagtgggtggcaggcttgagcctggttctgtggctgagagttccattttcctcctcggctacttcttccaggatactaccatctcatgccacctcttgacctcagactacctaccaccagtagtctgcattatttcaaaattatgaacaagaagtttcagaccagctgggggcagtggctcacacctgtaatcctagcactttgggaggccgagggaggtgaatcacctgaggtcaggagttcgagaccagcctgggcaacaaggtgaaacccccgtctttactaaaaatacaaaaattagccgggcgtggtgacacactgctgtaatcccagctactcaggaggctgaggcaggagaatcactggaaactggaatgtgaaggttgcagtgagccgagatcacaccattgtactccagcctgggcgacagaataagactctgtctcagaaaaagaaaaggtctcagaccttaaactcagtccagttaggggaggtgggacacttcgacctaaacacagtctggtgactggaatcagtttagtgacttagtggtatcactaggttttttttaattatagtaaatatgtatagcataaaatctattgtttggaccattttaagtgtacaattcagtgccattaagtacgttcacaatgttgcccagccatcaccaccatccatttctagacctcttgcatcatcttaaccagaaactctgtcc

SEQ ID NO: 1060 - DNA, 6000 bp, Homo sapiens
agtatcctggaagaagtagccgaggaggaaaatggaactctcagccacagaaccaggctcaagcctgccacccactgttgtctctggcaagcagacccacacagcctcagtttcctcaactgcagattgggtctgcaggagatcaactaagaaagcaagaaggtctgatatgttctagctacatgtgatctggtagaactcttgggatcctgagcaggatttctcagaagccccatgtgaatagagatcgcctgtgtcttcatttattctacaatcatttaaataactactatgtgtcagcattcaccaaggtgctgaaggccacaaaaattcctgccctcagggaacttgttctatctggtattttgttcatctctgaatctgtagttacagcatagggccaggcacacagtgggcactcaggaaacactgaatgaaggaactggagaagaatagactatcggaaagatggactagcagccatgctctgctgcttgcaagttttgcggctttggactgattcaatcacttcagcctcagtggctacatccacccaatggggaaggatgccccagggcgccactggagcggcagaatttgggaaacatcaccataacggcatgcagcttctaacctcacatattctcatgcttcctgagacacttggttaggctttcaaaataagttttaagaaaagttcattatatagtacaaatgactctggtccataagacttgcaaactaattctgtcctatggagggaagattatttcatccctcccatccccatgggagaaaaaacccaattttgtatgtatacatttatctctttttttcttctttttagagacaaggcctcatgctgttgcccaggctggagtacacaatggtatggtcatatctcactgcagcctcaaactcctgggctcaggcaatcctcccacctagctgggattataggcacatactaccactgctcccagcgtgcatgcctctcactatgttgctcaggctggtctcaaactgtgtgtgtgtgtgtgtgtgtgtgtgtgtgtatgtgtgtgtgtgtgtgtctctctctatgttgcccaggggtgtgtgtgtgtgtgtgtgtgcgcatgtgtctctctctctcactgtgttgcccaggctggtctcaaactcctgggctcaagagatcctcctgccgtgtgtgtgtgtaagtgtgtgtgtctctctctctctctctcactattgccgaggctggtctcaagctcctgggctcaagagatcctcctgccttgaactcccaaagtgctgggattccaggtgagagctactgcacccagcctatctcatcattcttactggacctatatatgtgtgggattttgaattctcctttgaactgattgtaacttcttgctagttctctcattaattaatgaattcaatgaaatctttgacacatactttttttttttttttttggtaagacacttgctgttttgcccaggctggagtgcagtgacacaatctcgcctcactgtcacctccacctcctgggttcaaacgattctcctgcttcaggctcctgagtagttgggattacaggcatgcactgccatgtccagctaatttttgtagagattgggttttgccatgttggccaggctggtctcaaactcctgacctcaagtgatccacccaccttggcctcccaaagtgctgggattagaggcgtgagccactatgcctggccaacacatgttcatttttaaaaaactgactagaagactacttaggaaaacttcctatttcaatgaaaaaatgtagttgctagagtggaaagtagtcataaaaataaaatgcatccaggttccaccaggaggaacatgtgcacccctgggcacacgccagtgttgtccacagcacttcgagagcccatcaggctccgtgttgtctgatacaggctatgctttgtcagcaccaaagccagacccaggtgctgagaaggctgagtccatgtgaacagacaggggctctcccattgcccgtacccaccttgtccccaggaaaccccaatttgctcacttcatgatgcgtttggccccacagcagtgcagatcataggaaagggagtacgtatcataaaaagtcgccttcatgttcaggcagccaatgaagtcctgtgggttcagcttgtacaggtcaaaggttacacgggccacatcaatcttcttggcaggcttatgggagagggactgtgggtgcctcgtcccctgcatcgagacaaccagatggttagcacccctaaagactctctacttacgcttatgataggcttatgactactgcattccagcctattagtcaccgcagtgttagatagtggcgatgattgcacaactttgtgaatatactaaaaaaccctgaattgtaaacttttagaggaaggaaaccataccacaattaaaaggtaaatgtaacttacattatattttattggacaatatttttctagactatgaaccctgaagccaggagccaagaggtaccctgataaagtctctgggtagtgattccacaacagagggcctgggctccagttccacctcatagagtccagcccacttgttctttccctggcagccaaggagctatgaagtggggcttcccagactggctctgtggctccatagggatggcagaagcatcactgaccttattccccagcttcagcctgggcaacagagcaagacaatgtttcaaaaaaaaaaaaaaaaaaattctgacaggtattaaaccaaagctgaaaaatacatgaataaaatatattagactaggtttggggatagaatgtgtgtaaaaaatggttctcgaacttgaagaatatactactgactttttggaaaggagaagacatagattcttaagaatatggaactctggtttgagaggtaccgagtttaaagttttattctaagacaatgtcatttaggcctggtacagtggctcacacttataatcccagcactttgggaggctgagatgggaggatcccttgagcccaggaatttgagaccaactgggcaacatagtgagaccctgtctctgccaaaaataaatagatgtctttcagttacaaattacaaagctttatctttataacagtacaaggacttatttttagatattcacaaaaataaaaatacaaaattaaaaatttcttgcggaatttgcaaacttcagataacacagatattgagtgtttagaaaatacaggataatttaagattgcttatttagggtcttaaaatacctcagggtcatgatattcaactccatttctacaaaactattcagcagcgtaaatataggagagctagatgaatttcttttgattacactgcctggaaaagtcttgaattatcgtagactgaacaagtgttttttcgtttgtttttctggagacagggtcttgctttgtcacccaggctggaccaaaaaggtcgaggctgcagtgattgaggctgcaatcgcagtggtgcgatcatggctcacttcagcctcgaactcccgggctcaagtgatcctcacacctcagcctcccgagtagctgggactacaggcacacaccactgcacctggctaatgtttaaatttttttgtagagacagtggtctcattgtgttgcccaggctggtcttgaactccagggctcaagcgatcctcccacctcagcctcccaaagtattgagattacaggtgagagccaccacgcctggctgtgaacaagttttttgatggcctaccatgtgccttgcactctgctgcatgctatggggtatagagtaaggcaaggtcatgaccctgcgctcagagtttctgttcaagtgataaaatatgcaaacggaaaaataatagatacttaatctagtgcaacaagagcgaaactccgtctcaaaaattaaattaagttaaattaaataaataaataaatactgcaatgaagtatgtgaggaagttgcctccaccctaggaagggaaatgataattacaattccttacatgtctaacagcagtgttacagattgcaaagcgctttggtgcttagcatctcagctaaccattggaacagtaatttggtagaatgcagattatcacactcacttgactggatgttacaaatactaaaagctataaagcaccaggcactcttcccaacgaaagggtgggatgggatagttcataggtaaacccaccgagggttggcgactaacctaaaggattaacagcaccgtttttgttttttgtttttaacactcaatacgtcctagatcctgtgctaagggatttacagacatcatctaatttgattcccacctgtctatgagggaggtactgttattatccccatttcacagaggacaaaagtgaaacacagaggtaacgggtaaggtcaccttgccagtgggggcgagacgtgaacctaggcaaactgacacaacgcctgcactttcttgtccaaggtcacggcggtgtgaggtaggctggggaagggagggcgctgacctgtcagatacttgttcctgggtgagcttcttgtcgctctccagcaggatggacacgtagtggcggatcatgtctacgaagagtgataacgatgggtaggaccacccagaggcagatgttggagtcaagcaacagttctggccctgccatcttcactgaaagctggctcccagccggtgatgggcgagcttctcttcaccggggcgcagttgcttctctctgacgtcgcctctgggccttctctcgcccctatgcccggctagcacagaactctgctgcagcggtgagcccagcttattgccttcagctgggctgcccggccttccacttccggcgcggaagttggcgtcacgtcatggcgcgcctcggtggcgtcagagcggcgtcgggcctggcgggaaagtcgaaaactacgggcggcgacggcttctcggtgagtaagtggagcaatggtcgtagtctctcgaggccccgctcccctgcggcctaatctctaagtccgggccgcggtcggcgttctcctctggggctccgcgccccgaaccttggcttcctcatctgccctgagatgggataatccccacaggtacctttctgcgtcattaaaatgcggaaacgagaaaggcttttaccctcacccgcttcccgatgaactaatccaggcagtcggcctcatctcacttctgttgggcttttctggaagccagatggtatcgcacgtgttaaaggcgggtgcctggaagccggacgtgctgacaagacttagtttttccatctgcaagatggctgataatggttatccgtattaaccgaagcggcgataaataaaaagtttagcacagggcccggtacctcgtaaatgttaaccattattagaagtcattataatcatcaagagtaagtataggtggtgaagagcgcaggtgctgaagccagactccgagttagaatcccagttctgcccgtgatgatgagaataatggtacccacctcaaaaagttttgtgggaaataaatgaattattaaatataaagcacttgaaacagttcttgttagcttttagcatttcccctgcactgcgagcttttttcactctgaatattctcagaaattttccttatgccggtaactatgctgggcattagggacattgagtaagtgagactgggttcctgctctcaaagagccccagtctagtgtgaggtaagggcccctaggtataccctgtggagcagggaagctgcagtagcaaactcccttagggataggaggaacacttttcaaggaagatgacattcgattgaatgtttagatctgagtaggaatttccaggcaaataagagcacttcagatgaaaagaacacctttgtgcaaaggcactgagaccacgaaggttctgatttacaagattaaaaggtcatgtgattcaggcacttcccccacctc

SEQ ID NO: 1061 - DNA, 6000 bp, Homo sapiens
agattcatggaagaatcatcgaagtatgctaaaactagtggaagaaagtttaatgtggaacagtatgtttaatagcctcgaattatattcccacaaattagttgttaattacaaagggaaaagaataatttttccaacgagaaccctggtggtttttattctatctaatcccttcaaccttttttttccctctattggatcttcctcctgcgcccctccaccctctccttattctgggctagttgtactttctgcttgctgcagagctgccattttaggactttccttaactgctttcctagacctcctcctatgaactgtttgctgaactaccttatataagggtggattaaagacctctgtaaatatatacaatagattaatagattggtcatagaattctcttgaactacattttgtttggcacacagtataagctcaaaaaatatctgctgaataacttagtctggtcatccaagtattaccaaaactttgtaccatgaagcttgtaggatttggttttcatttaatgtatggttataaatattaaataagtgaagacaaatgaaattacatacattttgtatatatgcttactttttctttttaaaaatttatttatcttattacagtgttccacacgttcagagaaacttctctattaacgaactacagacatgatatctgaaagtaatctttatgcatagttttcttctaagaaactcaaatgtgttttatatgaagaaccactaataaccatttacttactactctctgctactaagtcttgaacagagagctaatgtatgcctaagggaaaaccgattaaagaaacgttcttatatagcttcaaaaacgaattaacaacgatagtcagggtgaaaggggaaggtgctcctctttaacttgaagtgcttaaacaaatattggattttagtgaaaacaggagtcttgaaatgtatccttaatgtccagatactcacaagataactttcaattatccagaattattttttactctatagagcaattcttccaaaatagtgcatagatttattctcagaagttatcttattcaagtaaagtgactctcatccaagagagacactggtagcaaagggcagtagttagttaaatagcagtgaaactgatattagagaactgccaactgatggaaatttaatcagcagtatatggaattggaatgggcttatacagggagtaattctgaatataaggtgttcagcagttttcgtttctttaaaattttttgtacaaagtggaaaaaacttacacacccatatttgaaaaatgggtaatttttctttcattcattattattttttaaagttaaataaattaaggagacaaatagttctctatcgcatgttgtaaaaaatccagggcccctgtcccttaccattgccttttttccattccttacatgaagtgtgtcttcccaggtgacacgggagccatccttgatgttttttgtttcatcaagtctatttgggtgttcctattctatgcttcctcccctctagattcccgcctctacctcatactctaggtttatcctgagtgtggagtagggaagtgtgaataccacatttacattttccttttgttcttcaccttttctctcttagactgttccgctcagcaccaaaaggactttctttcttgcactgcaggaacttcccttacatcaaatccttatactgtttactctcatttattgtaaaaatactacagtcttctgaatctgacttctgtaagcctcttttctccttaataacaaagactcctccaaaaatcataagtgcttactttcaggctatcgtctccatgtggacttgaaacacactattttgaaactcaaagctgccttcagcagggttctctccattcgaagaggcaactatttccactggttcaatcagtggggttaatgataggcccagaaccaggaattttcaagaaggaaagtccactgacttaatattctccaaatgtactcgttatgctgagaatacacactaagaacatatggcatttcattacataaatgaaaaacatcatcataagcaagtttggaagcagtgaaacacacccttggaaggcattataaatgctccctaatatctgattctcccttcccagtcccattgcagtttggtggagccatgtgaaaggttctagctagtgaaatgcaagtggaagtaggagggctgaggtagtgacaagctgctgcatgatgctacagatttcctcttctgcagtgaaagtggaatctcatgttgggatggcagagttacaagatcaaagtggtctggattgctcagacactggttggaggacaactctaagcctgttccatattagactttgtgtgagcaaagaacaaatgtttattagtatctttgagtttaaaattgaaactgagattttgaaattgtttattgtcagaacataagctagccaatcttgactaatataccataattctttgcttattggcctattgcctaattagctggagtgcttgttgttggtgaaagtgtgttattttggaagtagagaatatattttatatatatatattttttttttttacaagggtgaaacttatttaatgatatttattgaatgcctgctataccaagtgctagagatgcatcagtatacaaaacacacaatttttgccctcatggagcttacattttagtggggaagtcagataaaaattatatcaacaaacaaaatacttgcaagttagggtaagtgttatgaaggaactaatggctgcgctagaggttaacaagggagggaatctactttagatagtatgatgatgaggagaggagacctttcaactgagatatgaagaaagggagaaaacattctaggtcacatgaggcaagaaagatcttggtgtgtttgagaaactaaaaagaccattgtgactcagtggtaacaaatgaggaacaagaggcaaaatatgaagttgcagagaaagatcatcatgttgtggcagggagtttggttttcattccaagccatcagatagtatcaccttaatcttcctttggtcaatgccacaaaactaaccacatctatgttaactttcttttctccgccatctgcctcaacaaatgtcatgtccctcatctttctgatggctaatcactccctttgtatcctccctcctctggttaccctttctcctcttttcatatactttgcttcttcgttatcttcccaatgggtcagtcctgtcaaccaacctacaagacaccacccatcccccaccctcttccatgggttatcaactggtaatgattctactaaccactcagatgttcaggccccaaaaccaggacctatcttgaccactctcttttctttactttcctatgcagttcattggtaaattcttcagttttaaactcaaagatattatcagtttggttcactcttgctaatgttagctttcctgatttcgtcttgatttctgaaatggtctcatgatttgcctccttgcctccattctttccttcctctaattttttctttatgcatcagccaagggtggctacttattttaacatagaatagcttaattaaaataaacaaaaatttttataaattgtggtaaaataggccgggtgcagtggctcacgcctgtaatcccagcactttgggaggctaaagcgggtggatcacttgaggccaggagttcgagaccagccgggccaacatcgcgaaatccagtctctattaaaaatacaaaaattagccaggcatgtggtgtgcacctgtagtcccagctactcagaaggctgaggcaggagaatagcttgaacctgggaggtggaggttgcagtgggctgagattgtgccactgcactccagcctgggtgacagagtgagactctttctaaaaaaaaaaaaattgtggtaaaataaacttttactataatgaaagtagtctatgtgctgcaaaagttacaatgaaaaagataggcaaacacaaagaaaaaaatacacatttccacttccaaagattaccaatactaacaccttagggtataagcccactatttttttagttgtacataaatacatatatgtgcatttttaaaccaaaatgagatgctgtaacatactatttcgtgacttgctcttttcagttaatgatcttttccatggcaatacagttctattttatccaatactcagtccatctacattcatatttctttaatggtcctgaaaatgcattttatagacagtctgttcaaaccaggatccaattcaaactgttatgtcccttaaatttcttttcataaagcagttgcttttatcatgacaaattgttgaagagatgggccagttatcctgcagaatgtttcaccttctggatctgtctagttacttcctctggcatcatttagtttgttcatctatctgttgtattttttataaactgtgttagatgcaaaggcttgacagattcaagttaaatatttttgcctggaatataccatgatgatactgtatactacatcccatcaaaagacaaactatccgattgagctacaacgtggcctttaaaaaatgtaaattataagtgtatatagcttcctctgcatttattatacaatactaaacaaattcttcaacttggacaacaagtttctgaatgatttgatgcctgcttactcatccaactttattccatcccattctatttgtttttaaaggtcttgtcacatgtttcgtttctagtcctgaaacatggttaagtgcttgcctcctagggcctctgccgcaggcttttggtttggaggctctcctttgccactccacccctctccactcttctcctcttctgatatcaagcatcttctcaaattacaggtgtcgtttttaatttatttaaaattttgttctttctacaaaacagcaaccagagacacaggttcattttcagttaacctactcggagaaaacctactttatcttatttaaattagggtcctccaagcgatcttaacatctcctaagtcccaagcaccctgtttttttcctgatactttttccgtttaccttaaggtctgtgtcaacctgacagtaagctgcacgatggcaggggtcttgcctactaggttccctgtgcacagcagcccgtcaacagtagttgaataaacatcataggtcacaataaccctgggactgcctcttggggaggtagccgcaaactctcgcaggtggcagtgacaccagtacttctccggggggttgttcgagtggaggaatactcttacgtgaaagtgctcagtacaccactgcggcaggaaggaggaagggaagaattccagatggggagaaagtaatattttgcagcacagtacagggtaaactgggtccaggtgggcgtagccgccgcgacaccttcacgtgaccgcggacagcttaaggaccccgcatccagtgcgcctgcgctggagctcccggaagttgccggacccggaacgcaggcggagcgcaagtctgtcagccagtcagtccgccagtccgccagcccagtacctctctctcctcggccctcgtaagctgtccgcggtctgtttggcccgaacggcggcggaggcgctgatcatggcgacattcatctcggtgcagctgaaaaagacctcagaggtggacctggccaagccgctggtgaagttcatccagcagacttacccaagcggcggggaagagcaggcccagtactgccgcgcggcggaggagctcagcaagctgcgccgcgccgcagtcggtcgtccgctggacaagcacgagggcgcgctcgagacgctcctgaggtgggcgcggggctgggagtgggtaggttgtctgccagccgtcgctcgccgctcctcttcccgtctccccccttccttcaatcctgtaacctgggcggagccgccccgtcccggcctgaccaggcgc

SEQ ID NO: 1062 - DNA, 6000 bp, Homo sapiens
tctttttaaaaatttatttatcttattacagtgttccacacgttcagagaaacttctctattaacgaactacagacatgatatctgaaagtaatctttatgcatagttttcttctaagaaactcaaatgtgttttatatgaagaaccactaataaccatttacttactactctctgctactaagtcttgaacagagagctaatgtatgcctaagggaaaaccgattaaagaaacgttcttatatagcttcaaaaacgaattaacaacgatagtcagggtgaaaggggaaggtgctcctctttaacttgaagtgcttaaacaaatattggattttagtgaaaacaggagtcttgaaatgtatccttaatgtccagatactcacaagataactttcaattatccagaattattttttactctatagagcaattcttccaaaatagtgcatagatttattctcagaagttatcttattcaagtaaagtgactctcatccaagagagacactggtagcaaagggcagtagttagttaaatagcagtgaaactgatattagagaactgccaactgatggaaatttaatcagcagtatatggaattggaatgggcttatacagggagtaattctgaatataaggtgttcagcagttttcgtttctttaaaattttttgtacaaagtggaaaaaacttacacacccatatttgaaaaatgggtaatttttctttcattcattattattttttaaagttaaataaattaaggagacaaatagttctctatcgcatgttgtaaaaaatccagggcccctgtcccttaccattgccttttttccattccttacatgaagtgtgtcttcccaggtgacacgggagccatccttgatgttttttgtttcatcaagtctatttgggtgttcctattctatgcttcctcccctctagattcccgcctctacctcatactctaggtttatcctgagtgtggagtagggaagtgtgaataccacatttacattttccttttgttcttcaccttttctctcttagactgttccgctcagcaccaaaaggactttctttcttgcactgcaggaacttcccttacatcaaatccttatactgtttactctcatttattgtaaaaatactacagtcttctgaatctgacttctgtaagcctcttttctccttaataacaaagactcctccaaaaatcataagtgcttactttcaggctatcgtctccatgtggacttgaaacacactattttgaaactcaaagctgccttcagcagggttctctccattcgaagaggcaactatttccactggttcaatcagtggggttaatgataggcccagaaccaggaattttcaagaaggaaagtccactgacttaatattctccaaatgtactcgttatgctgagaatacacactaagaacatatggcatttcattacataaatgaaaaacatcatcataagcaagtttggaagcagtgaaacacacccttggaaggcattataaatgctccctaatatctgattctcccttcccagtcccattgcagtttggtggagccatgtgaaaggttctagctagtgaaatgcaagtggaagtaggagggctgaggtagtgacaagctgctgcatgatgctacagatttcctcttctgcagtgaaagtggaatctcatgttgggatggcagagttacaagatcaaagtggtctggattgctcagacactggttggaggacaactctaagcctgttccatattagactttgtgtgagcaaagaacaaatgtttattagtatctttgagtttaaaattgaaactgagattttgaaattgtttattgtcagaacataagctagccaatcttgactaatataccataattctttgcttattggcctattgcctaattagctggagtgcttgttgttggtgaaagtgtgttattttggaagtagagaatatattttatatatatatattttttttttttacaagggtgaaacttatttaatgatatttattgaatgcctgctataccaagtgctagagatgcatcagtatacaaaacacacaatttttgccctcatggagcttacattttagtggggaagtcagataaaaattatatcaacaaacaaaatacttgcaagttagggtaagtgttatgaaggaactaatggctgcgctagaggttaacaagggagggaatctactttagatagtatgatgatgaggagaggagacctttcaactgagatatgaagaaagggagaaaacattctaggtcacatgaggcaagaaagatcttggtgtgtttgagaaactaaaaagaccattgtgactcagtggtaacaaatgaggaacaagaggcaaaatatgaagttgcagagaaagatcatcatgttgtggcagggagtttggttttcattccaagccatcagatagtatcaccttaatcttcctttggtcaatgccacaaaactaaccacatctatgttaactttcttttctccgccatctgcctcaacaaatgtcatgtccctcatctttctgatggctaatcactccctttgtatcctccctcctctggttaccctttctcctcttttcatatactttgcttcttcgttatcttcccaatgggtcagtcctgtcaaccaacctacaagacaccacccatcccccaccctcttccatgggttatcaactggtaatgattctactaaccactcagatgttcaggccccaaaaccaggacctatcttgaccactctcttttctttactttcctatgcagttcattggtaaattcttcagttttaaactcaaagatattatcagtttggttcactcttgctaatgttagctttcctgatttcgtcttgatttctgaaatggtctcatgatttgcctccttgcctccattctttccttcctctaattttttctttatgcatcagccaagggtggctacttattttaacatagaatagcttaattaaaataaacaaaaatttttataaattgtggtaaaataggccgggtgcagtggctcacgcctgtaatcccagcactttgggaggctaaagcgggtggatcacttgaggccaggagttcgagaccagccgggccaacatcgcgaaatccagtctctattaaaaatacaaaaattagccaggcatgtggtgtgcacctgtagtcccagctactcagaaggctgaggcaggagaatagcttgaacctgggaggtggaggttgcagtgggctgagattgtgccactgcactccagcctgggtgacagagtgagactctttctaaaaaaaaaaaaattgtggtaaaataaacttttactataatgaaagtagtctatgtgctgcaaaagttacaatgaaaaagataggcaaacacaaagaaaaaaatacacatttccacttccaaagattaccaatactaacaccttagggtataagcccactatttttttagttgtacataaatacatatatgtgcatttttaaaccaaaatgagatgctgtaacatactatttcgtgacttgctcttttcagttaatgatcttttccatggcaatacagttctattttatccaatactcagtccatctacattcatatttctttaatggtcctgaaaatgcattttatagacagtctgttcaaaccaggatccaattcaaactgttatgtcccttaaatttcttttcataaagcagttgcttttatcatgacaaattgttgaagagatgggccagttatcctgcagaatgtttcaccttctggatctgtctagttacttcctctggcatcatttagtttgttcatctatctgttgtattttttataaactgtgttagatgcaaaggcttgacagattcaagttaaatatttttgcctggaatataccatgatgatactgtatactacatcccatcaaaagacaaactatccgattgagctacaacgtggcctttaaaaaatgtaaattataagtgtatatagcttcctctgcatttattatacaatactaaacaaattcttcaacttggacaacaagtttctgaatgatttgatgcctgcttactcatccaactttattccatcccattctatttgtttttaaaggtcttgtcacatgtttcgtttctagtcctgaaacatggttaagtgcttgcctcctagggcctctgccgcaggcttttggtttggaggctctcctttgccactccacccctctccactcttctcctcttctgatatcaagcatcttctcaaattacaggtgtcgtttttaatttatttaaaattttgttctttctacaaaacagcaaccagagacacaggttcattttcagttaacctactcggagaaaacctactttatcttatttaaattagggtcctccaagcgatcttaacatctcctaagtcccaagcaccctgtttttttcctgatactttttccgtttaccttaaggtctgtgtcaacctgacagtaagctgcacgatggcaggggtcttgcctactaggttccctgtgcacagcagcccgtcaacagtagttgaataaacatcataggtcacaataaccctgggactgcctcttggggaggtagccgcaaactctcgcaggtggcagtgacaccagtacttctccggggggttgttcgagtggaggaatactcttacgtgaaagtgctcagtacaccactgcggcaggaaggaggaagggaagaattccagatggggagaaagtaatattttgcagcacagtacagggtaaactgggtccaggtgggcgtagccgccgcgacaccttcacgtgaccgcggacagcttaaggaccccgcatccagtgcgcctgcgctggagctcccggaagttgccggacccggaacgcaggcggagcgcaagtctgtcagccagtcagtccgccagtccgccagcccagtacctctctctcctcggccctcgtaagctgtccgcggtctgtttggcccgaacggcggcggaggcgctgatcatggcgacattcatctcggtgcagctgaaaaagacctcagaggtggacctggccaagccgctggtgaagttcatccagcagacttacccaagcggcggggaagagcaggcccagtactgccgcgcggcggaggagctcagcaagctgcgccgcgccgcagtcggtcgtccgctggacaagcacgagggcgcgctcgagacgctcctgaggtgggcgcggggctgggagtgggtaggttgtctgccagccgtcgctcgccgctcctcttcccgtctccccccttccttcaatcctgtaacctgggcggagccgccccgtcccggcctgaccaggcgcgtaggtgtggtctgcattctttgctggtgagcaggacccgccctgcaggcccgctgtgactgcccgcttgtcctgcctgcacgtctgctctagcccttggtcggcgagggctccgtggatcagatacctgggagcagcagtctgccctgtactgatctcttttgccacatttacttagaactagtcttcacttttttgggtctctaactgaagcttcccctttcgccccatttttccatcactgtctttcttgggccacattttgatttcataatagtagttgcttgaaggcagtgggggaagtgggggaattgggacactggaccaaatgtctgatcagctcatcacattgtccacatgaaatggaccgtcttcctcagttcaaaataatcaaatgatagatggagaattctgaaagttaggagctacaactatttgaaataaaactctagttacatagttgaaccgttcaaggtaggttgtttaaaagcagtttgttcacaaacagatatatacacagtagagtaaatttgttattttagcaaacgcttatttagctcatgctgatttaatgagggttcctttcatgatacttaatagt

SEQ ID NO: 1063 - DNA, 6000 bp, Homo sapiens
acttagatttgtggtaatgaggaattggtttgattgtggtgggacaatgtgattttgagaggtgacagaaaaatggaaataatttattcaaatttaagaaactgagagaaatgacatgaaaatgacttttacatttgaatttgattgtaatagaaatgtggaagtaaagggaaggagagaaagaataacttactgttcttcagcgttttgggtgatgggaatattgttgtggaaataaatgcctgtaagggcagcttgaaatatgggagcatatgacagcaagaaaacaggtctggaaacttgtttttgtgagagtcagcgggatgagagaggtcatagtatttctctttgaaacatttgttttctttagaaaaaataatctgatgaatttttccttctcaattttttacagctcttgcaagcttaggatatgaaaagagctgtgtgttgttcaattgtgcagccttagctagccaaattgcagcagaacagaacctggataatgatgaaggattgaaaatcgctgctaaacattaccaggtatgctgaaaagtagttactacaataatggtcaacactaaattggattaagtggaaaataatttgcatttaggtttatagatacttcttacgcaacagatgttttctaaaacgaatgcacttttaaaatgaatttattcttactgttaaagcccttagataaactgtctatagaccaggtctgttattcctcattgttttataccgagcacctagcacagtgcctggcacataatagaggctcaataattgttggttgaagaaattatgaaatgtctgagatttcatctcaggcatttagggtaaatccattttaaataaattacctaattaaaaaaaatttgtacattattttcatatgttttcttagagtgagacacacttgaaatttcactgttgttacaaaaataaagacaagaaattggcaagaaaataaaattttaactttgagacttgtggagaggtcatatttaaatatggtcagacacataatgttcataagttgcctaatctgttttacgtactgatcatttactaatatggcatgttattttgtggcagtttattttattttatttatttatttattttgagacggagtcttgttctgttgcccaggctggagtgcagtggcacaatctcggctcactgcaagctccgcctcctgggttcacgccattctcctgtctcagcctcctgaatagctaggactataggcatccgccacctcgcctggctaattttttttgtatttttagtagagatggggtttcactgtgttagccaggatggtcttgatctcctgacatcatgatccacccacctcggcctcccaaagtgctgggattacagatgtgagccaccatgcccggccagcagttgtttattatttattcagcttttttttgttttggttaaaagaacagtaaatgattactgttaaataatatatatataatcatgttgtcattttatattactttctaatttacaaagtgttttcatgtacattatttgactctcagataaaccttgtgatgtatgtcatataatgtcattccgattttacatacgaggaggctaaaggtccgaagtcttaataaagcagtctatttgggtttcaatagttctgattccaaatttcatgtaattccaaatgtccttccactgtttcactcccaaacctcccatgaaatttgcttgtctcagaggtagtctgctttttcccgttgtttatgtttagggaagaggtgagtgatgctgttctgagaaagtaaaaggaaaatataccgtaagcaaacaacacgctccaaattgtggcttgccttacagttttgaatgggcatagatgacaaacataatgcatacgctatttctttttgaggctatacatggcaaatattttaaaatgtgaaaacgagctgggcgtggtggctcacgcctgtaatcccagcactgtgggaggctgtggtgtgcggatcacgaggtcaggagttccagaccagcctggccaacatggtgaaaccctgtctgtactaaaaatagaaaaattagctgggtgtgatggtgggcgcctgtagtctgagctactcgggaggctgaggcaggagaatctcttgaaccgaggaggcggaggttgcagagagctgaggttgtgccattgcactctagtctgggcgacaagagcaagactctgtctcaaaataaataaaataaaatacagtagtgaaaacgaagtaaaattttatttagcttttggttaactgtaactcagttagttagtatatgagattttagaaaggtcattctgaattatgaaagaaacattccattctgtgagggttcacagcagggcacctggtatcatggaaagataactggtggtattagacctaggtccttgtctaggctgcttgccacccagaagctttgtgccgttgggcaagttctttaacctctctagtacctccagttccttatctgtaaatgagagactcagacactttgctgttgtagactttgattcactagtttactgaacaagttcagttgttcattcctagcagatactctagtgttataatacttactgactgcagaaacatgctgttcattttaatacatttgactttgagttttctctgtgttgtctatttatctaactcatgacacctttttttttttttcttttttgagatggagtctcgctctgttgcccaggcaggagtacaatggcgtgatcttggctcactgcaacctccgcctcctgggttcaagtgattctcctgcctcagcctcccgagcagctgggattacaagtgtgtgccatcatgcccagctaatttttgtatttttagtagagacggggtttcatcatgttggccaggctggtcttgaactcctgacctcaggtaatctgcccacctcagcctcccaaagtgccgggattaacaggcgtgagccaccgcacccggccaactcatgacaccttttaatcccagactgatttatttctttttcttagtataatttgtttcatgaaagcaaagttattttagtattaacaaaatataattgagatgaaaaatctgatggggaacatttcactagtgagctctgaaggccagacagaaatcactggcaatgggtagtaatgctgttcctcagaggactaggtgtatgtactacctggggtgtcccctaactacggcatgtttaattatttgaaagatgaatttgtttgggaccaaagcaagagcattgcagtactaaaaatattttaatgtttatccccgcctctattctcatgttaattttgaggaagtatatctaaaaatagtttaatcagattgttccattagtttactttgtttttccttgtaatttacttttaatctttgttaaatctcttgttacgctatagagttttagaaagataaccttattgtctgtaggtcagatgttttagattggttttgcataatataaaaatttaaatatattaactgttcactgagttaacatttgaaatgacttttatatgtaacagtaggaaattaagtcttgctgagttcctataaagaaattctttttcccccctttagtttgctagtggtgcctttttacatattaaagagacggttttatctgccttaagtcgagagccgaccgtggacatatctccagatactgttgggaccctcagtcttattatgctggcacaggctcaagaagtattttttttaaaagccacaagaggtaactccaatttatctttttgttgcatgtgaaaaaaagtgataaggcttttaaattaagaaagtgattagaatataatatgttcaatgtcgagctgtccttcttgaacttgatacatgaattatggaaaattttcagctatccttttctgaatttgtggcacaaatttacatttaagaatgtaggctgtgtttgaagtcatgaaatagatctttagtaattgtctttaaacactccattctggaatagtatttatgtatgtttttaacatgtcagacatttattcgcaaatatttattggatacttactctgtgccagtcactgttctagtttctagataaacggagttagaaaacaacttaggttttggcgacgggagagatgataagcaagaattaagtagacaggataatttcataaataattgctataagatttcagaaataattgctataaaaaataagagaattatatgatagtggctggtggtatggttatgggatagggatataggggaagctgggctaattttagattcattagtcaagaaggctttctttcaggaggtcctctttaaagtagacctaaatgacaagaaggagtcatccaggcacagtccctagccctgggaatgagggaataagaataattcttataaggcatataagttagcatgagagattgaaaatgggctgaatatgtaatatgggctgaaactgaaaataagagataagtcatcatgtggaagaaataggaattggaatacttttttcttttaaaataacagcttatattgagatagaatttatatacactcaagttcaccctttctaagtatacaacataagatttttagtatattcatagagttttgattaccactatcttattttagaacattaccatcatcccagaaagaagccatgtacccattagcagtcactcctcactcccctttcccccactgctggcaaccactaatctattttgtctgttctaaattttgtgcagaaaatgtgatttcatcaagaaagatgttttcagatgcgtgtacaaacttgtgacctcagtgtttatactgagacatgtcagattagctcatatttattttaattataatggtcatattgtattccagataaaatgaaagatgccatcatagctaaattggctaatcaggctgcagattattttggtgatgctttcaaacagtgtcaatacaaagatactctccccaaggtcagttattgtttttataaacacttgcttactttgcatgtgaaatatttagacttttttgtgtataagaagcaagttgaaacttataaagaaatttgaagttttaatagagttatctgaagtatatagtagaaatagtttttttttttttttaatttaagatgcatgaacaattcttttatgtttaggggatgcctttgtctttaccttttactaaacttgtttttccaagctagaactctttctggaaaatgttgaccatctgttttcaatacttttatcaaatcaaggcattgtgtagttctgaatcattggtgatttggtacaagcatgtatacttgagcatgttgatgattcacacttttaattattgtcctgttttcttaaagatgagccttaaagcgcaaaaacagacataaagaaaaaaggaaaagaaaacttaacaaattcatctgatactttgattagaattcagttttgccaacagggataaaaaattgggctgctaatggacagctaaggaaagcaaccatcttaaaccacatatcacaggaagtataatgttttaatgtaaacctttctgaagtgacaattgtaaagactattcagtgatgatcatttgttaatgacaaagcaaatcactagtaaatttggaatgattaataaagaaaacttaaagattgagtgaaatatatgtttcaactacttccttcagaaatgttcaaggaattagtttcatcatatggtatctgttacatgattttttttggtaggggaatttattgatttgtaagtcatattcaggaatctttgtacattaaaaaattgcagacaacttgggggtgaagtaaaaatgcacataagtgcattaacagtacttattactcagaaaatgatcaataaggaattaatgtgacgattcctggggatttaagatacaccaagagcctagtagaaatttg

SEQ ID NO: 1064 - DNA, 6000 bp, Homo sapiens
ctccaggagggggaaggggactagagattaagctctacaaaaactcctgaacaataagacggaatgagcttccaggctggtgaacacatccacataccaagagggaagcagaccccagtgctccagacacttctgaaccttaatctgtttctcgtcgtctggctcttcgtttgcattctttataataaactggtaactaaagcgtctccctgagttctgtgagccattccagcaaattattgaactttaggagggggctgtgggaactccagctttatagctggttggtcagaagtacaataagcctggaacttgtgactggtgtctgagaggaatggtcagtcttgtgagactgagccctgaagctgtggggtctgcactaatgctgggaagttagtgttaaagttgaattgttgaacacccagctggtgtctggagaatcagataattggctgtaggtgttggaaaactctccagaccatcacactaatttagatgaagagaaaccaaacagttgaacctgacctgtggaccccagatatacctcactggtctagatgtagattatcggtgaaaggctgaaaacactggctccattttcacaataatggcactgtgattgacactaacttctcctctctttaaaaaaaaaaaatcagggtaaaacttaaagtgaacaaatcttcagtaaggaacttgaatctttacacatgtatatacctgtccaactgctacacagatcaagatatagaacatctctagcatcccagaaggctcttgtgccccttcccagtcaatatccccaaggcaacattatctatcactgtgctttaattcacctgctttaaaatttaataaaataagtggaattatagttactcctctttcaaaggtcgcacctcccagtactgacacaatggcaattaaatttcaatctgagttttggcggggacattcaaaccatagtatcgtatgaagcaatagctcgttatttttcgttgttgtgtaatatcccattatatgataacaattaattttcacttacctattagtagaattcgtgttgttttcagttatgggctgaaaacatacataaaactgctataacattattttaaatgtctcttggtgtgtataagcgccttgtttctcctgggtatatactgaatagtggaattatttccaatagtttccaattataccctcactaactcaagtgcccaaacctgcccagttccctgattgtgtcaattcaccctcccatcaacaatgtacgatgggccaggtatggtggctcacgcctgaaatcccaccattttgggagggcaaggtgggcagatcacttgaagttaggaattcaaaaccagcctggccaacatggtgaaaccccatctctactaaaaatacaaaaattagctaggcatggtggcatgtgcctgtagtcccagctacttgggaggctgaggcaggagaattgctcgaacctgggagacggaggttgcagtgacttgagatcatgccactacactccagcctgaacaatttacaacggatctggtcaattctcaattttgtcatatttaatattattagtttcctttgagattagctttactaatgggaataaagcattaatttttaatttaaaaaaattttatttaaaacttgtgataatttttatttacctaaaattggtggttcatggatgctgaatgttggagaaacttaggactcttccaagtattcagaaattccttgaggatatgtgggtgtgtttctgcctatatatgtgccatagtcacagatggatgctgctctagaccccacccttaatgctttggaacagacctttcttttccccatgaataagaagagtttacttgggatcccagagggagatgtttcccatcatcagtaacatctggggaacatctggtgagtccatcccaggacggggagatgcttttctggagaacacacgtcacttgattcttcttattctcctgtattttcctttgttctctctttctcttccattgggctccccactctaagcgccactccagccctcaccagcaaactccctaccctgatttctgactcgtctggtttccccaatatacaactcaacaggatgcaaacgtaggcagcatgagagaccctcattaattctagtgcccaaccctgcccagttccctgataagcaggcagcatcttctagaaactgagtcaaggaatgttgaagctggtgagggttctcttgtccaatgcctccattttacagattgaaaagctaaaggccagaaagtgagggaaagagacagtcagggacagaaacaaaactagatcacttctgggtatcatagaagcctctcttctgctggaaacttggcctggagattagaggcaggcaggaaggcaggcagtggaaaggattccttgggaacagcaacgtctgcagcccgcagccacagtgagagcacagctgaggtctgaggtgggtggtggagggtgggtggcctgcgggtttaccccttaaagccctgagagtggagtcacctctagcaacagacacccagctttgtagcctttaagctccttcctgtgcattctcagctacactatagcttcagtgtgctagctgtgtgttaaaaatccatccactgccacctccagccctgccctctccttgagccctagcaactttacccatttgctagtcatgtttagtttattcaacaagttcttatcaagcactggagatagagcagtgatcaagtccaacattgctcctgccctcccactgctcacagacaaagcacaaggaaatgcacaaggaaaccacacaactaagtgggtgcaaggcaggtgcaaggtgggatcagcatccttgaaagtttaaaacaggacatactctgagaactgacaactggccaacagagctggagagcagtcatcaggggtatgaggtggaagtgtacaggtgaggctgcgacagaatcatacctcatgtataaaataaaaccaaatgcagaaggactaacgttaaaagcacatgaactggccgggcgcggtggctcacacctgtaattccagcactttgggaggccaaggcgggtggatcatctgaggtcaagagttcgagaccagcctggccaacgtggagaaaccccatacctactaaaaatacaaaaaaaactagccagacgtggtggcgcatgcctgtaatcccagctactcgggaggctgaggcaggagaatcgcttgaacccaggaggcggaggttgcagtgaaccgagattgagccactgcactcctgcctgggcaacagagtgagactccatctcggaaaaaaaaaaaaaaaagcacataaaccaacaaaatgacacgtacacacattaatggcattgaaggggggggaagggagtggtaaatgagggtatgaagagagaggtgagactgcaaaagtgagaaagggccgattatttcagctttgtaggccccaaggagttgagacttcatcaggagggtactgggaagccactggaagcttggctccagctgcccagacacctccgcctgcaggctcccaggtacacactcaatgcatgcggaaggacagggcctttatcttcccccaacctgctttcctcctgttgttcttgcaggaaaggtaaagtggagcagacccctgccattctacatgcacatctgtggctgaagaggggctctcaccatcaactccaccgcagatgccatccaagaaggccaggaggtcacccccacccccaacctggaggaaggtagaatggaatcctgagggctgggctagtggctgacagcattcatctaggacagtcagaagaacccagaatgcagcgggagcaggactgggagggggagggtcaggctcccacgaaggctccctggaggaggcagtgcaagctgagcccttaaaggcattgggattctggtaagcagagagagggcaggagagcattccagtcgagaagaccggctgcagtaaaagcgtgagggtggaaacgctcgaggtgatgagtagactcgtacctgcggttgggaagtggggctgagggtgggctcccaggccaggacttggttgccggggcatgtcgtaccgggagggttggccccgagtcaggaaaggccttggcgggagcagagaaggcagtggaccattttaagtggccaagatctggcccggaagaaaccagcctttttatttttttaagggaaggttgaggtgggagtggggaagctagttctaagaacccctagtttggaacttctgcagggaagggtctcttggcccgtgggcaggaatgaagttcaggcccactgattacatccatccttcccgctccctgcctccccgctccccacacaccccagattcctctccagccacagtttacttttccggcggatctgggggtgggtggtaggttgggggcggaggggggaacttttagattggaataaaataaactccctctagaggggtgggggtggagagcgtacaggagacgtcggctctgccactgtctagcccgtggccttgcggagttacgaggtgctcccggcctcggtctacccatctgtaaactggggcggtggggcgaggtggggatctctacgctcggctctgccggcttgagtcgtccgcgcctttagggaccgtgctggaagcggggcggggagggcgctggcgggagagggctgggggcggagagcggcggaggcgcagtcgccgggtcacagtccgcagggaggcccccaggccgctgcgccaggctccaggcgggggaggaggcggcgcctccggggcggggctgccgggcggcctggctggaggcccggcgtgcgtcagcgcagtgagccccggagttttccactgacgaggagggcggagcggcgggcggggctgggcgcaggcagtctcccgccgccgccgccgctgccggacgcgcagagcgaggggcggctggaccgacggctgccgggccgagcgcacagagtcgcggcgcagggggcgtccccggccgggacgcgggtcgcgtcgttgtcctccgcgagcgtccggattgcaggtgagcgccgaggggcctcgggcccggcaggacgggactttggggagggggcattcagcgcgagtggcactgccgctcctgcctcctgccgttcactccccggcaccctgagcgggcgcgggggctggagctgcccggctctgacggcgtgccgcggccggagtcgggggccgggggcccggccggcgggagtcgcaggttttctgctcccctcccccgcccgccgcggtaaccccgagagaagtcacggctccccgagctcggcgcgagtggggacagagccgggcttgcgcgcgagcggcgaggcgacgggggcgtgcgtccgcgggtgagtttccttttgacccagttgcctgagaacttttcagaagttcctcgcgtggccggagcaggtgacatttgtcgccttcctcctcgggctcccccctcggggaggctgcgggagctgcggcgtgtgccgggcgcccccggccggcgggggtcagggagggagtggagggatgagcgtagagggaggcgcggtgagtcacggaccccgggagggagggattgtgtcgtaggctcacctgtttgtcagtcgccgtcactctcagaggccactgctgtgagtcacgggctcagctacaccggccacccgcaggcacacgtagactctctcccacgcacttctcctccttccgcagcacgtacttcctccccttcctcagtttctcctccccggggcccattcacaggcacgcactgtggagatgcccacaccacagccatagtcacacacttagtcactcccgctcccggcacaaacacacacagccgtagcccacactcctgacaccagagggttcctccccgtctcctgctgcccacccagcacctccacccagaagtc

SEQ ID NO: 1065 - DNA, 6000 bp, Homo sapiens
tccggtgatgctgatgctgatggtcaggcgttagaacttgagaacaattgccttagcctgttgagagggctggggtgggtctccaaccaagatgaaggcctagagaggggaattcctttgaggagggggaagagtaaaaggcaaggtggagaggagcagaattcccctcaggactatggagaggaggaggtagtttgggtggggttgtccagaggggaatgtttgagccccctaagaagccaggaacttagtccctattcgcagcctcataaaagagtcttcccttccctctgcacaaccaaggatagctcagaaatagcagggcccatcttctatgctcagtggatccatgggcttggagaaggagaatattagccacaagcagacagtatggactgaaaatcagacagctaggtcatcctagacaggggaaggcatccccattcttcagatagacctcagaggggtggggttgggatggcacacaggagagtgtctctgctgactgaaggggaagctccccttgagacttagctgctcggatttgatttgggggagggggaattctttttaacaaatcatgttgggaaaactagatattcatatgcaaaataatgaagttggacccttagcttattatcatataaaatttaactataaatggattaaagacctaaacgtaagagctaaaactatgaaactcttagatgaaaaataacttgaagctccttgcacttgagagtcatgaatggaataaaattcttacccatctgtggcaaaataagaaatatatctggtctttgtccctactttcttgctcagagttcctttggaatttcccttggagtttcctgagtgacaggatttatccatcaggagccccttacaatcacacctgagtctatgctattataataaagtgattaagggtggggcccttagcctcagaatgaggttgatcaccagaaagaccaagggattagaaggctagaactttcaactctacccatcaacctccaggagggggaaggggactagagattaagctctacaaaaactcctgaacaataagacggaatgagcttccaggctggtgaacacatccacataccaagagggaagcagaccccagtgctccagacacttctgaaccttaatctgtttctcgtcgtctggctcttcgtttgcattctttataataaactggtaactaaagcgtctccctgagttctgtgagccattccagcaaattattgaactttaggagggggctgtgggaactccagctttatagctggttggtcagaagtacaataagcctggaacttgtgactggtgtctgagaggaatggtcagtcttgtgagactgagccctgaagctgtggggtctgcactaatgctgggaagttagtgttaaagttgaattgttgaacacccagctggtgtctggagaatcagataattggctgtaggtgttggaaaactctccagaccatcacactaatttagatgaagagaaaccaaacagttgaacctgacctgtggaccccagatatacctcactggtctagatgtagattatcggtgaaaggctgaaaacactggctccattttcacaataatggcactgtgattgacactaacttctcctctctttaaaaaaaaaaaatcagggtaaaacttaaagtgaacaaatcttcagtaaggaacttgaatctttacacatgtatatacctgtccaactgctacacagatcaagatatagaacatctctagcatcccagaaggctcttgtgccccttcccagtcaatatccccaaggcaacattatctatcactgtgctttaattcacctgctttaaaatttaataaaataagtggaattatagttactcctctttcaaaggtcgcacctcccagtactgacacaatggcaattaaatttcaatctgagttttggcggggacattcaaaccatagtatcgtatgaagcaatagctcgttatttttcgttgttgtgtaatatcccattatatgataacaattaattttcacttacctattagtagaattcgtgttgttttcagttatgggctgaaaacatacataaaactgctataacattattttaaatgtctcttggtgtgtataagcgccttgtttctcctgggtatatactgaatagtggaattatttccaatagtttccaattataccctcactaactcaagtgcccaaacctgcccagttccctgattgtgtcaattcaccctcccatcaacaatgtacgatgggccaggtatggtggctcacgcctgaaatcccaccattttgggagggcaaggtgggcagatcacttgaagttaggaattcaaaaccagcctggccaacatggtgaaaccccatctctactaaaaatacaaaaattagctaggcatggtggcatgtgcctgtagtcccagctacttgggaggctgaggcaggagaattgctcgaacctgggagacggaggttgcagtgacttgagatcatgccactacactccagcctgaacaatttacaacggatctggtcaattctcaattttgtcatatttaatattattagtttcctttgagattagctttactaatgggaataaagcattaatttttaatttaaaaaaattttatttaaaacttgtgataatttttatttacctaaaattggtggttcatggatgctgaatgttggagaaacttaggactcttccaagtattcagaaattccttgaggatatgtgggtgtgtttctgcctatatatgtgccatagtcacagatggatgctgctctagaccccacccttaatgctttggaacagacctttcttttccccatgaataagaagagtttacttgggatcccagagggagatgtttcccatcatcagtaacatctggggaacatctggtgagtccatcccaggacggggagatgcttttctggagaacacacgtcacttgattcttcttattctcctgtattttcctttgttctctctttctcttccattgggctccccactctaagcgccactccagccctcaccagcaaactccctaccctgatttctgactcgtctggtttccccaatatacaactcaacaggatgcaaacgtaggcagcatgagagaccctcattaattctagtgcccaaccctgcccagttccctgataagcaggcagcatcttctagaaactgagtcaaggaatgttgaagctggtgagggttctcttgtccaatgcctccattttacagattgaaaagctaaaggccagaaagtgagggaaagagacagtcagggacagaaacaaaactagatcacttctgggtatcatagaagcctctcttctgctggaaacttggcctggagattagaggcaggcaggaaggcaggcagtggaaaggattccttgggaacagcaacgtctgcagcccgcagccacagtgagagcacagctgaggtctgaggtgggtggtggagggtgggtggcctgcgggtttaccccttaaagccctgagagtggagtcacctctagcaacagacacccagctttgtagcctttaagctccttcctgtgcattctcagctacactatagcttcagtgtgctagctgtgtgttaaaaatccatccactgccacctccagccctgccctctccttgagccctagcaactttacccatttgctagtcatgtttagtttattcaacaagttcttatcaagcactggagatagagcagtgatcaagtccaacattgctcctgccctcccactgctcacagacaaagcacaaggaaatgcacaaggaaaccacacaactaagtgggtgcaaggcaggtgcaaggtgggatcagcatccttgaaagtttaaaacaggacatactctgagaactgacaactggccaacagagctggagagcagtcatcaggggtatgaggtggaagtgtacaggtgaggctgcgacagaatcatacctcatgtataaaataaaaccaaatgcagaaggactaacgttaaaagcacatgaactggccgggcgcggtggctcacacctgtaattccagcactttgggaggccaaggcgggtggatcatctgaggtcaagagttcgagaccagcctggccaacgtggagaaaccccatacctactaaaaatacaaaaaaaactagccagacgtggtggcgcatgcctgtaatcccagctactcgggaggctgaggcaggagaatcgcttgaacccaggaggcggaggttgcagtgaaccgagattgagccactgcactcctgcctgggcaacagagtgagactccatctcggaaaaaaaaaaaaaaaagcacataaaccaacaaaatgacacgtacacacattaatggcattgaaggggggggaagggagtggtaaatgagggtatgaagagagaggtgagactgcaaaagtgagaaagggccgattatttcagctttgtaggccccaaggagttgagacttcatcaggagggtactgggaagccactggaagcttggctccagctgcccagacacctccgcctgcaggctcccaggtacacactcaatgcatgcggaaggacagggcctttatcttcccccaacctgctttcctcctgttgttcttgcaggaaaggtaaagtggagcagacccctgccattctacatgcacatctgtggctgaagaggggctctcaccatcaactccaccgcagatgccatccaagaaggccaggaggtcacccccacccccaacctggaggaaggtagaatggaatcctgagggctgggctagtggctgacagcattcatctaggacagtcagaagaacccagaatgcagcgggagcaggactgggagggggagggtcaggctcccacgaaggctccctggaggaggcagtgcaagctgagcccttaaaggcattgggattctggtaagcagagagagggcaggagagcattccagtcgagaagaccggctgcagtaaaagcgtgagggtggaaacgctcgaggtgatgagtagactcgtacctgcggttgggaagtggggctgagggtgggctcccaggccaggacttggttgccggggcatgtcgtaccgggagggttggccccgagtcaggaaaggccttggcgggagcagagaaggcagtggaccattttaagtggccaagatctggcccggaagaaaccagcctttttatttttttaagggaaggttgaggtgggagtggggaagctagttctaagaacccctagtttggaacttctgcagggaagggtctcttggcccgtgggcaggaatgaagttcaggcccactgattacatccatccttcccgctccctgcctccccgctccccacacaccccagattcctctccagccacagtttacttttccggcggatctgggggtgggtggtaggttgggggcggaggggggaacttttagattggaataaaataaactccctctagaggggtgggggtggagagcgtacaggagacgtcggctctgccactgtctagcccgtggccttgcggagttacgaggtgctcccggcctcggtctacccatctgtaaactggggcggtggggcgaggtggggatctctacgctcggctctgccggcttgagtcgtccgcgcctttagggaccgtgctggaagcggggcggggagggcgctggcgggagagggctgggggcggagagcggcggaggcgcagtcgccgggtcacagtccgcagggaggcccccaggccgctgcgccaggctccaggcgggggaggaggcggcgcctccggggcggggctgccgggcggcctggctggaggcccggcgtgcgtcagcgcagtgagccccggagttttccactgacgaggagggcggagcggcgggcggggctgggcgcaggcagtctcccgccgccgccgccgctgccgga

SEQ ID NO: 1066 - DNA, 6000 bp, Homo sapiens
agtggtggtttgggttacgtatttcaaatttgtcttttttcccttctttgctgggggaagagggtattctttgttttatttctaggatgaggcttgaggaaacaagttgttttcctgtggcacttctcaaggaccttgccctcgccccaaccccattttagaaaatagggctgagatttaatatgtgtctgtcacagatgtggctggtggagaaagactaagccaaaagaaaatcagcacaggtaaacactgcactagaggttggagaagctaaggtttctggaagaccagatttctggacctcttagtccaagggaataaaggatagggggaagagttggtgaaagacaaacacacacacacacacacacacacacacacacacacaaagcagtttacaatacagtgagaccgagcaaggtgactcatgcctgtaatcccagcactttgggaggctgaggcaggcagattgcctgaggttgggagtttgaaaccagcctggccaacatggtaaaaccccgtctctactaaaaacacaaaattagccaggtgtggtggctcatgcctgtaatcccagctactcaggggactgaggcaggagaatcgcttgaacctgggaggtggaggttgcggtgagctgagatcgcgccattgcactccagcctgggcagaaagagtgaaactccatctaaaaaaaaaaaaaaaaaaaaaatatatatatatatatatatatatatatatatgcagtgaagacaagataaaatctggggacggtggttgccaggacagggctctcagaacagctggaagctggagtagggaggatggtctcagcaaggacttcccagagcaaatgaaatttgggctgagtctcaaagaagccagtccaagtgctctgtaagaaggaccagccaggtcatagaaaatgaaatacaaacacccaataaccaagcaacaatgaaatactacttttcacatactgtattaacaaaatttaagatgcttgctgcagccagacctggtaagtacttgggagataagctctcaataccaactcaagggggagggaggaggggcggagaggagattggtgcaggcttcttcgaaaataatttggaagcatccaccctttaaccaagcaattccagtgctagaaatttacaagaggaatatgctctcaagcgttcaccaagatatatgtacaaggaagttcaccacaaaacgtggaaacatgtcatgtctattcattgataaaataatgtatactatgtctacataggaagaaatatgatacggcccccatggcgcacggaaaaaaaatgaagtcctctcttaagcccttctccattcctcttacgccatttatgtaacaatatggctctaaaatgacttgcttgagcatgtcttccccactgaaattgcagatttttgaatgcaggaatctgtccttttatgtcccacacagagacctttggcaaatacagagtaagtttccagttgcaatttgtaagtttgccagtgaaaacagaaagccattaacttgttaatgaagtgtggccaggacacattgggtggataatgcttccgcaggagtgtagctcaggtgttaacagaagctaagcttgatgaaattagaggccccagcattcctcagctggagggtacatacatatacagaactcccccgccccctctgctctctcttatcttctggcctgcctggatgttcaagggaacaatgacagaggtaagacctaagtgccctatgataaaagaaggcttttaccttgaaatactgtcattgtagtgcagacatggcattcttttgttaactctttggttggaatttagttctacgtgttctcaactatttaaacaaggtcgaattggcttttgatagctaaaattgatcccattctccaagtttattttcttccttgaattttaggcagacacaggaagtctgtcctttgattatgatgtatttcattccaccattcttgtttggatggttttaagtcaaatgcttatttgtgtgatttttaaacacaattctgccccagtttttaatacacaatgtctcaagggcagtaccaagaaatggccaacaccaagagcattgtttttcattttctgctctcagtgccttttgtaagggatgagatgggctgcctgtgattggggaacccccgttgcacagcacttcccaatcctaggcctgaccttttgacacaaagcactcattggcctggaggctggccagcagcccagtttcaacagtgaccaagcagaggtgaccagtggccatcctagggtagccattcaattcccccacctggaggcagcaacaactttttgcagttagtacaattagaatcaacaattactgttctttctctccagcctcacagtggggttacttctcacaactgtttctccagcgccaaactccagtctacaggccgcccagtagtagacatcaaatacctgttaaatagcccttacatctccagcccaacggcaaatatctaacctctcttaaacaccacagcccttcccttccccttctccccaccccccatcccaaaacctggcccaggctctgaataccctggatccacttggcttcctctgcagtcagtacctatggggaatgggaatctcttcagggggttctggtccttagagaagggattttgtgtggctgaaaagctggcatcctggggttctggtcccgtcaatgacaacatcgccagactggagacctcagttacttcctctgaaaatgcagtgatttccaggggtcctatttaagctctaaaaattccacaagagctttagataaggaaatagcaacgcaggggtgtgttcttttgccagttctgccacaggcctgcccagtctctaaagacaagacatccaaatcccccaatagaactagttgtcttgtccataaagtgagactaatattgtgggcgctacttatctacttagcaccttggactggtgaggactgtggtgcacaagctaccttacaaatgtaccacactgagtaacatctttaaacctccttgcagctccagggctagccttctcctttgcggagccctcccccacctccggcctcctagagcttcaggccatgttcccctgtcccctgtgaatctcagcatgctacctgaagcatttcacctgaaaaggccacacagggaggaggcgaagcgcagcaggaatgaaatagtcaactgctgtggagttggaaatgttgctgcatcccaccattgactggatggggcctcactcccccaatacaaattattttacgtttgcttctcccaagatcatgtgtaaggccgggcgcggtagctcatgcctgtaatcccagcactttgggaggccgaggcgggtggatcatgaggtcaggaatttgagaccagactgaccaacatggtgaaaccctgtctctactgaaaatacaaaaattagccgggcgttgtggcgggcgcctgtaatcccagctactcaggaggttgaggcaggagaatgaggcaggagaatcacttgaacccaggaggtggaggttgcagtgagccaagatcgtgccattgcactccagcccgggtaacagagggagactctgtcgcaaaaaaaaaaaaaaaaaaaaaaaaaaaatcatgtgtagaagtaaataacacctcttcccagcacctgtggatccatggcattcacacaggtaggcactgacgctgaaatggcctcagatgctaccaattctttctgccgaggcctaaatccaataaacagagatggatggaaacaactatctaataaaagtttcgcatttgtgtgcctggcaacattaagtaaccgtcaggctttcctttagaaattggaattaaatgcgatttagaaactattaacgactttgggcgtatttaataacacatgaaataacccggaggattgaaatgttaggtgaggcgactccggctcatagacgcgcctctccatctggggcgtctggcacttagtggaaccactcaataaacacgtttacccctgcaagcggcacatcagagtccgggggtaattctcggtgtcgtggggccaggacggcgaggggctggaagaggccgccctgtgggagctgggaggctgagataaattcccgtgattgggggctgaaatggcctcccatgccggactgccgtggttctagaactttttcctggaacaggccggcactcccactggagagtcccagctgctgcgcctctggccgcccctcccctctcccgggcacctggcgccggctcccgcgtcctttcaggaattcacgtccgcctggaatttgcacttcaagtctggagcccccaaggaacccctcctgaccctgaacttctatctcagtttcaagcttcctagtcttccccacacacacacacctagctcctcaggcggagagcacccctttcttggccacccgggtatcccccagggggagtacggggctcaaaacacccttctggaaaaacaaaggtggaagcaaatttcaggaagtaaaacttcctgaaataaaataaaatatcgaatgccttgagacccatacattttcaggttttcctaattaaagcaattactttccaccacccctccaacctggaatcaccaacttgattagagaaactgatttttcttttttctttttttttcccaaaagagtacctctgatcattttagcctgcaactaatgatagagatattagggctagttaaccacagttttacaagactcctcttcccgcgtgtgggccattgtcatgctggtgggcgtcccgcccacctgaaaggtctccccgccccgactggggtttgttgttgaagaaggagaatccccggaaaggctgagtctccagctcaaggtcaaaacgtccaaggccgaaagccctccagtttcccctggacgccttgctcctgcttctgctacgaccttctggggaaaacgaatttctcattttcttcttaaattgccattttcgctttaggagatgaatgttttcctttggctgttttggcaatgactctgaattaaagcgatgctaacgcctcttttccccctaattgttaaaagctatggactgcaggaagatggcccgcttctcttacaggtatgagctaatcttgaatgtgaactttttttgattgctagagattgccagcttaggaagtaatgttctacacctgtcatttgatttttctcttgctcaagccttaaaagagctgccaaccgcactgctgtttttcctgaaagacctggaatttcacatggttacttctaactttgccattggcttttaacattttcgtgttaatgttaattttcattttatgttaatgactctgcctatgaaatagtgtttctttattcttgtacaaataaaggtcagtactacaaccaaatttaaaatcttccgaaaagattaaaggtataagcagattcaatacttggcaaaactattaagataatagcaaaaaaaaaaaaaaaaacccacattttttacctaaaaaccttttaagtgattggttaaaatagtttggccgggtgcggtggctcacgcctgtaatcctagcactttgggaggcagaggcgggtggatcacctgaggtcaggagaccagcctggccaacatggcaaaaccccgtctctattaaaaatacaaaaattagccaagcatggtggcgggcacctgtaatcccagctactctggaggctgaggcaggagaattgcttgaactggggaggggaggcagtgagccgagatcgcaccattgcactccagcctgggtgaaaaaccgaaactccctctcaaaaataaataaataaatacagtagtttgtaaaatgattcatcggtaacatgggatgcagctattttttaatccttatatgaaaattgtatgcaggggaaaacatgtgaaatagaagataaaagacatatac

SEQ ID NO: 1067 - DNA, 6000 bp, Homo sapiens
aatttgcaacaaccttaagcagtgataacatttgggacaaacaaataacaacaacaaaaaaaaagtaaaagaaaaagctgagaatagaatgtccatggagcttttgaaaagctctggcatatttctaggaatctagaagaccaagagcatgagcaggtctgtaatatgtccaggagaatctttagaaggccctatgtgctcaccttggctgactttaatgctctaaatagcaagaaatgaagtctaaagcagagttgtaaactgcctgcctgaccattgaaggcatggctcaatacatacagaatacctcggcaaaggcagaaagacttattggttccaagtatttaaaaacactatgtccaatcattagatgaccactaaactaatggaacagagtcttcaatggttacacactaccaagaatacatactttaaaaaattaattgataaaaatcactacacaaatgaatagcaacaacaaacctgggggaaggggagaatctgatttccaaagttgccacattatgttgtttaaaacatccaattttcaatgaaatattgtgacacatacaaagaaacaagaaagtctggcccatacacaagaaaaaaagatcagtcaataggaattgttgccaagaaagctccaatgttggacttactagacaaagactttaaatcagcccaggcaggtgactcatggctataatcccaacactttgggggcctgaggtgaaaggatcacttgaggccaggaattcaagaccagcctggacaacatagttgtcctatctctacaaaaaaattaaaaattatcaggcatgctggcacgtgcctgtagtcctagctacttgggaagctgaggtgggaggattgattgcttgagcccaggaggtttaggctacaatgagctatgattgtgccactgcattctagcctgggtaacagcgaggccttattaaaaaaaaatacacatacatacatgtatacatattttttcaaagagataaactatgtctaaagaaataaagtataagaatgatgtgtgaacaagtagagaacatcataaagaaattatttttttaaatataactttcttgaggtgataagtacaataactaaagtgacaaattcactagagaggctcaatagcaaagttgaacaggtagaagaaagaacaagtgaacttgaagaaagattgacattaaccagtgcgaggagcagaaagaaaaaggaacagagccctggaagcctttgggatataattaagcataacaacataaagataatggtagtccaggaaggagaaggaagaaagaaaagggcagaaagatatttgaagaaataatgactgaaaatatctcaaatttttcaaagaatgttaacatatgcatccaagcaactcagcaaactccaagtaggacaaactcaaagaaatccacacctatacacatcataatctctgtcaaaagccaaagaccaagagagaattttgaaagcagcaaaagagaagcaaatcattaagtacagatgaccctcagtaagattaacatctagtttctcgtcagaaatcatggaggccagaaagcagtaggataacatattcaaagtgctaacagaaaaaaaacatcagccaagaattctatatccataaagaaaatccttcagaaatgaagaagagtggtgactcactcctgtaatcccagcacttagggaggctgaggcgggtggatcatctgaggtcagaagttcaagaccagcctggccaacacagtgaaaccctctctactaaatataattacaaaattagctgagtgtggtgttgcatgcctgtaatcccagctgcttgggaggctgaggcaggagaattgcttgaacctaggacgcagaggttgcagtgagccaagattgcaccattgcactccagtgtgggcaacaagagcaaaactccatctcaaaaaaaaaaaaaaagaaaaaaagaaaagaaaagaaaaaaaaagaaatgaaggagaaagtaagatgaccaacaaaactaataaaaaccgaaataatttgtctccagcagatccaccctgcaggaaatactaaagggaatactttaggctgaagcgaaaggacacttaaatccacaaggggaaataaagagaactggtagaggtaactacacagttaaagacagtataaatatatggttttgtttgtaaatcttttattctcctatatgatttaaaagacaattgcataaagcaatagttaataataaataataacagccaggcgcagtggctcatgcctgtaattccagcactttgggaggccgaggcgggcgatccatcgcctgaggtcaggagttcaagaccagcctggccagcatggtgaaaccccatctctactgaaaatacaaaaatcagccaggcgtggtggcaggtgcctgtaatcccagctacttaggaggctgaagcaggagaatcgcttgaacccgggaggcagaggttgcagtgagccaagatcacgccattgcactccagcctgggcaacagagcgagactctgtctcaaaataataataataaataataataacaaattatacgcttgatgatgtgtcacaggtttctgaggctctgttcctctttttctaacttgttgagatggaggcttactgaatttccagtctttcttcttttctaatatatgtattttaggctacaaatttccatctaagcaaggctttagcagtatcaatttttaaaaaattgtatctaagtacagtatacatacagaattcacataagcgtagcattgaatgaggcacctggtcagtactgtttctaagtgtttagtaaatgttttttattactactgtgaattgtcctttgcctcttatgccatagcatcctggcaatggggaggggtttgagggtgggatggtgaagagattctgggattccattttattggagcatttttttccccttgcttctcataaggtgtctgtcggggagagatctgtgtcacttattgcagtttgttgcatgctggaatgctgcagattctggaatgccatctgtatcagttgtctggaatttggtttcacataaggttcttgtcttctgtttaactggtttgctgggacttctgaagtcctgatgatcatactgggaaggcagactcaggggtggcgatgctggctgtggccctcatctgctgggccatggtggttattgtgttgcttcttttgctgtgtcctagaacaggggctttactgagccacccatgtcctctgagagctttgcaacttacaaggactgttctcttccttcaggggctgggatgacttgctgatttaagcccctttgttgagatacagaggtattgtcataatgactgggacttgtgttgctcatctttgaggaagatttgtttaggcttgctgttatccaccatatcttttatttagagtagtttgctggctaactcactgggtcctttggcctactgcagattcagttgctacaactccgtcagtgattccgtgtagggagaagtaatgggttgtcatttttggagtcagggttgggggcctggggtttgagaatcaggtcagaattcatgggttgaggtttagggatttgaggttgggattaggaggttagaagataagcatcaagggctcaggatctagagaccaggtctaggattaaaggattataaatttagggactagggcttgggttaggattggaactgagtagcagaggagttaagattagaatagggggtggtggtcaagggtctaaacaaaaagagaagagatgcaagggtctgcggagagactggaaaaactttcctcgtaagttcccaaaggtgactgggtatcaggaaactattgggaagtggcttcttattgctgcagggacagaagccatgagttggggataaaccttccaagagggcaacacctgtgtaggcagacaccgaagtcagttaaatgtgcaagtaagtctttacattgatgacagttatcgtttattttcattcttctcattctcagtgatttccctcaaaaaaaaaaaaaaaaacccaagaaaccaaaacactttttttttttttaaccatctttattcaacctgtcaccaagtttctggtcacctgccacagctgacccccgatccattctccctgtccccatcctctccatacatcacagtacacaccaggaatacccccagttctcatctcctcaccctgggctgcgtcaatagactccagagtaacccaaaccacaccctgctgcccagattcctaatgacacgtgaaaggccgttatgacttgctttcctcatgccctatgcacacctgggctccagccaaggatcctccttcatcaacccccatattagctacgatccttcatgctaatgtatcgctcagagctcaaaagactttgaagggcctgtgccttcgctatcgagcgcttaagttctttgccctccgcgtacttttgacaaatactgggcatcaaccatgttccaggaactaccctgggcaaagaaaataactgggcaaggtttccatcggtgtctctgctggcgggcatcgcccccgccgggccgccaccctgaacgagcccgtccggtcctctgggttccgccaccctgcgtagcgctgcgccagcacccggcccagcactccctcccgccgagggcgcccaggccggcttccgagggcgcccaggccggcttccgaggggcggttcccacaagcgagttccggcgcccagaacggcttcatcctctcgtcccgtccgcggcaaatgcatgcgcctggaaaacccgccaccctccagggcaactcacacctcacctcacgccgcggcgcaaccggactaggaccccgagcagggctgcccagggagcgcctgaaggaccctgcgagggccgcaggctatccagcgtggcgcctggtggccgggccctgtgccggaggacaaggtgaacccgcagccggacttctgctgcactggggctccgaatgacccagaatctggggtgggcttaggccccgggtacgaggggtgagggctgcgcggttgcaggcctagagaagtagggggctgggtcgagagttgaggccgtgagcccggggggctggagggcgtggccacgggggtaggggcgcaggtcccggccgcgcgtgggtggaccagggctgggccgccgccctccaggaagcgagtggtggccccctcgagtgctggggtggcagtgtaccgacagctttactttttttttgttttggagacggagtctggttctgtcgccaggctggagtgcagtggcgcgatctcggctcactgcagcctccgcctccagagttcaagtaatgctcctgcctcagcctccctagtagctgtgactgtaggcgcgcgccgttatgcctggctaatttttttgtatttttagtagagacgggctttcaccatgttggccaggatggtcttgatctcctgacttcgtgatccgcccgcctcggtctttcaaagtgctgggattacaggcgtgagacaccgcgccctgcctaaaatttttaattctcatggagtcacctttaagtctaacaggattctcgacttgtcagtttgttgtaaaccaagagtcaagacagccacaacttagctgcgttagtaaaggaaccatgtcctccctacaggccgcgtgttcttgccacgagaacccctagcagcctggccttggaatggctggatgaggtgcattcgttggttcattcagatactgttaagagccagctgtgtgctaggtactgcttacaccttctggtggtgaagacggaactgaagggaacttgcaaggagctgtgagaaagtgtaacgggaagtgagctaagatcactaaggtgggcaggaggcaaccagagaaagcacattcaggactgcgaaaactactcacacaaaggctgtcaagccagaaattctttcaaaact

SEQ ID NO: 1068 - DNA, 6000 bp, Homo sapiens
ggcttttctttcttctggtgtagttgaggctcctagggaggaagctgatttgctttgtaatctttggaaaattgatccttcatttccttgcagagataggggctgtgagggaccctagaacagaagtgccacttctttgcaactccaaatgtgagaagtatgttttacagtaaaaccatacttatgttcatattgagagattgaacataattaaaacaaaaggatcaaaaagcaagacttactatgtgcaatgcattgatattttgtttattattattttatagagttgaggtctcactacatagcccaggctagtctcgaattcctgaactcaagcaatcttcccatcttggcctcccaaagtgctaggattacaaggagtgagccactgtacccagccatattttgttgtattctgtttaatttttttaaaaaactactagttaccactcactaacttgcttacacaacccacagagtagagatctactctaagcctctcttttcccattttacagaccgtaaaacgaacccaaagggagccatggacttggagtctttctccacgctattgagtagcagaactggtactaaaatgtggctccacctcactacaggatggtcaattgtttccctaattctgcctcacatttggaagtttcttatcagacttggctcaggcaaggatgagcctgatttttcctatctttctacccaaaatgatgatgattttcccaagagcagcaacctatggaccgccagagatggatgcaagaggaagggtgataaggtggcacatcatgcccagcagctaattaacactctggagaagagaagttggagaccctcactgggccttttggcctccagctacgttttttttgttgttgttttttgttttttttttgagatggagttttgctcttgttgcccaggctggagtgcagtggctcactgtaacctctgccccccagattcaagcgattctcctgcctcagcctcccgagtagctgggattacaggcatgcgccaccacacccagctgattttgtatttttagtagagacagcatttctctatgttggtcaggctggtctcgaactccagacctcaggtgattccacccgcttaggcctcccagagtgctggaattataggtgtgagccaccacgcccggccccagctatgctcttgagccacactctagagacgccatgaaggactgtttttgtttattttcgttggaggtggggatgggtaagacatacctacacagagttatttttctacgtaactgagtacatttaaggaatcctgagcagagttgataagggatttgcattgttgttagcattgctgtgatagcaaaagacagggtcttactctgtcacccagtctggagtgcagtggctcagtcatggctcactgcagcctcaatgtcctgggctcaagtgatcctcttgtttcagcctcctgaatagctgggactccaggcatgcaccactacacctagctgagttttttaaaaattttgggctgggcacggtggctcatgcccataatcccagcactttgggaggccaaggcgggcagatcaattaaggtcaggatttcgagaccagcctggccaacatggcgaaaccccatctctactaaaaatacaaaaaaattagccaggcgtggtggcgtgcgcctatagtcctcagcttctcgggaggctgaggcacgagaatcgcttgaacctgagcggcagaggttgcagtgagccaaggtcgcgccactgcactccagcctgggcaacagagcaagactccatctcaattaaaaaacaaaaaaattgtagagatggggcttactatgttgtcaactcctagtctcaagtgatctcctaccttggtctcccaaagtgctgggattataggcatgagccaccatacctggcctggattgtgtttctaaagcctggcccatgaggagcatcttgtgctttaacaattcataattatggtacctgacatgtgctttagtactggtcggcggaccatgaatcagtagcttcttttggtattactcttattcaaaaggtcttttcagtagactagtgtcaaccagtctgcatagacctagagaaaaggcttgtgtggccagacttctcagagctccatcttctggatagagcctggaatggttagaatgtactcatatttacagttccattgcctgtgttgagtttctggactcttctcaatacgtgccttcctggaggcttttgtggtgatgagaaggtagtgccaagtaatcagaaccttaggtttagattctctgctctttgcatatgggaaaacttactgattcctagccattgagttcagttgaggcccatagtcgggtactctctaaaaggaagagattaacaccagtttaaactctttaaaagaggctgctttataaatagaaaatattagttaggcgtggtggcatgcacctgtagtcctagctgcttgggaggctgagacaggcagatcccttgagcccaggagtttgagggtgttttgagctatgatcgtgtcattgcactccagcctgggcgacagagtgagaccctgttgacttttttttaagaaaacagtaaaacgtttaatttttttaagaaaaaattaaaaattggccaagtgcagtagctcacatccatagtcccagcactttgggaggccagggtgagcagatcacctgaggttaggagttcaagaccagtctggccaacatggtgaaaccctgtctctactaaaaatacaaaaaaaaaaaaaaaaaaaaaaaatagccaggcatggtgggtgcctgtagtcccagctacttgggaggttgtggcaggagaatcgcatgagactgggaggcagaggttgcagtgaactgagatcacacttcagcctgggcgacagagcaagactccatctaaaaaaaaaaacaaaacaaaatgaaaaaacaactggccgggcgcggtggctcacgcctgtaatccagcactttgggatgctgaggtgggcggatcacgaggtcaggagatcaagaccatcctggctaacatggtgaaaccccgtctctactaaaaatacaaaaaattagccgggtgtggtggcgggcgcctgtagtcccagctactcaggaggctgaggcaggagaatgacgtgaacctgggaggcggagcttgcagtgagccgagatctcgccactgcactccagtctgggtgacagagcgagactccatctccaaaaaaaaaaaaaaaagtaaaaattcagctgggcagtgccagatatcatgtgccctagaggcagctgtatggggttcacttgggagaagtggcttattgtctctggccctgggtgaatttcctaaccatctctaatcaccttcattgtttgcaacagggatagtagtgtctacctcaaagaaagtgtcaggaccaaatgacataagaaattcctgtcatgagcctgatacataataggtgctttccccacattagaggacagagggcacatctcttccagatccatcctcactcctctctcagttagagtcatgggaactgaaggagttcccagtaaaatccctgtacagatactgaaatgtaactcaagccctgtaagtaatgctagtagagactgtctaatttgtaaattagacaaaacagataatgagtgtgagatggcctgaactggttaacagggtgcatccaaaaatgtgcttcgttgatgcggcatccagtgcatggctgagtgagtggatgcgagctctgattgccccaagagcataactttggtttaaaggtgtgtaccagcttttggtgatcaggatagaactgataaaaatagtgacctagaacactgtgtatctttttaaatggagttaaccagccttgatcagttgtttttagatacagatgttaatcattaaagctagacccaagctccattgctaacaaggttaatggggctcgtctttggccttgggcaggagcagtgtgggtagacaacctggacaagtaaataatgagtcttactagataatgagtaagcaggttttccctgtatttaaatgcattttataaaaatataattaatggggctgggtgcggtcgctcacacctgtaatcccagcactttgggagaccgaatgggcagatcatgaggtcaagagatcaagaccatgccagccaacgtggtgaaaccccgtctctactaaaaatacaaaaattagctgggtgtggtggtgtgcacctgtaatcccagctactcgggaggctgaggcaggaaaatggcttgaaccctgagaggcggaggttgcagtgagtcgagattgtgccactgcactcccgcctggcgatagagtgagactccatctcaaaaaaaaattatatatattaaaaaattatatatatatatttattttatatatataatatatattatatataatatataaaattaatgggagacctgggcatcatccacttaaagcttgacactcttattagaaaatggtaagatttaatccaaatattaggcttgaaattgtgatttcacctcaccatggcatcagttttgcctgcggcagtggctttctaacaccgtagtgggacctctgcctttttagggcccctgaacccattccctgcctgtctgcatctaaccccgccccatgagctcatagtgtttttgtttttctgccggagaaggcgggggccaaggtgggtggcatgggcggagtcccgcaagaactcagactgtttgtctttgtctttctgctgaaggagcagggtgagcagctctaaggcacttcccacgctacttcgaacccccatgtcatcattttgtttgcttccagcagagcatcctggccagaacaagccaaggagccaagacgagagggacacacggacaaacaacagacagaagacgtactggccgctggactccgctgcctcccccatctccccgccatctgcgcccggaggatgagcccagccttcagggccatggatgtggagccccgcgccaaaggcgtccttctggagccctttgtccaccaggtcggggggcactcatgcgtgctccgcttcaatgagacaaccctgtgcaagcccctggtcccaagggaacatcagttctacgagaccctccctgctgagatgcgcaaattcactccccagtacaaaggtaagtcccagctgctggaggggttgccacactggcgaggagatgtgagagatcgtggccatggaaggccctggcagccatccctggagccctcactccctcccactctgtgctttccctccctctcctccttctcctcctcctggccctcagcccagcatctcacaccctcagttttcaatccctggtaagattgctcaattctgttttgttgtgtggatttgagtttgattttggtagaagtgtagttgtgttttatgttcaggtgtctcttgatcacagtaacccatagtcccccactggggggacggtgggggaagactttgggaggattttacccagaatacttgccgcctgctttttgtcctccaggaaaccagaagcccgggtaattaggtaggccggggagcagcgttgagtcagatggaatgcaggagtgggaggcctgtgctgattagcccaagccctttgctgttacagaatgtccccaaaattgctatatgaaagcaacccttcgattcacatatgataattttttatttctttttataatgtattttataggggacatcagcagccaccagcatggtggggtctttgttggggagtgggggagtcttttgtaaatcaagtaagaatccattaaagaaattaattttaaatgtgcattacctggttacataaaggactctagaacaacttaggttcttttgggactgttgaaacattgtctttaaggacagaatgtactgggtgcctttctctgtactctgaatatgcatg

SEQ ID NO: 1069 - DNA, 6000 bp, Homo sapiens
ttattatattcgttaggattctttttttccctccaaagccaaatgctttagaaatatttgctagaattctaaggcaatgtgttataatagtgttgccatcatccctgtctagttcctgatttaaaaaaatgttttgcatatctggtgtacctgaacttattattatatcgtttatgtatagtttatatctgtttcttttttcttttcttttttttggagacagagtcttgctttgtcacctaggagtgcagtggtgtgatctcagctcactgcaacctccacctcctgggttcaagtaattctcgtgcctcagccacccaagtagctaggactataggcatgcaccaccacgctcggctaattttgtatttttggtagagatgggctttcaccatgttggccaggcttgtcttgaactcctggtctcaagtgatctgcccaccttggcctctcaaaatggtgggattacaggtgtgagccacagtgcctggccatgtctgtttcataaattgtctgtttctatgttagacagtggccctgtttattttgctcaatgcctatcaccttaaatcctaccttttctcatgtcatgtactcctgttctcttctagtttgtgctggcctgatctctctgcccactcctttatttttcagccttttctgtttgtgtggtctcaaatatcctataaatagcatgtggctgggttttgtctctctaatccagtctctatgcctttaaagggagttcaggatttatttactgtgataaagatgtttagttttgctcattccataaattccttttttttttttaaagacacaggatctcgctatgttgcccaggctggacttcaggtcctgggctcaagtgatcctcctgcctcagcctccagagtagctgggattaaaggtgacagccatagtgcccagccccataatttaggtttattattattattattattattgttattattttgagatggagtctcgctctgttgcccaggctggagtgcagtggcacgatctcagctcactgcaagctctgcctcccaggttcacaccattctcctgcctcagcctcctgaatagctgggactacaggcgcccgccaccacgcccagctaatttttttgtatttttttagtagagaccgggtttcaccgtgttagccaggatggtctcgatctcctgacctcgtgatccgaccgcctcggcctcccaaagtgttgggctcacaggcgtgtgcaaccacacctggcctaggtttattattttttactttgtagttttatatttttatttagttgacctatatgaaactactgtttttgtaggtttaaacagttaaatattagcagtttcacagggtcaacctaatattttcctctttctctttgctgtctttgattaaactgtcattcatttaatgtttccccttggtaatttggacattctactattttttcctcattccatttatggttattgttcctctccaggcatgacaactgtcctttagctgggtctaggtgggcagatagtgcacctgtgttacgggtaagagtttgaggccagctggcccttcttccttggtatgtaatttgttttatctatctagaagcttgtataatggtctctttctccttggagtttaagaattttactgtagtctttctctttcatcctgcttgggaatgtggccaacccctcccatctacacacagctttttcttttttcttttctctttcttttttttttttgagagggagtcttgctctgtcacccaggctgtagtgcagtagcgtgatcttggctcactgcaacctctatctcctgggttcaagtgattctcctgtctcagcttccggaatagctgggactacaggtgcactgagactacaccacgctacacctgggactacaggtgtagctgggactacaccacgcccggctgatttttgtattttttagtagagacagggtttcatcatggtggccgggctggtttcaaactcctaacctcaagtgatctgcctgcctcagcctcccaaagtgctgggattacaagtgtgagccactgcacccggctgacacagagttttcttcatgtcatgaaagttttcttctgtagtttgactagctggtgcctccatttcagctgtccctttttctccttttaggactcctgctgtctgcacatcagaattcttggacttgccccccagatctgtggtctattccttcatcgttttcagctctgtgcatctttcccttaagttctgagctatttcttccattagacccaagtggctttttcatattccctcaaaatatcaaacttcttctttcctcggggtctttgtacttgctgtgcttttgtcagaaatggcttcctctagatctttccatgctcagccagtgcctttgggctgatcttagctcagatgttcccttctcagatctacctctcctgctgccttagacataaacaccatactctgcacttttgcttggttccttttctccattgtagtcactctgcctataattatgttatttgttcttttactgtctgttgcctctcacccacctccggacaaataaatcatttgaattcttgctgtgtttattcacgctgcatccctggtgtctaatctaagtcagaccttgataagcacttgtgaaaggaatggaagagtgaattaatgctagggcggccccaaggtggtaactgctatgaagcggccgggtacggtgcctaatgcctgttatcccagcactttgggaggtcaaggagtgtgtatcacttgaggccaagagtttgagaccagcctggcctggataacatggtgaaaccccgtctctattgaagaatagaaaaattagccgggtgtggtggcacacgcctgtaatcccagctacttgggaggctgaggcatgagaatcgcttcaaccctggaagcggaggttgcaatgtcatagcactgcagcctgggtgacagagcaagattatgtctcaaaaaaaaaaaattctgagaaggtggtaactgctatggaaacatatagagccaggatgaggggataaaggtggtactgagtgctgggggcagagtggggcaggttacagtctgaaatgaggggctctgagagctggggtgcagctctttggaaatctgtgcaatccaggcatgggaacaaccataactcatacactgtgcaggagagtgcatggggtgtgatgtgtgaggaacactgggagattgagcagcaaggccaaaagctggccggggagatacagtcgggggggtgatagggaattatgaaggtcctgatgtctctggttttcccttggggaggaagtactccagggttctgagcagggaatgggaggatctgactcatgtattcacaggctgatgtgtgcagaacagactgaaggcatcaggggcagcaagaggagaccaggaggcagctgtgacattgcactcaagagaaatggtggcagtttggactcagtgaaaggtatggaggtggcaagaagtgatttcattctgggtagatgatgctgatggagacagcagaccttcctggtgcactgaatatagatgggaaagagagtagtcaaggggtactttgaggtgtttgacttgagcaataagaagggctgagatgctatcactcaatttggggaaagtggggtgaagtaggtttggcggatgagccagtgttagggtagcacaagttgcgtttgagatgccagcaactggaagtcagagtgcagatgtctagttgacagtgggactagtgaatctgccactcaggaagggtctggactggacaaacacttttaggagtgattgacatgtaggtggcatttgaagtcatgagcctggataagattttggaagagtgagtgtagacaaagagaaaacacacagatgagaaactggtgagactggaggaaaccaggaggacatggagccctggaaaccacatgctaaggtgagaggagctgctcacagaagtctctcctatccactgttataaggtcagggatatttatttattttccttttttgttcactgctgtatttccaataccgagtgtaagtgcttaataaatacttgttgaattaaaaagtgtatgagtgaatttacacctttgcaaatgcccagtacacagggctgcaacattgttctcctttacagaaagagcagagatcaggtaggaggctctgcccattctcagtggcactaaccctctcctttgcctttcacagctatgctgacattcactcaggtgagagcccttctgtccaacacaggcccaagacaaatgagcctcagacaagccctgtggtgtggtgcttggtgggagctgggttgggcactgggtcatccaccagtccccagaaaactctatggccacttctctgtccacccttccatatctaataatctgtctgtctgtatctataaccatttctttgtccaccgtctacaggcactcttttgtccctctttccgtctattcacatccagtcttctgtccatctgctagagtgaccaacttcccagtttgtagtggactgtctctgtgttagcattgaaattcctgcatcctgcgaaatcgctcactactgaacaaaccaagactgttggtcaatccatctgtttcccaggtatcctgctgtccatcggcccgcagctagtctatccacccaaccgcccgtcagacctccggcccaccctcccagacggaggacaatgctccgccctctctggccccgcccccagtcaccgccttttccggaagctgctgcagcgaatcctggcaccctagcaacagcgcctttcaggctgtccagtccgcgtgcgcagctcctaggacgagccaatagtgaggggcaccgggagcgaggtgcagggggcggggctcggcctggccgcagccattttggtgcgagagaaacaataggacggaaacgccgaggaacccggctgaggcggcaggtaaagctcgcgtcctatggccctagtgcccgaggagctttgagggagattttttcaggctactgggaaacgggatctctgatcattggagtctcccaggttatttgggaaagacttcttccgtggtcattgtgggggaaatctcccggggtccctgtggattcgatttccctgggtcatttgggaggagggtttttcttctgatcattgggggagggatttccgtggttttgggggtccagcatcctccccggtcattggagggggtctcccgggtttgggggagggcaggatctttcctggtcattgagatctccccgggtcttgggaagcgcaagatctacggtgtcattgaggggtctccccaggtcattggcggccacgatctccccagatatttggcgggtggaggggtcttcccggatctttggatagggagtcagctcagcgcctcaggtactgttacctggggtcggcagatgtgcagccattttgagtgttgaatgccatttgggcccgtcagatggtgttcgatgagggaatctacacacttaaccttattatagaaaaaatgcctttaaatggataagaggacacctttatagtgatatttccactctttacgtttgattacagaccgcttttgtcttttgcatcctaatggcttatttcattttaggattgtattcgttctcatatatcaactaagctacactagcagaaaagtgagtgaaaataaaatgtagaaaccagtaaaatccagtgctcttaaataccagggaaaacagaactagtcactgcttggaattaaacatttccgtagcagaatgtacacagaacaaaaaatcatcttgaatagttttaagaaaaagtactggcactttggaacgtggtaacaaaaatgttgtagatcatcggttctatgatatttttaatagaggaccatgattacagtaattttgttgaattctagtgtttaaaat

SEQ ID NO: 1070 - DNA, 6000 bp, Homo sapiens
caccaatgaaacccagcagagctgggtatggtggctcacacctgtaatccaggtgctttgggaggctaaggcaggaggatcattgaagtttgaaaccagcctgggcaacatagtaagaccctgtctctacaaaaaataaaaaatagcctggcacggtgtctgaaaaaaaaaaaaaaaaaggctgggtgcggttgctcatgcctataatcccaggactttgggaggctgaggcaggtggatcatttgaggtcaggagtttaaaaccagcctggccaacatggtgaaaccccgtctctactaaaaatacaaatattatccaggtgtggtggcgggtgcctgtaatcccaactactcaggaggctgaggcaggagaattgcttgaacccaggaggtagaggttgcagtgaaccaagattgcgccactgcactccagcctgggcaacagagtgagactccgtttaaaaaaaaaagtagaaaacatctgtcactcaatattatttacataatttccttctctgtgacatggctataaccagaactagcaaggatgctgtgacagcccactgtacctacaatttcttttcaggtgaccaaaggaagcgccttgttgcagtttgatcttgcccacatttggacagagacacctgcctgtaccaaagggccaactgtgggagcatatgaaatctaggacccaagcaactggtagatggaaatcttgggactcactagggcccaataaactggtagctgaaccctctaaaaaccaaagtgtctttgtttgaaagctttaaaaattaaatgtcagccaggcatggtggctcactcctgtaatctcagccctttgggaggctgaagtgggaggatcgcttgagcccaggagtttaagaccagcctgggcaacatagtgaaaccgcatctctcgctcttttttttttttaaagacagagtcttgctctgtcgcccaggctggagtgcagtgacgtgatcttggctcattgcaagctccacctcctgggttcatgctattctccttgcctcagcctcccgagtagccaggactacaggcgcccaccaccatgcccggctaattttttttttttttcagtagagacagggtttcaccgtgttagccaggatggtctcgatcatgaaaccgcatctctaaaaaattttttttaattaaaaaaaaattgtggctgggcacagtggctcacgcctataatcccagctcttagggaggcagaggcaggaggatagctcgagcccaggagtccgagacctgcctgggcaacgtaacgagaccccattctccaccaaaaggaaaaaacaaaattgtggttttgttttcgtggtagtactgctatgacataagacattccaggacaatgtcaagatcatatcatccgtagtctcagccttgaagagggaacattacatgaggactatgttagtgtgtcctaacaggaagctagaaatttgtcccatcaaagttacctgaatatattacctgagtatatagtgatagggaatcacttaattttataacaacaattaaaacagtattaaaaagtgggaggaaattggggtcacttaacaaagcatcatattaagtataaattttgcttcctttacccattctctctagagacaaatcatggccagtgatacatactgttacctgattgttttctgatatataaataaaatgtggagtgttggccaggtgctgtggctcacgcctgtaatcccagcaccttgggaggccgaggcaggcggaccatgagggtaagagatcaagaccatcctggccaacgtagtgaaaccccgcgtctactaaaaatacaaaaattagggcgggcacagtagctcacacctgtaatcccgacacattggaaagccgaggtgggcagaacatgaggtcaggagttcgagaccagcctgaccaacatggtgaaaccccgtctctactgaaaatacaaaaattagccgggtgtgatggtgtgcagtaattccagctactcaggaggctgaggcaggagaatcacttgaacctgggaggcgaaggttgcagtgagccgagatcgtgctactgcactccagcctgggcaacagagcaagactccatctcaaagaaaaaaataaataaaagtacaaaaattatctgggcgtggtggcatgcgcctgtagtcccagctattcgggaggttgaggcaggagaatcgcttgaacctcggaggcggagttttcagtgagctgagatcgtgccactgcactccagcctggcaacagagtgagactccgtctcaaaaaaagaaaaaaaaatgctgagtgttgaccaggaacctactaatcagttgtgaattcagacaagtattaccaagttctaacttggaatgttagaagttaggtctgcctaagctcatttgttcattgaataaatcctgatgaccagctgtgaatgtttctaaccctgtgtttaaaccccaagaattagcaacaataatggtactgagatctatcaggtgattcctggagctttcatccagtgcccgtggagtttatcctccatgtttctctcttttttttttttttttttttgagtgcagtggcacgatctcagctcactgcaagctccgcctcccgggttcaagtgattctcgagcctcagcctcccgagtagctgggattacaggcgtgtgccaccatacctggctaatttttgtatttttatagaaatggggtttcaccatgttggcctggctggtctcaaactcctgacttcaggtgatccgccagtctcagcctcccaaagtgctggaattacaggcgtgagctgccgctccgggcctgttcctccacatttctggactcatgcagatagcagcccctctcctatctcaaggatgattatgcttctagtgtctgttgtccttagtcatgctactcttttctctctgggctgctgttgtgtcttcataaaatgagtaacctagacacgcaagcatgtgatgtcccttgctgctctaccttgcatcatacaattctgtttatagaagcattctgggggagcagtgaaaggagaacagctagttttttgttttgttttgttgtattttgttttgttttttgagacagagtctcactctgttacctaggctggagtgcagtggtgtgatctcagctcactgcaacctccgccttccgtgttcaagcgattctcctgcctcagcctcccaagtagctgggactacaggcatgcgccaccacgcctagctaagttttgtatttttagtagagacggggtttccctatgttggccaggctggtcttgaactcctgacctcatgatccgccctccttgtcctcccaacgtgccgggattataggcatgagccactgcgcctggccaagaacaactagatttaagatttgaaggactccccccaggtagggactcctcagaaactgtcatcttttttttttttttttttgagacagagtttcactcttgtcgcccaggccagagtgcagtggcacaatctcggctcattgcaacctctctgcctccttagttcaagtgattgtcctgcttcagcctcccaagaagctgggattacaggcacccaccaccatgcccagctaatttttgtatttttagtagagacagggtttcaccatgttggccaggctgctctggaactcctgagctcaaatgattcgcccgcctcagcctcccaaagtgctgggattgcaggcgtgagccactgcgcccagccagaaattgtgatctttatgctagttattctaaacatcatgagaaagtttggccagcaatgcatttctggcctcaattgccttctgtgaggtcaggtgctaggaatcaaatttttctgaaggtgtctctttttttttgagacagagtctcgctcttgttgcccaggctagagtgcaatggcgtaatcttggctcactgcacttcgcctcccgggttcaagcaattcttctgcctcagcctcctagtgtagctggaattacaggcatgtgccaccacgcccagctaattttgtatttttagtagagacctgaggtgatccgcccgcttcggcctcccaaaatgctgggattacaggcgtgagccactgcgcccagttgaaggtgtctcttatgtgtgaatttttttttttttgagacagtcttactctgttgcccaggctggagtgtgcagtggcgtgatcttggctcactgcaacctcctccgcctcccgggttcaagcaattctcccgcctccacctcccgagtagctgggattacaggcatgcgccaccacgcccagctaatttttgtatttttagtagagatggggtttcaccatgttggccaggatggtctcgaatccctgacgtcaagtgatccacccatttcggcctcccaaagtgctgggattacaggtgtgagccaccgcgcccagccacttacaacatttctaaccctccctctcacttcttcccaaccagaatccttgatcttgtgggcatttctttctgttctataaaaccatttatctggcatgtctttcagtacacaaagttaggcgtgcccagcccatttgtacaccacagggcaggaggctagccaggctacagtatgagaccagaggattggcactacccactaggaaaaccagcaggactcttcaccagtcagtctatgctgataggcagacaaatgcacatttgacaggcagctattggggaaggctgctgaaacagaagataccagccaaatcccctgtagccttcttggccatgggcctaccccttcctccctctgcagaactgcactgagccaggggacaaaggtcactgtgtactctgctataagccaggatccagcaataccctttctggctaggtcctccaactcccggaaggaggggaggtgtgtgcagttgttttttgtctgctaaacagataaaaaggagctaaaatctagacccaccagataagcaaaccagcactttagagtataacatccagtgatggtcaaactgttcactttcattctgaaactgctggcgtgggcacgagtggacagctgcagtacacactcccatgtctgctgtgagctgagtcttggcctgtggccaggtagggagaaggcctttgggacgggtaagcctgggacgcgggacatgctggaagcacgcgtgagtggcagtactgcattttgccactttggccagcaggggccgggctgtcctggagctcccagcatcctgccccagaactgtgcagccggccccaagcccagggtgacaaatgaggctgcgcgctggctcagggcccccgctgaccttccaagtctcagcccagaccccacacgaggggttgttctccaggaagctccagccttggtggcactgggtccctgagctcttttccaaccagagcatagctgggtggaagagcatgtgaccctcagactctgagcttggggcgctgcacctccctcgggactcaagatggttccacctggctgacagctcctgtctcagtctagccagacaaaaacgggttgggaccctcatcctgggcctccgcttgcagctgtgtacgaagatggcaggcttatgggaggatgtccactcccactgaccctggcattgcctgagtcccttgcctacctgggctgggccaagacccaactgcaatcaattgtctggggtccactcgctgctgtggtctctgcctttgtgctcacctcaaggtttgtatctctggcttacagcaaaagcagcccccacccctaacgcagagctggcctcacaactgaaaaccgggaaggccctcacttggcactggggaactagttcaagggccaggtgcatgcaagggcatattaagagtgcaggggtggggcccactgacactgggcgggcttctagcacaatgggaatacctcagctggcccctccagctttgtcctgcctggacgtgctg

SEQ ID NO: 1071 - DNA, 6000 bp, Homo sapiens
cgagacacaagcaacgtggtacggcaagtcctggaggccgtggcctatttgcactcactcaagatcgtgcacaggaatctcaaggtgagggcagagccagagtcaaagggccagttggcagctgggctggtgctggggtgggcagcacctcagggccttggtctagcctccaaggtcctcatggtgtcttctgctcacccacatgctattctcacaccacagctggagaacctggtttactacaaccggctgaagaactcgaagattgtcatcagtgacttccatctggctaagctagaaaatggcctcatcaaggagccctgtgggacccccgagtatctgggcaagcagggggtggggcaggggcagggggataatggggggcagccttcagggagctgctctgggcagggggaaaatgtgctcatctcaggaagctggtgtggatggtactggacctggctaggcctgatactgaccagcagatgggcgctgtgtttgtagccccagaggtggtaggccggcagcggtatggacgccctgtggactgctgggccattggagtcatcatgtacatcctgtgagtggacagatggacaagcaggcttgcagtcagatggggtgggggcatgtgtctgtggcctttctgtgtgacccttcccccatgcaggctttcaggcaatccacctttctatgaggaggtggaagaagatgattatgagaaccatgataagaatctcttccgcaagatcctggctggtgactatgagtttgactctccatattgggatgatatttcgcaggcaggtgaggaggtgcctgcccagcacttggtagaacgcaagggagtggggagggtgtcctgctctcatcttcctctgtggtattctgcttctgtcccccagcccatttatcacctctagacattgagatggggtgcccatgactatccccttcttggttttgtccacagccaaagacctggtcacaaggctgatggaggtggagcaagaccagcggatcactgcagaagaggccatctcccatgagtggtgagcagggtccaggggagggtgggagaggccagggtccccctcacacccagcagccccatctttgaggcctggaaggggtgcaggtacctagagctcagggcagcccagaggctctgcctggtagtccctggatgccacatagaagggctgagcagagtctccacaaaggctcattctctcagatccagacacacttgcaccctttccaggatttctggcaatgctgcttctgataagaacatcaaggatggtgtctgtgcccagattgaaaagaactttgccagggccaagtggaaggtaaggcttggataactcccttcttggctctatcccaagtattgcttctggcactcagtttcttgcctgcatcacacccctgcagccacacacaagcttttctcaggccatcaggtgtgggtgtagccactgtgattaccttaagtaggagtgctgagcagctgagtacttggccctggggtggatggaggtggccgggggtactatggaaggagtttggtttggtcactgccaagcaatggatccagcaagcctcacccttagcctttctccactgtgctcctttcagaaggctgtccgagtgaccaccctcatgaaacggctccgggcaccagagcagtccagcacggctgcagcccagtcggcctcagccacagacactgccacccccggggctgcaggtggggccacagctgcagctgcgagtggagctacctcagcccctgagggtgatgctgctcgtgctgcaaagagtgataatgtggcccccgcagaccgtagtgccaccccagccacagatggaagtgccaccccagccactgatggcagtgtcaccccagccaccgatggaagcatcactccagccactgatgggagtgtcaccccagccactgacaggagcgctactccagccactgatgggagagccacaccagccacagaagagagcactgtgcccaccacccaaagcagtgccatgctggccaccaaggcagctgccacccctgagccggctatggcccagccggacagcacagccccagagggcgccacaggccaggctccaccctctagtaaaggggaagaggctgctggttatgcccaggagtctcaaagggaggaggccagctgagtaggcagcctggtgagggggggcaggggatgggcaggagggtgggagagtggatgaggggcttctcactgtacatagagtcactggcatgatgccctcgctcccccatgcccccacatcccagtggggcataactaggggtcacgggagagcagtctcgtctcctgtgtgtatgtgtgtgagtggtgggcaggccagtggcagggccggccccagcccctgcatggattccttgtggcttttctgtcttttgctagcttcaccagtttctgttccttgtgggatgctgctctagggatactcagggggctcctgctctccttccccttcccttcttgcctcaccattcccctaggcaggccctgcaggtcccacactctcccaggccctaaacttgggcggccttgccctgagagctggtcctccagcgaggccctgtcagcggtcttaggctcctgcacatgaaggtgtgtgcctgtggtgtgtgggctgctctaggagcagatacaggctggtatagaggatgcagaaaggtagggcagtatgtttaagtccagacttggcacatggctagggatactgctcactagctgtggaggtcctcaggagtggagagaatgagtaggagggcagaagcttccatttttgtccttcctaagaccctgttatttgtgttatttcctgcctttccgagtcctgcagtgggctgccctgtaccctgaacctcatgagcctctaagggaaaggaggaacaattaggacgtggcaatgagacctggcagggcagagtacaagcccagcacccagtgtcccagccttactgggtccttaccctgggccaaacagggagggctgatacctccttgctcttcctagatgcccacctcctacaatctcagcccacaagtcctctccaccctagggggcttgctgcatggcaataactcataatctgatttggaggtttgccctttacaggggcagattttctgctcagttcaacaatgaaatgaagaggaactccctctttctacagctcacttctatcagaggcccaggtgcctcagagccacattgagttgctttttctgggatgaggaagtagggttaaactccccagtttcctgagggaggctcctgacaggtgccctttgtcagaccctaccacagcctggataggcagccacattggtcctcgcccttgctcggcactccgtggtggtcctgcccttctccctgcatgcctgtgggtctgctctggtgtgtgaaggtcggtgggttaactgtgtgcctactgaacctggcaaataaacatcaccctgcaaagcctctggccaccctctcgcctttgcttcctctgtcctactggggaggagcccctggaaggcagtggggaagggagaggctgggagcaggttcacaagtagtggctgggagtagtagtgaacagtgccctgtggatttcttgggctgagggtgaagatcatcctcaccacagtgtattcctcaatggtggtggtggtgggggtcctctgaactctagaaatccatgtgagtagtgggtcttgggctgcatttggaccaaggaatactccctgggctgagagctcaagtaagggctgctgtttttgactcctgttgaccgaggagccttactcttgatttaggcatagagctggaatctacctgggccagccaccgcaaggacagaccctgctcatagccaaagatagcttccctgagctagggagagggtgtagggtgagcaatgcacaaagattctatgctgctctgtgttgattccttctttctgtgaacacctgtgctttccacctatgccccaaatgaaatctcactctgggtctatttcagctggagcagatcagctttatattatgggactatgcacagggtttcttctgggtagagggagtaacactgccacagatactaagcctaaaaacccaaaagttgacttactccagcccaggtgggcctgggtgaactcaccagggatgctgctctctgggaggacctcaaagataacctcctcaaagataacttctctgatgtgggaataataaaaaggatttgttagtctctagtctttgaagcatctgggcctccaaaattccaaccctactacagtctcaagcataactgatcctcctgagagctaagagctaaagtcagggtactggccctagtgtctccaaactcaaggatagtcatatcttacttggatgaagccaaggttggcctggggtgacctgagggactggggcctatgtgtccatctttctagaatcgcccggaactgaggactgagagggtagggtattgtggtctatgggaactacagaccatagcgcatggtccatcactgtccagagcccaagggacccatcgggaccattgttctattcccttgcggctgcggttttctctgccttggcccagcctgcctcgcgccagctctggcatgggaccacaatgcgctgccttgccctggaaaagggtccagctggcagcctcgctgctccccgccttgatataatgctgcgctctcaagtggcaggtcgagtctccccagaggacgcctgagagcgaccgcgctccgcccaggattctctacggcctcggggccgctaagccccgcccatagttccgcccatccgagaatttgtccaatccaggcgaagtattcacgctccgcccaaagttttgtgttgtcacttccggcccgctccaggaagtcgtgctgcggagccaaatttgaagcaagcggaggcgcgggggcgcgtctacgaagccggacctgtagcagtttctttggctgcctgggccccttgagtccagccatcatgcctatccgtgctctgtgcactatctgctccgacttcttcgatcactcccgcgacgtggccgccatccactgcggccacaccttccacttgcagtggtgagtgactgcagtgttggggcccggtgtttgcccgggtaccgcttcagggccttgaggtgttgggcctccaggcggtccaaccccggaatccagacaagtgatgagaaccttcctcctagacgaggccccacgggagcttcccaacctgggcagaagtgggtcaggacaggctttctggtagaggtgatagctgagctaagcctgagggggactaagatggctcagtgaagatagatgcttccttgatcacctatacaaacagatgtgatttcaaaaccgttagcctgggcaagggtgagctttcaccacatcaacaagtccttttatttcttccagatagaaacctgctaggcttctggctacccaagagagtttgctgtgccttacttgatggtttggaattattctacccagagtcatctcactgtccagacaccccaatgtattcgccatgtcagcaaacccgtttaacatggggaaggcaaggagatgctcccctatccaggggtcctgctgaccgtgtagggccattctgttgagtgtacagctagtggggaaagattcccctagcagatgtggacaggccggtttggacctcctagcaaaagagataaggcagcgttacccctgggaatggtgggtgataataatcacagggtcttgtggggctaaaggccctaggaagcagaaaggcaggcatgacactgatggctgctggcttacttgcaaagctttgtttaggcctgtgttgctgacagcctgagccccatgctgagggagccactgctgtttggttagactagaaattaagctcgcctctaagcgtactc

SEQ ID NO: 1072 - DNA, 6000 bp, Homo sapiens
cccttggtaccacacccacactgtgatcaagaaccccgtctctaggtcaaacgtggtggctcacacctgtaatcccaacactttgggaggccaaggtaggaggatcgcctgggccctggaattcaagaccagccggagcaacatggtggaatcctgtctctacaaaaaaaacacaaaaattagccaggcatggtgacatgcacctgtggtcccacctacttgggaagctgaggtaggaagattagattacttgagcctgggggattgaggctgcagtgagctgaaattgtgccactgcactccagcctgggtgacagaacgagaccctgtctcaaaaaaaaaaaaaaaaaaaaaaaaagaacttggtctctggagtccattagagtatcatacgtcgcattcagcaatgatttatgagcatctgctgctacatgacaatcctgttccaggcagcacagacacacggaggtgccccctgcccctatgtggcagcctggtggagagacaactttagacaaggaaacacacaagctcagagataataagatgttacaatgcatgccatgatgtgaaaaacctgggcaccatgagagagaagacgagggaagaccctgatggggtcaggaggccaggagggcttctctgagggtgtgacatttaagctgagccctgaggctggaggaaggaagagccctgtaggcggagagaacagctgtgccaaggccctgaggggggaaccgaaagccaggcagtgcaagggcagaccagtaggggaggaagaggggagtagagtgttatgacctgggaaatgtgagcaggtagaggctacattaagaagtttgctctttgaccaataaaagccctggaaagattttaatcagagcaggcctgcccttcagaaagtgactcttgaggtccaggcacagccctgtgtggaagatagtgtgtgaggctgaaacccagagtgtgtcatcatctggaaacaaccctgcaaaggtgagaggtttgtcatagttacacaactttaactaatgcaccttcctccccgcaaactctaagctggttgtgaaacatgacgatggagcattttgcatatgttacaaaattattgttaatgctcattcatttttggacaaagaccagcatcagtcactggaaacacctgtttgggtcacgaggcttgtcttctgccaggagtggagactttcccacagacttcttgtttcttcttgctgcttttgggtgactcagcctatgacacttttgctcctcctgaaatctccatatcttgcttttctcaaattccaaggtagcctttgcgcaacatatcactctccactgactcttgtcccatcagggcccatagtggatggctgtatgggggccatgtgactgaactcctgatcctcgtttcagcccactcatgtgacatgcatggagctcttcagcagggacttactgaccaggacaagagcttgagactttgaggggatctgattgtcactgcacaatcaaggacagtattcccaagagtggatgttgctcaagatagtccaaggaattctatgaagaaaaggactccacagacaataaattttggacaccctgtttcaacacagttaagcggctttttataattacaggacttttcagaacatttaatatgctaatgtgcattctaaatctccaagaaagaatgatgcatatttatcttttcttccaggtgcatcttagagactggtgtttgcaagtatatggagcaggaaacttcatcccgaagatggagaccccggggctgtcagcaggcgttaggcaagtgcctcaaaattcccaattcccagcaagagaagccaactgaaggatgagacagggtttctgccttccctgggtcctccagtattacatggaggggttggagtgaaccttctggaggtggggtcaatgactcttggaggtaggggaaagcttcctttgaccaagttgcacacaaagacagaaaacgtgtttgcatgggcattgtttaacctgcttaaaagaatgaaaagattttagcacttttttctttttctgtaattactaaagaagtacatgtttttgcaaaaaaaaaaaaaaatcaaacaatatacaagtatatagagtaaaaagtggaagtcctcctttcatctcctccctgcatccctccctgcaccctggagtgttccatattaaggttttggtatgcctggttcagtgggtgagaagattaatctggagtcagcactctgagattgaatctcagctttgccacatgctagctctgtttccttgggcacaagcctcactttgctcatctctaaaataaagtagccgtaggaagggcttggcaggtatgggatgagatgaaacacagaaagccctaatgcagcacctgaacctagttggattcagttaaatttggccgttagaattttccttccagaatccaggcattttttaaaaggtccaatttcattcaatggatgtgctaattcgagaatggggtccatctcttaatctgttcatgtgactcttttttaagtcctcaagggcagtttctatgcagaaaccactatttagaggtttactttattttttcaagttcatagtcaaattgtcaaagctggaaattaaaaaaaagcagattacttgactttctttattctacacattagctcgtttttaatgctaggaactaagaacttttctaggactttgatggaatgattactatcttagaaaatgccatgcctccataaatatatatgcctactatgtacctgcaaaaattaaaaataaaaactttgttaaaagaaaaaaaaaaagaaaatgccatgcttttaagttcagcttacaaaagttctcattctttttataaatccagctagaatttccagataaaataaaagttgcccaattgaatacgaactaccccaaattcaaatctacctactgttctatatttttatttgttaaatctgccaatcctaaacccaacaaacctaaataattacttataaggggtttgtggccaatttataaacattttatactttatttaatatgccctattttcttttaaaagttcttcaattgtctgaactaacaaaaaagctacttttaaaaaatactaaatcatttgaattctaataaagtaaacaaacaaaacattgatgataacctaaagtgtttataaatgttccagaactgtattcagacaaaggtttcaacgtaaagtcatgaacctgaatcaaaccctaccaagtgcacattttataagagagttacaagattttctatatagttggcccagcagctctcattaagtccatgaaataccgcatattccatcttaaaacacacaaaaagagtataccatggctctgagtctcttaaacatttctacactttaattctaaatcttttttctggttggaagatgcccattcaccaagaaagacaattaaccattccctagagctcctttttttttgtttttgtattttattgagatggaatctcactctgttgcccaggctggagtgcagtggtgcaatcttggctcactgcagcctctgcctcccaagttcaagccattctcctgcctcagcctcccaagtagctgggattataggcgcccaccaccacgcctggctaatttttgtatttttagtagagacagggtttcaccatgttggccaggctggccttgaactcctgacctcaagtgatccacccacctcagcctcccaaagtgctggggctacaggagtgagccactgcgcccggcccagagccacctttaccagagattcaaccaggcctgaggtcttaggttgcagacaacagggagattcattgcagcacgaactcaggaaaccatttccttccatgtactatttggggttatcttatagaattcctggcatgcttggccagtatgctgcctggatgtatgttggggatatatgtataattttccctgtggctgtggccacagacccatcaccacaagaggggttggtccacagatcccgatgctggcttggagttattcttattccctacccttttcacagaattgtctttgccaaagtccattaatataccttgattggattttgcttttttttttaatttttttttgctttacagatcttcatagtttcctgcccatatctctaaaagtcattttgcttgagttgatatcctacagttcttacaagacctttctctcccagggtcacacaactctcgccaatattaaattaatatcagcttcaatcacgggtctctccatgggtttcacgggctatttgctcgcagagtccagggacattttcctcatccattccatcagatccccaattgctttctctggcaacacactcctagtatttgtacggtaaagctgcctaaaaaaattaagtaattcaaactactcttgaccttactttacaccaccagggcaattagagtcacagtctgggtgtgtctgaggacagcaggccgccaaatcccagtgatttagagaaaaccgagcagaatttcccatgcctcctgcctcattgtcccccagcagaaggttccgtcaccccaggtgccctctagggtggaccacttccgagttcatccactgtcaggaaaaggcacatggcatgcaaccgcaagaccgatgactagatgtcagagctggctcccggttgggatatgagtgactttgtggaggatggcgcctaaatgaggcatgccaatttctgcaccagggtgacgaacataagggctccttaaaggctagcccaatgtatctgtatttccttggggattaaaacccatgatcttcagttcctcagagaactgaaagttgcaaggagaaatccagtaattcctgttatctgcaggctttataagtcagtggagcctgcggaagtggccagaatccagcactccaagcactgctgtcttctcacagagtcttgaagccagagcagcgccaggatgtcacgggagctggccccactgctgcttctcctcctctccatccacagcgccctggccatgaggatctgctccttcaacgtcaggtcctttggggaaagcaagcaggaagacaagaatgccatggatgtcattgtgaaggtgagcccctttcctgggaggaggatcccagacacccctcacaccctctctcctgtctgcagactttaagagactcaaggaacttaaagttggcccttagggggaatgtagaagctggcttggaacaataaccacttcaactctctgtacctcctgccgtcatcttaaaacaggggtgataacaatggttccctccagggttgctggggggactacaggagttggcaaatggaaagctcttaatgtagtatctggctcattatacgttccagataagggttagccattatgatttttattgctatttattgaatgcctgtatcaggcactataagcacatggtttcacttcataatctttatgaagagggactattactccccatgtagaggtgatgaacaaagaaagatgaagtaaccttatacagctactccttttcaccagcaaagcccagctcctttctctctctttccttttcttctttctttcttttctttctttctctctttctttctttctttttctttcttcctttttctttcttcctttttctttcttctttctgtcttttctttcttcttcctttctctttttctttgtttctttcttcctttcccttccttacttttttccttccttccttctctctcccatcctcatcatccctccctctctttgtctttctttcttcttctcctccttccttcctctctccctctcctctacttccccactccttccactttcgcttacgctttccttgggtgatatacccaatgtccggggacactgcttgctttctctggagtcaattgactccctttatcctacaggttaattaatttt

SEQ ID NO: 1073 - DNA, 6000 bp, Homo sapiens
agatgtcatcttcttctaatagaaagctgttttgtctacgctgaatatctgtcgtttgatgtagcagccacctttatcagttacctaccctagctagatcttctgcatatcttgctgcagcttctctatcagcatttgctacttcactttgcacttttatgttatggagatggtttctttcctgaaacctcatgaaccgaactctgctgattccaactttccttctgcagcttcctcacctccctcagcctttgcagaattgaagacagttggggaggatcttgctctggaataggctttggcttaaaggaatgttgtggctggtttgatcttccatccagaccattcaaactttctccacatcagcaataggctgttcttctttctcatcattcatgtgttcattggagtagcactttcaatttccttcaagaacttttcctttgcattcacaacttggctgtttggcccaagaggcctagattttggcctgtcttggctttctaaatgcctttcttactaagcttagtcatttctagcttttgatttaaactgagagatgtgcaactctttctttcactcaaacacttagaggccattgtagggttattaattggcctaatttcaatattgttatgtttcaaggaagaggaaggcctgaggagaggaagagagatgggggagtgactggttggtgatcacaacacacatttatctatttatatggcatggttccgcagtgcctcctaaatgactacaatagtaacaacaaagatcactaatcaccacagaagacataatgataatgaaaaagtttgaaatattgcaagaattaccaaaatatgacaaagggacgtgaagtaagcccatgctgttggaaaatgatgccagtagactagctcgatgcagggttgccacaaaccttctatttgtaaaaaatgcgatatttgcaaagtgcaacaaagcaaagcacaataaaataaggcatgcctgtatcgctacaattttaatccaacataagcacactacacagtatgttccaaagggaaaatacccccaaatcaaatgcagaaaggagtgtcaaatagcaagctctcaataaatgttagctactgttattaagagctgttaaggccaggcacggtagcttatgcctgtaatcccagcactttgggaggccaagacagggggatcacctgaggtcaggaattcaaggccagtctgaccaacataacgaaaccctgtctctactaaaaatacaaaaattatctgggcgtgatggtgtgtgcctgtaattccagctactcaggaggctgagataggagaactgcttgaacctgggaggcggaggttgcagtcagctgagatcacaccactgcactccagcccgggcgacagagtgagactccatctcaaaaaaaaaaaaaaaaaagctgttaaattatgatcggcttcctgtgtctcagagtcaacctggccagcatggtgaaaccccatctcttctaaaaatacaaaaattagccagacatggtggcgtgcacctgtaatcccagctacttgggaggctgaggcaggagaatcgcttgaacccaggaggtggagattgcagtgagccgagatcacgtcactgcactccagcctgggcaacagagagagactccatcttataaaaaaattaatatgtaaatattgaaaagtagtgacaaaacaaatgtggcaaaacgttccttggtaaatgtgggttgagggtatttaagagttctttgtgctatttctgcaacttttatgcacatttgaaattatttcaaaataaaaagtaaagtatatataaataagaggaagctaggaagtgacaaaaaccattaaaggaagaataagaaacggtagttcggccagcagccagctccctgctggttcccacgtcaggcgctgtgagaagccctttgcctctcggtcctgtgtcctcaccatgcacccttgtggtcagcctggaaaggccaacttgatagttacaggctgcttcagatctgccacccacgtggtgacaagtcctggcgcgttggcatgggtggtactgaaaaaggctatggatccagggcagtgcagcggccagtggcaagggatgaggcggggtctccaatggcatcgtttgaactgcctgcaacctttttacccacatgtctcatgaagggatcaaggagaaaagcactgtggtctgggaaaagacttctagcactgagatgctgccttcaggggcaaagattaacctggctccccagaagaggagcagtgctcattgccagacagaagagggcgatgttttcgcccatgtcatcctttgaataggcaccgacaggctttggccgccagctgtgcccactgggtgtggtttcacaaatctgcaaattccaagggcaagattagggtgaggttaatgagacagggtcaagtacaagttcaggggcagatcgtgtctttactttgttactttgttcatcatggatttttcttcattaatttttgatttttcaaaatattgcattgaatgttatttagcttgattactgagttatttggtaactccttaaattttgtgcctaaggctagtgtctcattcgccttgccctagtcctgtcttgacagatctaatccattagtcgtatcgccaccagctcagagtttgcaattaggcccttttgtacctataaagaaaggactgacaaaaggaattaatcctgaggacgtaaatacctgctttttttttttttttttttgaggcagagttttactctgtcacccagcctagaagactggaatgcagtggtgcaatcataactcactgcagcctctaaatcctgggcttaagtgatcctcccaacctcccacctcagcctccagggtagctggggccagaggtatacaccaccatgcctggctaacttttttatctttagtagagacaagttctcgctatgttgctcaggctggtctcgaactcgtgggctcctgcctcggcctcccagggtgctcgggttacagatgtgagccactgcacccagtcaaatgcctgcttttgatgtcacttcacagccagcaactggagaccaacttctttatctccgagtctcaatttcttcatctgtaaaatgaggatagcaattgctcctttgcagtttattctgaaaacagagtatcaccccaactgagtacccctgagggccaggcaccgtgctgagtctgccctttagttataacctctctaaattttcacagccctaccatgtaagagatactattaccccatgttaaaggtgaggaaaagggcacagagaagtttggttatttgtccagggctgaacagccagtaagtaaaagtgtatatgctttaacgtcatcagcattcccgacgtgagatgacccccaagcccccggagatatttggcaacatctgtcgaaatttttggttgtcacaactgggggatgtgattggcatctagtgggtagaggcaggggatgctgctaagtgtccaataatgcacaggatggtccccacaacaaagtactatctggccccaaatgtcaatcgtgccaaggctgagaagcctgctctatgctatgctcccgagtcagaaagttacatgagcacttagcacttagtgctccatgaaaggtagatactgttgtggtttttgttattattacattttgtctctatggctgggggttcccgtggcttccagggaagctgagttcccttggtaccacacccacactgtgatcaagaaccccgtctctaggtcaaacgtggtggctcacacctgtaatcccaacactttgggaggccaaggtaggaggatcgcctgggccctggaattcaagaccagccggagcaacatggtggaatcctgtctctacaaaaaaaacacaaaaattagccaggcatggtgacatgcacctgtggtcccacctacttgggaagctgaggtaggaagattagattacttgagcctgggggattgaggctgcagtgagctgaaattgtgccactgcactccagcctgggtgacagaacgagaccctgtctcaaaaaaaaaaaaaaaaaaaaaaaaagaacttggtctctggagtccattagagtatcatacgtcgcattcagcaatgatttatgagcatctgctgctacatgacaatcctgttccaggcagcacagacacacggaggtgccccctgcccctatgtggcagcctggtggagagacaactttagacaaggaaacacacaagctcagagataataagatgttacaatgcatgccatgatgtgaaaaacctgggcaccatgagagagaagacgagggaagaccctgatggggtcaggaggccaggagggcttctctgagggtgtgacatttaagctgagccctgaggctggaggaaggaagagccctgtaggcggagagaacagctgtgccaaggccctgaggggggaaccgaaagccaggcagtgcaagggcagaccagtaggggaggaagaggggagtagagtgttatgacctgggaaatgtgagcaggtagaggctacattaagaagtttgctctttgaccaataaaagccctggaaagattttaatcagagcaggcctgcccttcagaaagtgactcttgaggtccaggcacagccctgtgtggaagatagtgtgtgaggctgaaacccagagtgtgtcatcatctggaaacaaccctgcaaaggtgagaggtttgtcatagttacacaactttaactaatgcaccttcctccccgcaaactctaagctggttgtgaaacatgacgatggagcattttgcatatgttacaaaattattgttaatgctcattcatttttggacaaagaccagcatcagtcactggaaacacctgtttgggtcacgaggcttgtcttctgccaggagtggagactttcccacagacttcttgtttcttcttgctgcttttgggtgactcagcctatgacacttttgctcctcctgaaatctccatatcttgcttttctcaaattccaaggtagcctttgcgcaacatatcactctccactgactcttgtcccatcagggcccatagtggatggctgtatgggggccatgtgactgaactcctgatcctcgtttcagcccactcatgtgacatgcatggagctcttcagcagggacttactgaccaggacaagagcttgagactttgaggggatctgattgtcactgcacaatcaaggacagtattcccaagagtggatgttgctcaagatagtccaaggaattctatgaagaaaaggactccacagacaataaattttggacaccctgtttcaacacagttaagcggctttttataattacaggacttttcagaacatttaatatgctaatgtgcattctaaatctccaagaaagaatgatgcatatttatcttttcttccaggtgcatcttagagactggtgtttgcaagtatatggagcaggaaacttcatcccgaagatggagaccccggggctgtcagcaggcgttaggcaagtgcctcaaaattcccaattcccagcaagagaagccaactgaaggatgagacagggtttctgccttccctgggtcctccagtattacatggaggggttggagtgaaccttctggaggtggggtcaatgactcttggaggtaggggaaagcttcctttgaccaagttgcacacaaagacagaaaacgtgtttgcatgggcattgtttaacctgcttaaaagaatgaaaagattttagcacttttttctttttctgtaattactaaagaagtacatgtttttgcaaaaaaaaaaaaaaatcaaacaatatacaagtatatagagtaaaaagtggaagtcctcctttcatctcctccctgcatccctccctgcaccctggagtgttccatattaaggttttggtatgcctggttcagtgggtgagaagattaatc

SEQ ID NO: 1074 - DNA, 6000 bp, Homo sapiens
ggcagggtgcagtggctcatgcctgtaatctcagcactttgggaggccaaggcagatggatcacttgaggtcaggggttcgagaccatcctggcctggccaacatggtaaaaccccgtctctactaaaaatacaaaaattagccaggggtgatggcgtgcacctgtagtcccagctacttgggaggctgaggcacgagaatcacttgaacctggaaggcagagattgcagtgagccaagatcgcaccactgcgctccagcctgggtgacagagtgaaactctgtctcaaaaataataataaaataaaaaagaaccctaggattttcagaaaggtcagtgagcactggcttcaacttaaggtcaccagctccactcgcccctaacaagagagccagcctgtcctttgaagctttgaagccaggcattgacttctcctctctaactaaaaaagtcctagatgtcatcttcttctaatagaaagctgttttgtctacgctgaatatctgtcgtttgatgtagcagccacctttatcagttacctaccctagctagatcttctgcatatcttgctgcagcttctctatcagcatttgctacttcactttgcacttttatgttatggagatggtttctttcctgaaacctcatgaaccgaactctgctgattccaactttccttctgcagcttcctcacctccctcagcctttgcagaattgaagacagttggggaggatcttgctctggaataggctttggcttaaaggaatgttgtggctggtttgatcttccatccagaccattcaaactttctccacatcagcaataggctgttcttctttctcatcattcatgtgttcattggagtagcactttcaatttccttcaagaacttttcctttgcattcacaacttggctgtttggcccaagaggcctagattttggcctgtcttggctttctaaatgcctttcttactaagcttagtcatttctagcttttgatttaaactgagagatgtgcaactctttctttcactcaaacacttagaggccattgtagggttattaattggcctaatttcaatattgttatgtttcaaggaagaggaaggcctgaggagaggaagagagatgggggagtgactggttggtgatcacaacacacatttatctatttatatggcatggttccgcagtgcctcctaaatgactacaatagtaacaacaaagatcactaatcaccacagaagacataatgataatgaaaaagtttgaaatattgcaagaattaccaaaatatgacaaagggacgtgaagtaagcccatgctgttggaaaatgatgccagtagactagctcgatgcagggttgccacaaaccttctatttgtaaaaaatgcgatatttgcaaagtgcaacaaagcaaagcacaataaaataaggcatgcctgtatcgctacaattttaatccaacataagcacactacacagtatgttccaaagggaaaatacccccaaatcaaatgcagaaaggagtgtcaaatagcaagctctcaataaatgttagctactgttattaagagctgttaaggccaggcacggtagcttatgcctgtaatcccagcactttgggaggccaagacagggggatcacctgaggtcaggaattcaaggccagtctgaccaacataacgaaaccctgtctctactaaaaatacaaaaattatctgggcgtgatggtgtgtgcctgtaattccagctactcaggaggctgagataggagaactgcttgaacctgggaggcggaggttgcagtcagctgagatcacaccactgcactccagcccgggcgacagagtgagactccatctcaaaaaaaaaaaaaaaaaagctgttaaattatgatcggcttcctgtgtctcagagtcaacctggccagcatggtgaaaccccatctcttctaaaaatacaaaaattagccagacatggtggcgtgcacctgtaatcccagctacttgggaggctgaggcaggagaatcgcttgaacccaggaggtggagattgcagtgagccgagatcacgtcactgcactccagcctgggcaacagagagagactccatcttataaaaaaattaatatgtaaatattgaaaagtagtgacaaaacaaatgtggcaaaacgttccttggtaaatgtgggttgagggtatttaagagttctttgtgctatttctgcaacttttatgcacatttgaaattatttcaaaataaaaagtaaagtatatataaataagaggaagctaggaagtgacaaaaaccattaaaggaagaataagaaacggtagttcggccagcagccagctccctgctggttcccacgtcaggcgctgtgagaagccctttgcctctcggtcctgtgtcctcaccatgcacccttgtggtcagcctggaaaggccaacttgatagttacaggctgcttcagatctgccacccacgtggtgacaagtcctggcgcgttggcatgggtggtactgaaaaaggctatggatccagggcagtgcagcggccagtggcaagggatgaggcggggtctccaatggcatcgtttgaactgcctgcaacctttttacccacatgtctcatgaagggatcaaggagaaaagcactgtggtctgggaaaagacttctagcactgagatgctgccttcaggggcaaagattaacctggctccccagaagaggagcagtgctcattgccagacagaagagggcgatgttttcgcccatgtcatcctttgaataggcaccgacaggctttggccgccagctgtgcccactgggtgtggtttcacaaatctgcaaattccaagggcaagattagggtgaggttaatgagacagggtcaagtacaagttcaggggcagatcgtgtctttactttgttactttgttcatcatggatttttcttcattaatttttgatttttcaaaatattgcattgaatgttatttagcttgattactgagttatttggtaactccttaaattttgtgcctaaggctagtgtctcattcgccttgccctagtcctgtcttgacagatctaatccattagtcgtatcgccaccagctcagagtttgcaattaggcccttttgtacctataaagaaaggactgacaaaaggaattaatcctgaggacgtaaatacctgctttttttttttttttttttgaggcagagttttactctgtcacccagcctagaagactggaatgcagtggtgcaatcataactcactgcagcctctaaatcctgggcttaagtgatcctcccaacctcccacctcagcctccagggtagctggggccagaggtatacaccaccatgcctggctaacttttttatctttagtagagacaagttctcgctatgttgctcaggctggtctcgaactcgtgggctcctgcctcggcctcccagggtgctcgggttacagatgtgagccactgcacccagtcaaatgcctgcttttgatgtcacttcacagccagcaactggagaccaacttctttatctccgagtctcaatttcttcatctgtaaaatgaggatagcaattgctcctttgcagtttattctgaaaacagagtatcaccccaactgagtacccctgagggccaggcaccgtgctgagtctgccctttagttataacctctctaaattttcacagccctaccatgtaagagatactattaccccatgttaaaggtgaggaaaagggcacagagaagtttggttatttgtccagggctgaacagccagtaagtaaaagtgtatatgctttaacgtcatcagcattcccgacgtgagatgacccccaagcccccggagatatttggcaacatctgtcgaaatttttggttgtcacaactgggggatgtgattggcatctagtgggtagaggcaggggatgctgctaagtgtccaataatgcacaggatggtccccacaacaaagtactatctggccccaaatgtcaatcgtgccaaggctgagaagcctgctctatgctatgctcccgagtcagaaagttacatgagcacttagcacttagtgctccatgaaaggtagatactgttgtggtttttgttattattacattttgtctctatggctgggggttcccgtggcttccagggaagctgagttcccttggtaccacacccacactgtgatcaagaaccccgtctctaggtcaaacgtggtggctcacacctgtaatcccaacactttgggaggccaaggtaggaggatcgcctgggccctggaattcaagaccagccggagcaacatggtggaatcctgtctctacaaaaaaaacacaaaaattagccaggcatggtgacatgcacctgtggtcccacctacttgggaagctgaggtaggaagattagattacttgagcctgggggattgaggctgcagtgagctgaaattgtgccactgcactccagcctgggtgacagaacgagaccctgtctcaaaaaaaaaaaaaaaaaaaaaaaaagaacttggtctctggagtccattagagtatcatacgtcgcattcagcaatgatttatgagcatctgctgctacatgacaatcctgttccaggcagcacagacacacggaggtgccccctgcccctatgtggcagcctggtggagagacaactttagacaaggaaacacacaagctcagagataataagatgttacaatgcatgccatgatgtgaaaaacctgggcaccatgagagagaagacgagggaagaccctgatggggtcaggaggccaggagggcttctctgagggtgtgacatttaagctgagccctgaggctggaggaaggaagagccctgtaggcggagagaacagctgtgccaaggccctgaggggggaaccgaaagccaggcagtgcaagggcagaccagtaggggaggaagaggggagtagagtgttatgacctgggaaatgtgagcaggtagaggctacattaagaagtttgctctttgaccaataaaagccctggaaagattttaatcagagcaggcctgcccttcagaaagtgactcttgaggtccaggcacagccctgtgtggaagatagtgtgtgaggctgaaacccagagtgtgtcatcatctggaaacaaccctgcaaaggtgagaggtttgtcatagttacacaactttaactaatgcaccttcctccccgcaaactctaagctggttgtgaaacatgacgatggagcattttgcatatgttacaaaattattgttaatgctcattcatttttggacaaagaccagcatcagtcactggaaacacctgtttgggtcacgaggcttgtcttctgccaggagtggagactttcccacagacttcttgtttcttcttgctgcttttgggtgactcagcctatgacacttttgctcctcctgaaatctccatatcttgcttttctcaaattccaaggtagcctttgcgcaacatatcactctccactgactcttgtcccatcagggcccatagtggatggctgtatgggggccatgtgactgaactcctgatcctcgtttcagcccactcatgtgacatgcatggagctcttcagcagggacttactgaccaggacaagagcttgagactttgaggggatctgattgtcactgcacaatcaaggacagtattcccaagagtggatgttgctcaagatagtccaaggaattctatgaagaaaaggactccacagacaataaattttggacaccctgtttcaacacagttaagcggctttttataattacaggacttttcagaacatttaatatgctaatgtgcattctaaatctccaagaaagaatgatgcatatttatcttttcttccaggtgcatcttagagactggtgtttgcaagtatatggagcaggaaacttcatcccgaagatggagaccccgg

SEQ ID NO: 1075 - DNA, 6000 bp, Homo sapiens
aggcaacaagattttcagacagatgggtcttaggtgtgagagaatgagaagggtcaaagatgactccagggtcatctttggaaggatagagttgccttcagtgaaaggggtttgggggttgccagaaggtgttgggatgtggacaggttgagtcacactgcagggaggtcttccttatgaaagctgctcatgtcacacttgccccattcttatgatttttctccttccccgaccaaccatgaagaccaagatctttagtgtggcctacataagaccctgcaaaggatccctgccatccctctggctccgtatttgttccagacttcgctttaggcacattccttgggccacattagctacccttttgtctgcactgtctggaatgcccagccatcctccatgtctgctgttttattcttttttttttttttttttttttttttttttttaagacagggtctcgccatcacccaggctggagtgcagtggtacaataacagctcactgaagccttgacctcccaggctcaagtgatcctcccaccttgattcttcaggtagctgggattacagtcgcccgtcaccactcccggctaattttttaaatttttttgtagagacagggtctccctgttttgtccaggctggtctggaactcttgggttcaagcgatcctcctctctcggcgttccaaagtgttgggattacaggcatgagccactgcacccagccctgtttcattcttcacctcagttaaattctgcataaccttcagctctcatcccatattccagaactgtaaggaaagcttcaggtttcctcatatgctctctcatagtgaccctaaatttatcttctgtaattataaagttgtatgattatttgattcatgtgcatcttcccatgagatggtaagctcccagggggctgggttcatgtctgttttgctcaccctcgtacccccaatgctgcacacaatatctggaatatagtaagtcttagttaatacctgttgaatgaataaattatggttttctacccacctaaaagaaaatattagcttacacatttactcactttcagagtctttgtataattctggtataaagaatgctgtactagaaaaaatacaaaggaaattacacattattatttataatagcaattactaatataattcaaagttcattatgctcattaaggagtccaagccatgaatgattcatttcctgtagaatatagcactgctcacctgataccttgttgtcttcagaaaccagtgacagacttgcactgtctgtccccttgaagacagattgtcatgtggcttgttttggtcactaaaaagtgagcaaaagtgacaggcatgaattccaggcagagaaagctggtgtacaaccctctggctgcacccaactatgttagtttcctgtgtctgccataatgaaatcaccacaactgggtggcttaaaacaatagaaacttattctttcgtggttctggaggctaaaagtccaaaaccaaggggctgacaaggccgtgctccctgtgaaggatctggggaagaatccttccttgctctttcagatcctgatggctgctggcaatccttggtgttccttgccttgtagaagcattgctccaatctctgcccccatcttcacttgatgttctcccgtgtgtgtggggggggtggggtggggggagtctagcctgtgtctctgtatccagctctccctcccatttctcttatgaagacaccagccattgaatttagaacccaccctaatatagcatgacctcatcttaagttgattacgtctgcaaaaaccctatttccaaataaggtcacgtccacaggtaccagggcttaggccttgaaaataacttgctaggggtcacagtataggccactacactggcaatcatgaagcacatgttgaaatggagccttatcagtcagcctgagtcccaaattgactgccgtgagacaggcctgtgtctcccagctcacttcatttcagtcacgtggcccccaagtaaagagacaggctgaatcatctgcaccaggtaaagcttccatctctcttgctttttggtgactacctttaacggattcatatacatgacatgagtctgtactgtatatgatcttctcgtaactgtctctggactgtccttcatgggacatattcctgttgctggtcacttactgaatgcctgccatatgcctattatcgtgctgtgtgccaagagggatgcatagaaaattagacacaaggatcctaatcatgaaaagtgtacaatctaatatagtgggcaggacagaaaagacttatatcagcattggctgaaattgtcaggggagaccaaataataaggcttaataagaggtaaccctaacagagctcccagtctgttccaggcactgtgataagcattttgcaggtattattaaattccataggggttgtaccccatgaggttggtattttataaccattttacaagaccggaaacagaggcttcaaaaggttgtgtaacttgcccagtggtcacacaggattccaatcctgatcagcctgtctcacaaacattgggttctatagacgctcctagattgcattttcgtttaagctgagccttgatggtctgctggaatatggtaggctacactttacacacacaaggctcatttcacctaatacagttatgcctgggcagaagtgatcatgtggcaatatcaacaggttacagtaatagaaaagaatcaataaactactgtttcatttctatgtcattgttgctaagttgtcccaactaccttttttaatggactaatccaaactctttttttttttcatttttccctttataacaattgaagtcagacttcatttttcaaacttggcctcagatacaaagatgacatatcaagagccttcatttctctcctaaagcattaaagcaattaaaatttccaaaagaacatgaaactaaacaaccctatttttaagtgtttccaaacttatttcttttttttaaacttgtttcaaaacagccttatgaggactgttttccaaacagctgtgtaagaagccagccacttttgaaatctgatttttcctgtgtagacatatcatattttctatgcttgaagaagcagggaatacccaagctggcattcaatagtagcgaatatgaaatagaccattaaaagaaagtcataggaatgttaaaatccatgttgactggtttttacatttacccggcagcattcccgagctagcgttggcatggagactggaaaaggaaactttccacaagtctgtcacttgctactgtttctacttactccactgtgagtccaattttaacatttttttaagttgaaaaaagggtttgactccttttgtgttttctgttcaaggcgttttttaaacatgagaacacgtgtgaaaaaggtttttaaaaatcagccaaagattggggtttccaaatattcagctgtttaacattcagataattgcctgccttccccccgctatcccccacatttcgtctgaatgctttggcacgggggagccccacagtctgaaagtaactctgtcccaactctccttactgcatttattaaagaggctgaaagacgcatctgcttttcaatagtttgcggttcttaagagaccaggaaagccagaggttctgactattcaggaagaaagttgggtttcccaaaacgggcaagcaagttcggtgtggtcacatctaggtattcttgacgtcatttttgttgagggaaacaggctgcagtttttggagccaggctaggatgagagatggagggcaaatctgtcacttattctttcctggtgtgcctggaacccactagacactcaattcatgtttacgtgaatgaaggaatcacaataacgccctatcgcatctgtaaaaccgaagggtgattttcctgggctggaaagtttaagaaagaagagagagctgcgtacctagggcttaaggggcctcaggctggcactcgaaaccaggcgttctcatttccctttggcatcaccctgaacggctgtgcctggagctggcgcggggctgaagaggggaggaaatacatgtgaggaaaatcagaggagagggtcgggaacagatgtgggcataaagggaaggcctctgacttgaaataaacaaataggagtcccgcagctggaaggacaaatcctttcacgtcgcgggtgatgtgggattggggcgattttgctctccctttgttctttcccctgccttccacgtttccagggtatttgattgatgtctgtcttctctgttaagttattccaccgtgaggagagagccggtggcagtacctggcacgcagcgggcgcccagtatagacctgctgaacaaacgaatggattcaggggctgctgtgtccccctcacccaccccccgccccctatgtgtccacagcgccccgcacgtagtaggcgacccctaaacatctgtacagcaaatgatttgcaagttttcggcgctgagcacgtggagctttggaaaccaggacagcaaatgagtgtctcggagaccacaaaagcggttccggcgcgtgcgaaaggcggtggctgggcgacggcggagggaacggcgcagagcggggcgccccgccgggagcgctgcctgcgtggcgcccgaggcgggggcgcggggggccgcgcatagcacgtgctcgtctgggagccggccgggccgaggcgggcgcgcgtgtgcgcgtggggcgtggggtgtgtgcccgcgccgtgccccccgcgtgtgctgccgggcgggcgccggcgtgagtcacggcggggctagcctttataacggcccggaggctcgcgggagccgccgcgcccgtccgcccgccgctccgcgctccacccagcgcacccgggccccgcgcccccaactgcctccggcggccgcccagtcccgagggcgccatgaggagcctgtgctgcgccccactcctgctcctcttgctgctgccgccgctgctgctcacgccccgcgctggggacgccgccgtgatcaccggggtaagcggcccgggcgcacctgtctgcccctgatgcgcgcctgggatgtgcccagggggcttgggacggggaccctgaagggcaggctagaggcaaagggagggtcgccctgggcggggacacctgcccctgtcgccccttggtgcacttgggaaaatacccagatccaaaagcagcagacggctggggacactgggcgcgtcctggaagaaacagtgacaaggatgtcgcccaccacctttattaccaccttctcccgcttacttctccctcatcacccacggcctcactcctcgcatttttcttctgttaggctgaaagaagtttctctctgagtcttctcaagtacttttggaggctctccaacctcgaaccttaaaatttgacggccccttcctgaaatgcaaaggaccaagacgaattccccaagtgcccagagtcttaatcctacagtcaaagagtttgctccccgatgcgtcctccgcagaaaccctttgaaatcgcttggtccagggccatgtgagcgctttgaaaagcaattgtgggagcttccttctgggttccggggctttcccccgcgctcagggtcttgaggtatccccataaaagttttaaatttctaattcctggcaaagcacctccagtgctccagcataatgatggagtaggttgctgtgtagatgtttaaacttagagacgatgttttcatcttttctgtaagtaggaactagttcagttctctcccactctcaacaattttgtgtggatctgaaaaaattgggtttgcagtacaatactaaatagtctagtttacattaacaaggcaaaactgctatcatttcctggttgttcaacttctttactgttttttaagtgaggaattatttcacaccttcattaaattacttcaaata

SEQ ID NO: 1076 - DNA, 6000 bp, Homo sapiens
tgcttgcctttagctcctccaaagcaccagacacctgactgcttttgcctttttttcttgtgggcaacttaactttttcaggggagttcccggctccaccggctacatcaacaacctccctctcttagcaccctctcacctctcatctcgtattttgtctttgtagcaattgtcacaattgtaattacttgtataatgtctggctcctcaactaggaggtaaactccaaaagattaggaatgaagtctattttgtttatctgatcttccattccctggcatgagcatgatagctagttgctactcaatatattgttaaatgaaagagatttttttttcaacgaatgtacactagtcagtgttctaggcacttgatatatactaggtgggatggtggggggaacacagcagaaaaataaaatccctgccatcatgaagcatatattctactggggcaaggatctgcttaaacaagataactgaactgtggggtacattagagaaaaagtctcctcattataagagccaaatgtagggtatgctaaggagagaaaagtagagcaggacagagggacatgggacatcaggttgtgggttggtgtatgaaatttttagattgggccgggtgcagtgcctcacgccaataatcccagcaacttgggaagctgaggccggaggatctcttgagcccaggagctccagaccagcccgggcaacatggtgaaaccctctctctacttaaaaaaaaaaaaaagaaaaaaaaagaaaaattagctgggtgtggtattacatgcctgtagtctcagctacccaggaggctgaggtggaaggattgtctgagttcaggaggttgaggctatagtgagccgtgctgtgatcctgccactgcactccagcctgggtaacagagcaagactctgtctccaaaaaaaaaaaaaaaaaaaaaaagaaaaggaaaggaaaagaaacaaaacacatgcagatgtagattgcgtgaccagggaaaatctcagtgaggaattgacttttgcgtaaagacctgaaggaattgaggcagctgacaatgaatgtgggtatctgcgcaaagagcattccaagccaaggaagcagtaagtgtgaaggctctgaggccctgaaggtagggaactgttttaggaacagccaggaagccggtgtgagtgaagcgaatgaggggaaggaagtcaaaatgtagacttcgaatgtgtcttatgtatctgtggaaacatttatactggacatttcttggccagtgcttctaaccagcatctacactaaaaccacgggtttcaaacaattttttttttctctttgaagcagagtctcactctgttgcccaggcgggagtgcagtggtgtgatctcatctcactacaacctccgcctactgtgctcaagtgatcttcacacctcagcctcccaagtagctgagactacaggagtgcaccaccatgcccggctaatttttgtatttttagtagagacagggcttcaccatgttggccaggctggtctcaaactcttggcctcaagtgaaacatttgcctcggcctctcaatcaaataatttttaaagcagtagaacccttttgtcaaatgaaatatgaaatggaggttcaagggaggaaacagaggagcagggactggctggcaactctcactgttactctcaccccatactggtccaagatgacatcttagaggaaaattagttccccacccagctcagcctctaaaccccactccagaatcacagtacgctctgcctagagccacagcactctggagcacactgtaccagaaatagtcccatttgactcatacaactacaaggagactttcaatagatatttgcctccaacatctgaatgaaattagagcctctaaagttacaaccacatggtgatccttgggtctgataagttcctagagatagttctctactctgaaattgtttttcttaaacacatttttttgattttttggtttttttttttttagacggagtcctgctctgtcgcccaggctggagtgcaatggtgcaatcttggctcactgcaacctccgtctccctggttccaacaattctcctgcctcagcctaccgagtagctgggattacaggcgcccatcaccacgcccggctattttttttttatttttagtagagacagggtttcaccatgttggccaggctggtctcgaactcctgacctcaggtgatccacccactcggcctcccaaactgctgggattacaggtgtgagccaccgtgcctggcccttcttaaacacatttttaaaaactttttcttttttgaaaagataacacaagacaaagatacaaaacgacatactaaaacagtcaacctcctatggataaattacagtgtatttgcaatggaattctacacacttaagcaaacaaaaatgaactattgatgtaggcaacaacgtggatggatatcacaaatatgctgagcgaaaggtgccagccagacacaagagtacagaccatatgacccctgcatatgaccttaaagaacaggcaaaactaatctttggtgacagaagtcggaattgtggttacctaagtgagggatgactcattgggaggataaaatgttttattgttctaatggtggaaagaggggtgtagatgtatgcactaagctgcagtgtgaaaatttgtgtattttattctatgtatagaataataacaaagtctcctttccactactatggctcccagctacctccccggaggccactcttccagtgaggatttcttagtgccccgtttctgtcacgaccttcatgccaggggcagagtcctgggagcatgccagggagacaccagaggccaaggctgctccatggcgcagctgcactgggccatggcttgtgtacgtaccctttggctttctacggcccttttacccctagaacgctatccctctctcttcctcttccttctttcatccctcccctaaggaggcagctgtggcattgaggccttgagaggttgctgacccttgctaaacagtgttgcttctcctggccctcctgggtgcgcctgcctggagaggacactgcgtgctgatcaaacttattgttgacacattcattctctcttttattctctcccttctgatccctggactgatctctaggaatttctgctccctgggtgctcagtctcagtgagcttccctggtggcaagccctgatatgcttcccttccatggggcagtcctgataacaacctattttatatttgcatataaacctggctgagggtctgtcttaactccaatccccccacccccgggccccaactcctagcagcattctaagactccgtccctcccctaacctggggcttcagcacagccgcgtctgtgtcttttatcatctggggtcgtcctcctaccagatctccctgcctgaggacagagggtcctgagtcacgttcaagtcaatttggcaagcgtttttggagcagggcagaaagtgaagggcactaccctgttcctcgacttcaaaaatcgaacgcgggggaaatggtgcacaattcaggcccagttataatagctcctaatacccaatatcttgttttggtccttcgtgaataccaggcatccatcagcgaaccttccatgcctgatttctccgaatattcaaaacaaccctgggaggatgagccccattttggagatgaaggagctgaggcacgaggttttaatgcgggcatgtggtcgccagaatttgaatagcaacttccctaaggaaacgccctatttagactctaggggagaggaggatcccaggaggagtccgccagcagaagctcagagtctggcctgggggcatttagttatgccacgccctttctctactgttccctcccgcgacaggggcctgacagggagtggggcttcgggccagcgtctcggccggacgcagggacttcagaagaggcaaatacaaagctccgcatggcagaggaacagaggggcgcgggggaacgcggtccaaaggtggaccttgtcggcccctgggcactgcaagcctcgaggcgctgcgagcggtgaggctgttgcaagctcccgcggcgcgcgcaaactgcgtggaactacttccccggggcggcttcggggccggggtcccggcaacagcctcacggggcgccgtgcggggcccgaagccagttgccagctcccgggcgcggccacgtgcgccccgccgggcttgcacgctccgccgcgccgggccgcggggccaccgacaggcacgcgcgcccccagcgcgcacacactcccgggcacgcacaccgaccgcccggcccacgtccgccacgccccgccttcccccgcgccccgcctccgccctcgcggcgccggccgccgccctcccattggccgcacggcgcgtgacgcgcggcgccaggccccgcccctcgtcagtcactcggcggaggcggcgctggcggggactagtctcgtccggagactgtgatggatttaaccaggtggggagggagggagggcgcgagcttgggagtggagagggaaggagccggcccactccccgtcgccggcctcgggctgcccctgcgcgccccctccagatccggcccgcggctcccctcccggcccccccagccccacgctcaagtccacaagtccgcccgcttcctgcgcccgccgcggcccttcccggggcgccgccgccaccgcctggtgtgcgaggctatccggcccgggcccggggcttgcagggtgccagtgggggcgcccggttcccttcctcgctctctcttccagtccccggaaagggtgggtgggtggtctcccgagcgaagtttccagcactggattcctgcgaaattacgacggctcacccgcgtctgtgttttgctgtctctcccccgttttcctgctccctgcctcttccctcccttttcccccactctccactcctcggaaggccaaaaagacaagcgaaacctgccgcagacgaagggttttgggattgtagcgtctgcaccttcagaaacagtgctgaagcctttaaatgcagcatctgcgatgtgaggaaaggcacctccaccaggtacttgaagatctgtgttaccttttgttaaaggactttttttttttttttttaagtgagagggtagtgagccttactttctgccctttttccaacttgttgattacggctttttttgtatttgcgggtgggttgtgtgtgtttttgggttgagtgtattaagtgttgggtgaaaagccttgtgttcgctaaatgatttatgggagggaatttttccaggttttcattttatttcaaacggacactggatttatttgacacttgtgtctattggcttattggtattggctggggaagagaggaagcagtactatcgctatggattgtaggacatagatgttttatatttttgccatgtgtagaatggttttaatttgcctgtcccgagttacttttctcttgtctgagaaatttagtgggggtagtaaggctggctgtgcttttcctgtcttgagctgcaaatgtctgttactttcttgcacttgaaaataaatgtcggtatttgataaagtaagtgcattttgtgggagactgagctgtcagttttttttttctttgactagcttatgtggggtggtgatgggggacgattttgtaaaatggtgaaatgagcagtgactgtggaagtttgtgtttaaagctctgtgatgatgaaaagaatgttgaaagaattccttttcattttgatgaaggtcgtaaactgcatgtgatgttaaaacgagttaactactttagatttaacattcataaatacttggataaaatgtcaagactcatgtagtcttttggtcatcttttaatttatgtctgaatttgtttcattggcgttagagtttgaagttaaactgttcttggtgtcatttaatgaacag

SEQ ID NO: 1077 - DNA, 6000 bp, Homo sapiens
ccttttttctctcacttgtttataataccttcattggggattcctaaggttcaaagtcctaggcttagtgagtattcaggtttccgtctagggagtagcacttgcaaatttaacggcaggaggaagcctgagttgataactttccagcccttcccattggcaagcctcagtggctttcacttctttcttgagctgaagaaaggagggaagcccacccaagctgcccttcatggtctgaatctgggccactttaaaggtccttccactacctcccctcctccaaggagtctgcttctcccagcatctaattctttaaggcagacactgacagtcccaggtagacatattcttgtaaactcatcagtggcttccatcgcattcaggataaagacctcactcccaactcactccctaccctgccatatggatctatccagccacctgcctctccagcctcatttctcctctctggcgggactctggccacagctgcttgcctttagctcctccaaagcaccagacacctgactgcttttgcctttttttcttgtgggcaacttaactttttcaggggagttcccggctccaccggctacatcaacaacctccctctcttagcaccctctcacctctcatctcgtattttgtctttgtagcaattgtcacaattgtaattacttgtataatgtctggctcctcaactaggaggtaaactccaaaagattaggaatgaagtctattttgtttatctgatcttccattccctggcatgagcatgatagctagttgctactcaatatattgttaaatgaaagagatttttttttcaacgaatgtacactagtcagtgttctaggcacttgatatatactaggtgggatggtggggggaacacagcagaaaaataaaatccctgccatcatgaagcatatattctactggggcaaggatctgcttaaacaagataactgaactgtggggtacattagagaaaaagtctcctcattataagagccaaatgtagggtatgctaaggagagaaaagtagagcaggacagagggacatgggacatcaggttgtgggttggtgtatgaaatttttagattgggccgggtgcagtgcctcacgccaataatcccagcaacttgggaagctgaggccggaggatctcttgagcccaggagctccagaccagcccgggcaacatggtgaaaccctctctctacttaaaaaaaaaaaaaagaaaaaaaaagaaaaattagctgggtgtggtattacatgcctgtagtctcagctacccaggaggctgaggtggaaggattgtctgagttcaggaggttgaggctatagtgagccgtgctgtgatcctgccactgcactccagcctgggtaacagagcaagactctgtctccaaaaaaaaaaaaaaaaaaaaaaagaaaaggaaaggaaaagaaacaaaacacatgcagatgtagattgcgtgaccagggaaaatctcagtgaggaattgacttttgcgtaaagacctgaaggaattgaggcagctgacaatgaatgtgggtatctgcgcaaagagcattccaagccaaggaagcagtaagtgtgaaggctctgaggccctgaaggtagggaactgttttaggaacagccaggaagccggtgtgagtgaagcgaatgaggggaaggaagtcaaaatgtagacttcgaatgtgtcttatgtatctgtggaaacatttatactggacatttcttggccagtgcttctaaccagcatctacactaaaaccacgggtttcaaacaattttttttttctctttgaagcagagtctcactctgttgcccaggcgggagtgcagtggtgtgatctcatctcactacaacctccgcctactgtgctcaagtgatcttcacacctcagcctcccaagtagctgagactacaggagtgcaccaccatgcccggctaatttttgtatttttagtagagacagggcttcaccatgttggccaggctggtctcaaactcttggcctcaagtgaaacatttgcctcggcctctcaatcaaataatttttaaagcagtagaacccttttgtcaaatgaaatatgaaatggaggttcaagggaggaaacagaggagcagggactggctggcaactctcactgttactctcaccccatactggtccaagatgacatcttagaggaaaattagttccccacccagctcagcctctaaaccccactccagaatcacagtacgctctgcctagagccacagcactctggagcacactgtaccagaaatagtcccatttgactcatacaactacaaggagactttcaatagatatttgcctccaacatctgaatgaaattagagcctctaaagttacaaccacatggtgatccttgggtctgataagttcctagagatagttctctactctgaaattgtttttcttaaacacatttttttgattttttggtttttttttttttagacggagtcctgctctgtcgcccaggctggagtgcaatggtgcaatcttggctcactgcaacctccgtctccctggttccaacaattctcctgcctcagcctaccgagtagctgggattacaggcgcccatcaccacgcccggctattttttttttatttttagtagagacagggtttcaccatgttggccaggctggtctcgaactcctgacctcaggtgatccacccactcggcctcccaaactgctgggattacaggtgtgagccaccgtgcctggcccttcttaaacacatttttaaaaactttttcttttttgaaaagataacacaagacaaagatacaaaacgacatactaaaacagtcaacctcctatggataaattacagtgtatttgcaatggaattctacacacttaagcaaacaaaaatgaactattgatgtaggcaacaacgtggatggatatcacaaatatgctgagcgaaaggtgccagccagacacaagagtacagaccatatgacccctgcatatgaccttaaagaacaggcaaaactaatctttggtgacagaagtcggaattgtggttacctaagtgagggatgactcattgggaggataaaatgttttattgttctaatggtggaaagaggggtgtagatgtatgcactaagctgcagtgtgaaaatttgtgtattttattctatgtatagaataataacaaagtctcctttccactactatggctcccagctacctccccggaggccactcttccagtgaggatttcttagtgccccgtttctgtcacgaccttcatgccaggggcagagtcctgggagcatgccagggagacaccagaggccaaggctgctccatggcgcagctgcactgggccatggcttgtgtacgtaccctttggctttctacggcccttttacccctagaacgctatccctctctcttcctcttccttctttcatccctcccctaaggaggcagctgtggcattgaggccttgagaggttgctgacccttgctaaacagtgttgcttctcctggccctcctgggtgcgcctgcctggagaggacactgcgtgctgatcaaacttattgttgacacattcattctctcttttattctctcccttctgatccctggactgatctctaggaatttctgctccctgggtgctcagtctcagtgagcttccctggtggcaagccctgatatgcttcccttccatggggcagtcctgataacaacctattttatatttgcatataaacctggctgagggtctgtcttaactccaatccccccacccccgggccccaactcctagcagcattctaagactccgtccctcccctaacctggggcttcagcacagccgcgtctgtgtcttttatcatctggggtcgtcctcctaccagatctccctgcctgaggacagagggtcctgagtcacgttcaagtcaatttggcaagcgtttttggagcagggcagaaagtgaagggcactaccctgttcctcgacttcaaaaatcgaacgcgggggaaatggtgcacaattcaggcccagttataatagctcctaatacccaatatcttgttttggtccttcgtgaataccaggcatccatcagcgaaccttccatgcctgatttctccgaatattcaaaacaaccctgggaggatgagccccattttggagatgaaggagctgaggcacgaggttttaatgcgggcatgtggtcgccagaatttgaatagcaacttccctaaggaaacgccctatttagactctaggggagaggaggatcccaggaggagtccgccagcagaagctcagagtctggcctgggggcatttagttatgccacgccctttctctactgttccctcccgcgacaggggcctgacagggagtggggcttcgggccagcgtctcggccggacgcagggacttcagaagaggcaaatacaaagctccgcatggcagaggaacagaggggcgcgggggaacgcggtccaaaggtggaccttgtcggcccctgggcactgcaagcctcgaggcgctgcgagcggtgaggctgttgcaagctcccgcggcgcgcgcaaactgcgtggaactacttccccggggcggcttcggggccggggtcccggcaacagcctcacggggcgccgtgcggggcccgaagccagttgccagctcccgggcgcggccacgtgcgccccgccgggcttgcacgctccgccgcgccgggccgcggggccaccgacaggcacgcgcgcccccagcgcgcacacactcccgggcacgcacaccgaccgcccggcccacgtccgccacgccccgccttcccccgcgccccgcctccgccctcgcggcgccggccgccgccctcccattggccgcacggcgcgtgacgcgcggcgccaggccccgcccctcgtcagtcactcggcggaggcggcgctggcggggactagtctcgtccggagactgtgatggatttaaccaggtggggagggagggagggcgcgagcttgggagtggagagggaaggagccggcccactccccgtcgccggcctcgggctgcccctgcgcgccccctccagatccggcccgcggctcccctcccggcccccccagccccacgctcaagtccacaagtccgcccgcttcctgcgcccgccgcggcccttcccggggcgccgccgccaccgcctggtgtgcgaggctatccggcccgggcccggggcttgcagggtgccagtgggggcgcccggttcccttcctcgctctctcttccagtccccggaaagggtgggtgggtggtctcccgagcgaagtttccagcactggattcctgcgaaattacgacggctcacccgcgtctgtgttttgctgtctctcccccgttttcctgctccctgcctcttccctcccttttcccccactctccactcctcggaaggccaaaaagacaagcgaaacctgccgcagacgaagggttttgggattgtagcgtctgcaccttcagaaacagtgctgaagcctttaaatgcagcatctgcgatgtgaggaaaggcacctccaccaggtacttgaagatctgtgttaccttttgttaaaggactttttttttttttttttaagtgagagggtagtgagccttactttctgccctttttccaacttgttgattacggctttttttgtatttgcgggtgggttgtgtgtgtttttgggttgagtgtattaagtgttgggtgaaaagccttgtgttcgctaaatgatttatgggagggaatttttccaggttttcattttatttcaaacggacactggatttatttgacacttgtgtctattggcttattggtattggctggggaagagaggaagcagtactatcgctatggattgtaggacatagatgttttatatttttgccatgtgtagaatggttttaatttgcctgt

SEQ ID NO: 1078 - DNA, 6000 bp, Homo sapiens
ttgaattgctgactttcgtgatccatcctcctcagcctcccaaagtgctgggattacaggcgtgaggcacggtgcccgacctattatttaccttttcgtggacatgtcctattagattgtaattttttaaagcatagtactcatactttaatttctccacatagtggctctagcacagtgcttttaatgtaatggatacagaagagatcttgtagttcattcaggttcatattgttcactcttctctgaatcacttctaaacttattttaagtatatataaagtgtcaaattatgtgtaaaatacttgttttctaattattttctgtggctcagattcatctctacttcaaaactctcaatctctttaggttagactgccattttcctttcatacttttcaccggtatacttctgttctcatagacagcatccattattaatatttgacaataaagaattttttatgataaatatttaaaaccttagaaatgacatcccagaataaaactatggccctctgacttctaatatttttctcacagtaacacaaagggaaatactggaaggtatggttgtcatttaactacagctaaatgatgctttagagaggccagcagggtaacccaggcagtcaagctgaccagtgggaatcatagtcacacggaggatgaataaacccaatctcataactctgctccacccaactgctgccaagagaagatatgggatcaatgttgccagcttatcatctgatttttaaagataagctgaaaatctagattttttatataaaaggtcctgaatgttaggtatttgcaactaactcaagataaaacaacaatggtgtggaccaaacaaagcacttctaaagtcaagctcagcctatatgctattaatctataacctctgttttagtgtttatgaagtgatttttttctttacaatatactatcaattttaatcttcacaaaaaaaattttgggttgaacattttgcccaccttttactaatggagaactcctctaaagtaatgaagtcaataaatgatgaagtcaggaactcaagccacataatttatctcctcatattatatagcctgtttgtcttacatccacagatcttaacttgtatgtatgtgtatggggagcagtattaggagatgagagacaatcataaatccatccctatgaaaacctgatgaaaattatagaccaatcattgatcctctccacagaaaaatacatatatgaacatacatatcaaatactgtacaatcccaaggggttcacaggtccctgaagactacatagatgcctatagtatatgagattatctgcaagagacaaatgtatgcaaaatatctttagctttacttaatgataaacatgaattcataatcaataaatctgccaaaactattctgaatctatttacatttctaattattctactgttaggattaataaactctactctttattacccattatatcaagcagtgttgtcttttgtcctcacacacttttttaaaagtatataacttccgagtttcaagtggttgagttccagaattaaagaatttgctgattaatctcatattcatactttctgtatgcttctaaatgtcaaacatattctcttccaagttgctatgattccagactaaatagttcatttctcagttctccttggtttggaaaccctaccaccaactttaccatttatttattctctctggatttctttcatctatgcaattttttcaggtttacaatggaattacttattatattgcatgaagagtagaaaaccattttctactttgtatttaataccttttctgccaatgtttatcgcttttctgattattttaactgtaacatcacataatgccaatattttcataagaatccacaattattatcatcagtttattttccgggatttgaatgaattcaaccaactccaaaacccacactgctcattagctcatcatttaaggacacaaaaaagtggtgtcatttacaaacttaggatttcacaattcattgccttatctggatataaatagtaaaactagtactactcccaattcaaaattgattctagtaggtcctgttattgaaactcttctacccggtaaagcacctgttgctaagcattcagcttatcgttgatagaacatcccatgcccttcctaccacatgccagactatctttttgatagtttttattgctaaactctgataaatgctgtttcaaagtctgactaaattacattcattagcacccctcgtacacatatgaatataactcttcaacattaatggtgactactatttattctctaccctgtggcaaatattgttccaggttgtttatgctatcttatttaatccttacacaaaccatgaaatgtaaatattactattatcttttagccataagaaaactgaggttgagagcttagagaatgttcccaaagtcacattatatatataggtggtggagaccaggattcacatccgggtttgcctgaagtcttatatcagacaggcagaattgctcctgtaaataaaggcagaatattactttctctccaatgacattggcttgagggttggttataaattaggtcccccttatctgcatgaacatcagcttcatactattctacaattttcaaacctcactctgagttcttaagagtgaggattacattggaaatgaacctgtcctcaagaataataaacagttttatttaaataaatctaaaatgattctgtgccattaccacacctgcttcaacaacaacaataaaagaaaataaggactgaaaacttttctaatagttctgtcttccacaggactaagtgtgtattcaaacatgtatgtttgtttatttattattgtcattattgttgttttgcttatttttgtttattttcattctggtagctggatcatctgatcctctgactttcaagatactggcattttcagaacctttataaatgaaaggctgtgaaggacctgcaagattattttcaaaggcaattttttattcatttaaattgggatttgtgccctacataagagaatatatacccaaatcatatagaaatatattcttaagcaaatttttataatcttaagcccttgtaacttgaaaaattaatattaagactattgcatacctgagaaggaagagaaaaggagagagtagatactatttgagaaaaaggcatggaaaaaccagataaagacgcatatcacacttccggaaaatgggactgaagagagagaaactgcagagccagcacagcaccatctcatcgtggggagctctggatgagaaagtatatgataaagaagaataaacaagggacactgttgaagagtttctgttcacaaatatctcacccatttattctaccaattggatgttaattttgctttaaaaaaacccttttagtaaatatattcttgcagggttaaaaccagtggttcttcatacctttactttgagtaactataactaaattgtctacaacttaaataaacttttgggagaatgtatgctttaattagttgttttgattgaaccatggaacatttcagagtaaaaaccataaaggtctctaaacaacccgagaacagaatgactgagaaaggcggaatgatgagatattaaggaagggcaaggctggggaaaggaagtgaaaaaatacttacagttttaccacagaaaaatgagaagttataattcagtgatcttgaagtttccttcccgctctacaattctatgacagttgttatgcaaaaaacgaatgtcttacacataaaaacttatatgctatattttccttcctggaatctatatcatccaactgctaaagcaaaagagctcctttttctactccaacaacataaaagagaataatttattaaaactagttccagaggacataaagaaaaccaaagggtagaaatcatagggaggtaagcatcttccaaataaagaaattaataacacaccctcgaatactttgataatcagtatttgataactgagtgaaatctggggtccaaagagatatacagatcattgggatggttgagaatttctccctttgcaaagaacacaccaaataagaaccctcatctgccagaggtgagaaaaagtgatgaaaagagagaatattgccccaccagcctcaaggcattcaagttccccggcattcggtccttagtcccttcccatttgtcaccttattattttcctgtccacccctgcatcatccacctgtcacgtctgtctccacagtcacctctacagacttttttcacactttcccttcctgtctgctggtctcaacgctctctgtccagggtttacccacatttgctctactccgattccttccaccgaccccctaagactccgagcaggttagaggatcgcgctgcctcccccctccccgccccgtagtctccaacagtgtaaggggtactgtgggaacaaaacccagaggggtttgtgcctcttcacccccatcccgggaggctccccctctatccccggatggtcctcactcacagcgcacagtgtggaaggcgcagcgcggctgcttctcgaaactctcccctaacttgagaacccgctcgcgacggtctaggtgtgagaatcccgctgcgctattcataattactctcctgctttgactttaactccgccaccagcgctcactatctgccacctcagcctgaagcagctgcacttgatcccgccagccaagtcacccagactccaccccgcgctcgacgcgcaccgccccaccggagcgtctcacgttctgattggcttattagcaaagggcgctccgccccttgactccgaggctcctagtcccgcctccaggccccttcccgcgtcgcgacgcacgctgccccggaaggccgcggcgctgtagtgcggcgtgggagccccaggttctttagtggaagaacgcgaagcgaggatgaggtaacttatctgaggtggtggctggggagggagagggccccagggcgcctaccaggaggccaggaccccaggctcctggacgaagtcagccggcttgtaagagctcttaacgggagaatcggcctgccctcacgcccactctgtagagatctggtgtggaaactgaggcctggggaggtgcagtgtccaggcacagggcctagtgtcttatccaaggcctggtagcgcgaaagccgggtctagaatctggagtaaaggagcccagaggccccagaatctcggtccttagacttgaagcgacgctgttacctcagtaatcgttttctgacctttttgtaccagaggaagtttcttgtggtcctaggactggagaaggggatgtgtagtggggaggagaaagaggattcggagatagcaactgcagacatttaggatcagccgcaacaggatcgcactgaatttccttttcatttattttcctcacagtgatccgtggaggcagtaacaggcgcggcgagggagaagtgattcccgaagaatcaaggctgggccggacccggtggcctggcaacagggtagtagccttaaaatagataaataattgtctttttgtgtcaaatttcatgaatttaatgtaaagatgggagaagtgttgaattataggagaaacactcgagaaagtttacagatggtttccataacaggtggtttttcagggtaattacgcaatccaactgcactccctcaccttctgccttaggcacatttgtcaattgattttggggtaggtggttatgtctccttcaacctgtctgtgtaaatcctaccctttgaaggtgtgccgaagctgtttcatatcgtagttaaatgctttaaggcagatggtggctctagtttgaacccctgctttatacttaacagtgtgactttgtgccagctaattacattctccagagtttaagtatgctcattg

SEQ ID NO: 1079 - DNA, 6000 bp, Homo sapiens
aatagtatattgaataaaatcaattctcctaacattaaaaaacaaggtccacatcctaatttgttgctaaaactttctctatgtaaaaaaagtttaaggctgaagaatcgcttgagaattggtgttcaagactagcctggtcaacaaagcaagaccctgtctctaaaaaaaaaaagttttaaagcatttgaagctcaaagatatccttatataataaaagcgtatttccttatttatagtaaagctaacatgtatcaactgtttaatataagctaagcactatgttaatatactatacactgtcttgtgtaatcctcacaacagggctatgaagtagatagagcgtgtgatcatttccatacatacatatatacatatacatatatatgtttttgtccacagtttctggctcataactcccatagcctttgttacagtcttgttatgttagggtgctttaggcctcagaaaacagaatctatttctgacttcctcctctcctcctttcacctgctccttctctccaaagcagaactctaatcatccctgcctttctctgacctatcttgtctagctgtaggtcataagacccctgtttcagaatgggtcttgccctatatcctggaaggaatgctgaacagagaagccaagaagaatctgagcagacaggccttgctgggtttccccactcagtctgttagtatcagatcatatcttttttgtccaatcacatttccaaaatgattgtccatgcttcagtcatgcctatccattgaaatctccataaaaggctcaagaggatggggtacaaagagctactggatagctgaacatgtggaagttcctggaggaatttcctggatatcacaggcagggaggacatggaagctctgtgccccttcccatacttcacagtatgcatctcttcatttgtatcctagtatttttttttggagacaggatctcactcctgttgcccaggctggaggacaatggtacaattatggctcactgcagcctagacttctcaggttcaggtgattctcccacctcagcctcccaagtagctgggactacacttgcaagccatgacgctcggctaattttttgtatttttagtagagacagggtttctccatgttgcccagggtctctgtaatatctttataataaactggaaaacatgtttccctcagttttgttagctcctctagcaaattaatacaccccaaggtgtgtattaataggattcctcatgtgtagctggtcagtcagaagcacaggtaaaacaacttagggcttggattggcatcagaaatgggggtccctcttgcaggactaagccctaaacctaagggatctgaccctatctccaagtagacagtgtcagaattgaattagatgatacccagctggtgtccgctgcagaattgattgcttgcttgttggtggaagaaaactccacacatttggtcacagaagtcttttgtgttgattgtcatgatgtgagagcaaaaactgtttttccattcatatatctcttattaggtacaatataaatcattaaaagacaggtttgctgaaaataccttaaagaaagcccagtgcaactcccggcacatagtagtcacaaaactttcaaagagagtgcatatagttatctcattctctccaaatggctgcattatgctacatttccttttaagaatgcagcaaaatatatttaaacatcacctctactggaggtcactcaagctgtatgctattacaagcaacactgcaatgaatatacacatgatcctttacatttttgccaatctgttagatgaaaattggtatgattgtgttttaatttgtatttctttgattattagggatgtcaggcacatttcgtgttcactggccattatttcttttatgtattttctattcatatcccttgactatatttctatcggtttgtcttattcttttgcagaagcttttcatacatggataggaatcttttctcttttatattggctgtaaaattttctccttgtcatttatttttttaaatttgactatggggtctttaccataattttacaatttttttttttttttttgagagagagtctgactctgtttaccctggctgcagtgcagtggtgcaatctcagctcactgcatcctccacctcctgggttcaagtgatttcatgcctcagcctcccaagtagctgggattacaggcgtgtgccaacgtgcccagctaatttttgtatttttagtagagatggggtttcaccatgttggccaggctggtcttgaactcatgacctcaagtggtctgcccacttcggcctcccaaagtgctgggattacaggcatgagccacagcgcccagccatttttacaatttttacatatgaaatataacaatcttttcctctatggcatctgtcttttgtgtcctgtttagaaaggtcctctctaacccaagagataaaaaacattctccaaatcttcatgtttttttggttttgttttccttacatatcttctaaagtaaggtatttttgtgaatggtgtcatataagaatctaatttttaatgttaaagttattgatggattaaaaaatgcacacagtagtcataaattcataaggtaactagttatgaatagacataacagaaacaatctgaaacgtcacattttcatgcactatgtatacatacacatacacagggtatctttttggactctacttagtttctagtaatttaatctgtttgtctattcttgagctagtacaacatagttcattttaatatatgtttggagaaaattcacctcagaaggtaagcttcatgagggcaacctacctatcccttagagatgattaaatgagttaatacatgaaagcaattggaacaattcctggcacatagtaagagctctccaaatggttattattaaagcccagttctaccatcatactacattttaagaccatctttgctggctgccttcttatatctttggttcacaactgtattcccagtggctagactagtacctggcacgtactaggatttgctaaatacaggttgaaagtatgagtaaatgcacaaacctcaggcattctgagcctcaatttcttgactttctgtttttctcttgttacaatagagaaagctcagatttatagttggaagcctctctaacgtaaaataggctcaaaacagtttgtgccctcctggctaccgtaataaaacatcactaaatcattattgtcatcaacaaatatgtgcagagcagtatggtagatgcaggggatgcaaagattctacacaagacatactctctgctattgttctggttgggaaagaaaagtatgtttatgtacatgtgtacacacacacagatacaaaaaaatatacttaagaatatcagatatatgttaaatgctaaatagatgacacagataagaatacaggccataaagtcagaggactgggcttctctgaaccatttttcttgctgtaaacaaaatagcaattcctacctcctagaatgattctatttagaagagaaggcagccaccaagatggtcttaaaatgtagtataagtgtagagctgggccttaaataaccatttggagacctcttatcatgctccaggaattgttctaattgctttcatgtattaactcatttaatcattccaacaactctaaggaacagatactattatttttttcccaatttgaacaatgagcatacttaaactctggagaatgtaattagctggcacaaagtcacactgttaagtataaagcaggggttcaaactagagccaccatctgccttaaagcatttaactacgatatgaaacagcttcggcacaccttcaaagggtaggatttacacagacaggttgaaggagacataaccacctaccccaaaatcaattgacaaatgtgcctaaggcagaaggtgagggagtgcagttggattgcgtaattaccctgaaaaaccacctgttatggaaaccatctgtaaactttctcgagtgtttctcctataattcaacacttctcccatctttacattaaattcatgaaatttgacacaaaaagacaattatttatctattttaaggctactaccctgttgccaggccaccgggtccggcccagccttgattcttcgggaatcacttctccctcgccgcgcctgttactgcctccacggatcactgtgaggaaaataaatgaaaaggaaattcagtgcgatcctgttgcggctgatcctaaatgtctgcagttgctatctccgaatcctctttctcctccccactacacatccccttctccagtcctaggaccacaagaaacttcctctggtacaaaaaggtcagaaaacgattactgaggtaacagcgtcgcttcaagtctaaggaccgagattctggggcctctgggctcctttactccagattctagacccggctttcgcgctaccaggccttggataagacactaggccctgtgcctggacactgcacctccccaggcctcagtttccacaccagatctctacagagtgggcgtgagggcaggccgattctcccgttaagagctcttacaagccggctgacttcgtccaggagcctggggtcctggcctcctggtaggcgccctggggccctctccctccccagccaccacctcagataagttacctcatcctcgcttcgcgttcttccactaaagaacctggggctcccacgccgcactacagcgccgcggccttccggggcagcgtgcgtcgcgacgcgggaaggggcctggaggcgggactaggagcctcggagtcaaggggcggagcgccctttgctaataagccaatcagaacgtgagacgctccggtggggcggtgcgcgtcgagcgcggggtggagtctgggtgacttggctggcgggatcaagtgcagctgcttcaggctgaggtggcagatagtgagcgctggtggcggagttaaagtcaaagcaggagagtaattatgaatagcgcagcgggattctcacacctagaccgtcgcgagcgggttctcaagttaggggagagtttcgagaagcagccgcgctgcgccttccacactgtgcgctgtgagtgaggaccatccggggatagagggggagcctcccgggatgggggtgaagaggcacaaacccctctgggttttgttcccacagtaccccttacactgttggagactacggggcggggaggggggaggcagcgcgatcctctaacctgctcggagtcttagggggtcggtggaaggaatcggagtagagcaaatgtgggtaaaccctggacagagagcgttgagaccagcagacaggaagggaaagtgtgaaaaaagtctgtagaggtgactgtggagacagacgtgacaggtggatgatgcaggggtggacaggaaaataataaggtgacaaatgggaagggactaaggaccgaatgccggggaacttgaatgccttgaggctggtggggcaatattctctcttttcatcactttttctcacctctggcagatgagggttcttatttggtgtgttctttgcaaagggagaaattctcaaccatcccaatgatctgtatatctctttggaccccagatttcactcagttatcaaatactgattatcaaagtattcgagggtgtgttattaatttctttatttggaagatgcttacctccctatgatttctaccctttggttttctttatgtcctctggaactagttttaataaattattctcttttatgttgttggagtagaaaaaggagctcttttgctttagcagttggatgatatagattccaggaaggaaaatatagcatataagtttttatgtgtaagacattcgttttttgcataacaactgtcatagaattgtagagcgggaaggaaacttcaagatcactgaattataacttct

SEQ ID NO: 1080 - DNA, 6000 bp, Homo sapiens
gattttacaggctcataggcggaagggactgccttgtctcagatgagactttggactagacttttgggttaatgctgaaattaattaagactttggggaactgttgggaaggcataattgactttgaaatgtgaggacataagatttggaggtgccaggggtggaatgatatggtttatctgtgtccccgttcacctctcaactgaatcgtgtctcccagaattttgatgtgttgtgggaaggacctaaggggaggtaattgaatcatggaggctggtctttcccatgctattctcatgatagtgaataagtctcacaagatctgatgggtttatcaggggtttctgcttttgcttcttcctcattttctcttgttgccaccatgtaagtgccctttcacctctcgccatgattctgaggcctccccagccatatggaactgtaagtgcaattaaacctctttttgttcccagtttcgagtatgtctttatcagcagcgtgaaaatgaactaatatactacctcagatgtcctgggcttgtaggataggtaggtggaaaatgcagcccaaactggtatgttcctcaattccaggtaccccagaaactatgcccagagaggagacagtggcacagaacaagccaatggaggaatcgtggactgctttccctattctgggcagagttgggtgtacctcatgggcaggccagactctgctgtactctgaaacccctgggcagaggggttcccaaggcctctaagagtaggcccggatttttcttcaagcacaatcaatacttttctagtaacaggctctgttaacataaacttttccaatcccacaggcctggctccccatcttggccctgcaacttctgaagggctttgggtctttttgtaaaaggaggtaaacagaatcattgggctgttgtgagaactagaggtaatggcatataagtcacataacaagcatttaataaattacaccttattggtcttgtaaaagatatccagattcttcaagtttttaagaaaatatccttcattcaataatgtctttgagctgctccccaaccagggtttcctggttctagcccagcaactcaggattgtttctcagaagaaataaagactgagaaatcagctagctgtttctcgtctctgggaatttccactctggagccttttacctttacccccaattcattatttcaacaatcatttattgcaaactctctgttcaaaacactgctgcagcagctggggttggtggttcatgtctataatcccagcaacttgggaggctgaagcaggaggattgcttgagaccagaagtttgaggctgcagtgagttatgatcatgccactgcactccagcctgggtgacagaatgaaactctgtcttaaaaaaaaagacaaaaaacaaacaaacaacactgctgtagaagaaaatataaatatgaagtctttgtcttcaggaagctttcagtaaagggtagcaaacaagaaagcagtgctcactaggtagaatccttgtatcataattcgcttggtaatcagcctttatcactttgcagactggttaacctcatcagtaggttgttccctactgtctcttaactactttctctcacatatttgcttagcacctaaaaactgcatctatcctacaaaccccaaagatgaaacagtccttctttacattaacataaagatgcagaaagaaattacacaataggacctagatgtccctatcttaagtccattttggctgctgtaacaaaatgctgtaacaaaatacttgaaaaggccaggtgtggtggctcacgcctgtaatcccagcactttgagaggccaaggtgggtgcatcgcctgaggtcaggagttcgagaccagcctggccaacatggcaaaaccccatctctattaaaaatataaaaataagctgggtgtggtggcgtgcgcctgtagtcccagctactcaggaggctgaggcagaagaattgcttgaacctgggaggcggaggttgcagtgagccaagatcatgccagtgcactccagcttgggcgacagagtgagactctgtctcaaacaacaacaacaacgataaaaatactcaaaaaagaagaagaagaaaggaagaggaagaagaagaagaaagaagcaagaaggaggaaggaggaggagcaggagaaaggctaggttcagttgctcatgcctgtaatcccagcactttggaaggccaaggttggagaattgcttgagcccaggaatttgagaccagcctgggcaacatagtgggaccctgtgtctataaaaaaattttaaaatattagccgggtgtggtggcatgtagccatagtcccagctcctttagaggctgaggtagcaggatcgcttgagcccaggacatggatcatggctgcagtgagctgtgatcatgccactgcactccagcctggaataaaaccctgtctcaaaaaaaaaaaaaaaaaaaaacaacaaaaatacaacaacttagactgggtaatttataaacagtagaattgtattgctcacagttctggaggctgggatatccaagatcaaggctccagcagagtcacagtctgctaagggcttgttctctgcttcaaacatggtgccttctcagagcatccacacatggcagaaggatcaaacaggctccctcaagcctctttcacaagggcaccaatttcccccacaaaggatccatcctgttaatatgaatgtgttgggtcttaggtttcaacatatgaattttggggagataccagcatccaaaccatagcagcccccaaatatgctgggccctcaaaaccctccaaaatcccttcacttatctctattctatgactgggcctactctccacagggaccattcactgctcctcacatggcccactcaacaacttttctcgctctctgtaggcaacactgtctcctccttaaattgaaaatcaaggccacctaagacactacccaggcctgctcttcattcattcattcatttaataaatatttaccagagctaacatgggcctgcacggtacagatgtgagacatacaagaatgagagccaagcggccatggtctctgccttcatggatctcagtctactgttaagttacacattaagcaaaaattacacaaattattgcacaccctgaaaggggctaggaagaagaatccctggtgctgcaatttttgtgttttttttgtttttgtttttgagacgaagtatcactctgtggctcaggctgcagtacagtgaggcgatctcagttcgctgcaactgccacctcccaaggtcaagtgattctcctgcctcagcctcctgagtagctgggattacagacgcatgccaccacgcccggctaatttttgtatttttagtagagctagggtttcaccacgttggccaggctggtctcaaacttctgacctcaggcaatccgcacctggcctcccagagtgctgggattacaggtgtaagccactgtgcccggctgtttttttttttttttttttttgagacagagtcttgctcttcgcccaggctggagtgcagtggctcaatctcagctcactccaacctccacctcccaggttgaagcgattctcctgcctcagcctcccaagtagttgggactacaggcatgcaccaccacgcccctctaagttttatattttcagtagtgacggggttttgccatgcctgcctcagcatcccaaagtgctgggattacaggcgtgagccactgagcccggctgtttctttttgtgtgtgttttttttaatgaaacagggtctcgctctgttgcccaggctggagtgtagtggtgcaatcacagctctctgcagcctctacctcccttcagggcccaagcaattctcccacctcagcgtcccaagtagctaggattacaggcctgagccgctaattattttcttttcttctttctcattctctctctctctttttttttttttttaccatgttgcccaggctggtcttgaactcctggactcaagagatccgccactctgcctcccaaaatgccgtgattacaggtatgagccaccacacccagcaatgctgcaagtcttatgggccaggatagtgtaatctaagaaatgatatatgaagaactctcacaatagggaagaggtgaggagtgtccaggcagagagaagagcatttgcagaggccctgggcgagaagaaacctgcatcctttaaggacctaaatgaagccaagcaggcagaggctagatcacacatgggggcttcatgcccaccttaagtagtttgggtctttaaaaaaggaatgagactcataaagaggttttaaggagcgaatgctattgctgccatgaacagatattccttccccatagctgcagagcaggcacagggctgtttttgcccgccagtatgtccccaccgtctagcccagagcggggccagcggccggctcctacccacacttgctggcaggaagactggacgcactgcgggacatggtgatgtcctgggttggggctgaggaaggcctatgcgcggagggtgcggccttcggctaaggcagaggaccagggttgggtccgtggcggcgggaggggtggcctcctgcgctggtcgccccaggggacctgagaggcgcgacaaacagtcggcgcgtttggtactcgcgcctgcagagctttcaacctccgcgccggctgcgcctgtttctcggccaggggagcaaggccacgcggcctacgcagccgagtcggaaccaaccggttgtttggtgaaacctaccccagagcctcccgcggcccacagagcacaggtgaggcagcagaccgggtggggtcggtgtcgcgcctgcgcccgcccggacgcctcgggcccgcccgctccgcaccctggaaacccctgcactcagccccccggcgtccccacgctctcggccctgctgcgccggcggcggccatctctgggcggcggcggcgggcggtgtttgcgcggtcggtgagacccgcgcgggtgagacgctgggtgagttccggacgcttccagccggcccgccggtgatcccagacctcggggcgggacgcggctcccgctcaccgccggcaaaggtggaggtgcggcggggcgcggggcgcggggccagcccggggcggtgcgggggcgtccctgcctagcgaggccctgccccgcgacctgccgcaccctcctccggcctgttcgcgacctctaaagataatacttctcactgtcgaaaacgtggaacagaaagcaaggaagcaagcaaagcagccgtgccgctgctccccagagacaagctgcgttaacatgagggtgtatattcttccagatggtttttccttgtaacatgagcggggcttgtttttgcagaacctgcatcataaagtgctgaaactctctctctctctctctctctctctctctctctctctctctcgactctctctctctcgactctctctctctctctctcgactctctctctctctctctctctctctcgactgtacattcctgtgtgtcaggttgactacctcatccatccctgactcttggcatggctttggactgtgatttactaaatgtagtttctccctgatggtgagcgtacaagtggttttcagtttttagttattgcaaaaagtaattcattgagcatcgttgtatctgggtttttgagcgtgatcatttctgtagaaagaatcgcacaagattcgttctaaaacaagatagaatccacggtctataccacaaggcttctggtatagattgtgaaatggccctcagaaaagttattctcctttttgtacctccagtaagtagcatttgggaatacttggctcgaggagcttcctgagtgattttactggagacccccctcacttcataaggggccggcccggagatgaagatgtcaacacttgagtgtgacttgca

SEQ ID NO: 1081 - DNA, 6000 bp, Homo sapiens
tgcattgtgtgtctgcttgtgcatatacaggaatttctggagagtctattaatggtacttgggtttttattgtattcctgtttcactgtttttatcatttgtgagctgtcaatttttaaaaacttaaaattgttcaataaattatgatgagcttgttaaacatctgtaacagcgccctttgcttgctgtgtgacctggtgccaaaagtgtagaagaagcacagtaaatgctgtgatttcctgggaggacatgaatatgtggtggcaaagagtggccagtgagaacagaaagatgagtacattttttctaagcacagagggcaatccagctgaagaaggtaggggaagttctatccaatttcagagatgttaacatgtgaggaaaagaccatccatggtacacttggatgactgtgcagaccagtctcacgaggatcctgcagaggggtgccggggatggccttgacaggtaggttggggccatattgtggtgggacttaaatgaacaatcaggacatttagattttgttctgatgataatgtggagctttggaacattttgagcaggagagtgtcaggaggtaggaaaattaaccaggcatgttagattgaatggcagttagactggggaggaaaggcagggaagaagtcaatacactgtaatccagaagcagggtgatgaggttaagctccacaataggaaatggaaagtttggttgattctagaaatttctaaagaaagaatgaacagataattacgtatgaagggcgaggaagggaaagagtcaacagtgaccgtggtttcagaccaggacagttatacctacgagagaattacatctcaggcagagaaagggaattgttgaaagaaagctaaattttgcaagaaaggaaatgaactccctttcacctgtcaagtttgaagcaacaatgagccattcaagccgatgtcaccaatatctaatagaaaaaactcagcaaatttcaaaaaagagacaaaagcatacacacagtgctatactcatccgcacctgcagctcaagaagattcaatgtggagcaattttagacaaatggattaaaatcaatccccaaaactctactttctcaggaaagtcaccaggtttctaaagaaggcatcatgagatttaggcatgggtttttctatttcatttttcatctattctgaaatattctacatcacttctttttttacatccgaaattgatttacgtcacacaattgatgattgatgtctacaattaatgaaatataatgttgggaggatttaaggaattctccaacaaaggctgattgccttggtcacatgtacgctttcagtatggggtgtgtgtgtgtgtgtgtgtgtgttgggggagtggggtggcaggactaatgatttccggccatagcaccttcacctaagaccaagagaggcaaatgaactggagggttccatgtgaccaaagaagaccagaaaatgctcagggacctatggacataaacacaattatttccaagaaaaaagatgagccataactcttgtctgacaagtgtgatggagagcagacttgcttagaaggacattcccaggaggaggcagcttatacatttcgggctagctttgatctctagcctctaggaacaattttcttgctttgtcattatggttccaaacattggtccttttggggaaactactccagctcaacaagcaaatgtcatcaggtttgtttttgtttttatttctttccctagtacaggaaagaagtccagaatatgccactatagcataaggattattttgagctaaaggcatttgagaatcagtggatgcaggaagagttgttttattttattttaattttttccctgaacttacttgcctctcaaaagaattcaactgtcttaaattccttcccagcaatttcaaaaccagggaagattgaccctatctttagaaacaggaagttggtactgggataataaatcacctaatagactttgtcacaaaactatcatatctcccatctattctcccaaaggcctgtttatcttttctgaaagttttttcccagaagtgccctttctccttctccctttcctttatttagacagtatataagccccaaattctaattgctccttgagtcataattttctgtgaactctgactgcttcagtgaataaaaatctatcttttctcctgctaagctgtgttttgttggtttaatttgcaatcccccgaatactgaacctaagagggtagagtgaaagttttacctccctggcaacaggaaaacttattttgttaaagatgaatggcatagaagggggaaatgatggttggagtgaggaccaaagaaataacaaaaatgtccacttgtactgagacaagtttttcctaaatatttattagttagtcctcaaatattttgcttaagagaagtcctcaaaatgaaagaaactacgtcttcaatgtactgagcagaaggaaaggagactgtgcagctgaggaagccaggcctgaaaaataagtgtgggttgtgtcaccacacaccaaggactggtgagaggaacaatgcacagtggtggagtgggaactgagcaggccatgagaaggacagatatttgttttgctgcattcaaggccacctatagttcctgccctttgggtgctcatgatggcagacaagccctcatgaaggtgaaccaaaggaaggtaatcacaggggacccgttggccccaccacgcctgaacagctgctgcagcctgaactttctgcctcactcctgctttcctttctccccatgcatgcttgcttgttgcactgaactctggcgcatcactcattcctgttctttttgtcaggagaaaaagttctcctgacatgcagtgtgtcaaaactgtactcatctcctccacctgccttcccacttcccgcccctatgctccctcctggcttctattttaaatttcattgcagcagacacctctctccagatttcatgcctcagcaagggcacataccattcctccagcgaaaccattcttttccttttcaccatttcatccttttgactttcaaacttctcaccaactgggtgcgttttatcctcctctggtgccagccttccttctttgttagatacctagcatttacagccatctctaggcagatgtgtggtcgttcagtaagaagagaacacatgttttgtgtgctcactccaatgggtgtctggcttataaagtaggtgtggtccaattcctgtctgctgccaccattgtgccctgctctggccaacagctcagagaggtttgctctctccactggccctgaagacctcccatgttcccccagttcaaacttcacctctctcatgaggctttccctcactgcatcctctacctctctcatgaggctttccctcactgcatcctctactctctcatgaggctttccctcactgcatcctctacctctctcatgaggctttccctcactgcatcctgtaccctcacagcccttaacacaccactcaacaaatacgcatttgcatctaaccaaatgtgaccctgtgtccatatttatgtttctgtatattaatgcattcttgtttcccctgccaggctccattagtctggttagcttttgcccaggtatcaggaaatgaggggatggggagaggctcagaatccaaacttgacagagtagctgtccaccactaggtgatggtggggtcaggcatctccttaggctggctgtgcttctgttttcttttcaatggagataccggctttcttggaaacacatgtgatggtgggctagccgtagaagcactactataataacgatgtgatctttgtcatttcacttcttcagacctcattagtcctacatataaaaagaggaagttaaactagctcaaatgtactgagcagaaggaatggagactgtgcagctgagggagcggggcctgaaaaataagtgtgggttgtgtcgccacacaccgggactcctgggatcccgacctcttttagcggtcaaaagagggcaaactagttgcctaacaatatttagagctatttctctcttttcactctcattctacgagtgtacaccggagtttctagcaactacatggtatgtgaagtcatccctctaatgataacctgtaatgaggttactactgtgatttttaatgaatacattttaaaatgttttaatttcttcaaaagcaaacattaatctctacatatgtgtgtatacatatacaggaaatgtatgtatatatgaatatacatatattcattgtatatgtgtatatatattcatacataatatgtgtgtgtgtatatatatatatatttacacatttcctacataaataaaagttctttaaggtcctaataatttttaagtgaaaaggagtcctgggaccaaaaagttttgagaatcactgaaccagatttctagatctttaagatcatttattcactcaacaaataattgtgcctcctgtggccaggcattttgcagatacggaggataatgtggtgatagcaacatgtttcctgctctgatagagttttacatttgggagggaagagacaaacgaataaattaacaagataatttctgagagcagtaggtttaatgaagccgtaaagcaggacacatatccctgcacaatctgtgcgcctgctcagacgtaacaccccgcagcgcagcaggcagattcagcggcgtcgccccataagggcccgagccctctcagttggcctaggacggcgagggcggggcctgcccgcccccctggcgctggcgtcaggtgacgtcactgtgccgcgccagccaatcgtgggcagccggggtctaggcaccacggtggctggcggcctgcgggcggcgctgtggcccgtcgggcggctccacagagccgccctagccttccgccttccccaagccaacgtctccgccgtcggctccgcggcgccgccatggccgacgtggaagacggagaggaaacctgcgccctggcctctcactccgggagctcaggctccaagtcgggaggcgacaagatgttctccctcaagaagtggaacgcggtggccatgtggagctgggacgtggagtgcgatacgtgcgccatctgcagggtccaggtgatgggtaagcgctgcacgcgagtccagggccgccctgcggcctccgggagccgacctcggggttgggaagggacgggcgtccgtcagaagcctcggaaagtgccctgcctgggagagtgggtggaggtcgccctgccccggcgccggaggaacgcggagccacgctcctgctgcggctcctgagggctgcggccgccgcctggggctgcggggttgtgcaacaggcgccctgcgccgggtggttggtgttctagggagagagacgggcaataaacggagttaaacaaggtaatttcaggtagtgatgggtgtgaccaagaaagtaaaaccgggtgattgttgggaactagcaggaaacacttcggtttgtgtgtccagccccagccccacctctaaaagctcaacacaaggtggtcagggtaaaggccgtgattcagcagtgaactttaatagtcttggtcaccaccaaagtgatgctccagagtcatcttccacaaaacgacacccttagttctcctcgagggacgcaggaaagtgttcatagccattgcatttccggattagcttaccgccgctcttcgaatggcttttaaatctggattgatttaagacgggtcagatagcactagcgtggcttgaagggaacagtgtggttcaagaatatctaagtttcatggaagctgaagaattgtaagcccttttttcagaaacgtaaaacttcacctccatcacacccccctctccatattggatgccatttcctggagaagatactgtgctgctctgagtcatgcctttgtggagaaccctcttacaaatatgtcttctt

SEQ ID NO: 1082 - DNA, 6000 bp, Homo sapiens
gtttctaggtcaaatgcaaaaaacaactaatgaccaactccacacatgcttaaacaaaatcagtctattttttttttggaagaaataattagaaaaacagaagagcaaattcagtttttatagaatgaaatatggtttctacagataagcttcaacaaaggtataactccagggccttgaggttaaatggtggttgagccctgggtttttctgtctgtgaaattaagaccttaagtgccaccagttgcagactcctttaccctcgcctatatatcctatctctgagatgaatttagaaatgctggcactcaaatctgtaatgtatttgcagcgcacacagtgtgaatccaattgtgctcaatcaacacttttgcaaaggcaaactagcataaagacattctcagaaggactaatgtgtaagcaatcattctgtgaggtcagctgactctgtctatcaaagcgcaaactgtctcaatgtgtgcattacagaagtattgtccaatgtccaatggttctaattcagtaactggttactcaatttctttatgctgaatatgacataaagtgctcaggactaacaggagatagaaaagaagtacatggtctctaagagttaataacgtagttacttaaaacacaccttccaaattttaaagactaaattcttacaggtttaagatttaaaaaaaaaaaaaaaaaagaaacaacaaaaaaatctctcccttatttgtgtacgttaattctgatcccaaaagcagtgtttaacctttggaatttgcttaattaaataaatgggctcttgctcatcttagtgtctggttcaagtacctttattattttaaaggggcaaaacatcagtttaggtatttactttttgatattttgtccaaataatgtttcacttagaagttagtgtatacaggtaggatttttatggttaataatccatgaatattcaaaatctaatgaataccagtttgattccagttaaaatggcaattgactggaatcagactggtattcattagattttgaatatttatgggttataaaagcataaaaaaggaaggttaatcatccaaaatttattccagtaaaaattgccattttaactggaatcagactggtattcattggattttgaatattcaattttacttagaaaagtaatgtatcccagtatgaatacaggcctctacaaattaatgactgggggagaaaaggtcatggaatcatggattataggaatttaacaaaaaatataaaatcttttttctcttttgctaaaggtgtgtttctcaagtagttttctttatatctattcccctgtatccttctttaccaaaaccatttgatcttgaacctttaagtcttgctcttttgtgctgcatgcatcagtgaatcttcctgttaaaaagaaatccatgctaacttatttttactcaaaaggcttagaatcagaactctaaagaaaagaccaaaggatatggtaatttgaaattaaccaaggtttttggctaaagaacaatcatccccagagcaatttccattcaagagagacattctgcactctgttgcttttcctttctcatcatacatattcactgatagccatacacaaatagtaaaattaaagagcaaaataagtaatatgcttataacatgggtagcattttacacagaattataaactgccatataacgaacgttttcaacaccaatcaagaaaaatcttcagattacctgagattgaatgtgaatattaactaacatgaatcaagagtgcaaggtaaaaaataaatgccatatatttccaatgatattctctcatataaaaacatggtcttttttcaaatgatattgaaacccaatctcttttactgacacagtaaaaaggatccaaatcttggaaacaggtgaaaaaaatcagtactttaataccacaaactcattcattcctaatcagattctatcctttaccgtgtctcagagcagaagacctataaagagctgagattcaaagtatatcttaatttcaactgtttagatatttatcttctatccatttgcttgcttattaactgtttcccaataaaactctttcaaacagatcttttaataaaggctcggaaagaatttcattggtagtattataattattacataggggaaataacccagcgacagcaattattcagttttacaaaatgaattagtagtagggtctgagaaagaatctaagactgattcaagacaatccacttaatcacaaataacaagggcaaacacagtcttttccatgtgtcaccctaatacccacttttttttttacccccaaaatcattttcacagggccatatcagctatgtgaattaatagattctccagtgctgtagcaaagataaaacctgatccttatagtggttaagtttagcagctactgttgctttttctttcttctaagctctttgctgtttttgatacttagctgatttgcttaggggtaattaaaaagcagctgtttttctatgatctatctgtctatatatttctatggtatgtgagagtgtgggagggaagagtatacacactgaaaagtcacttaggcttatcggtagtagcactcagtaggactgaactttaatctgggaagagaattcatttgagccatttcttttcaaaaagaaatttgggatgcattacaaaaataaaatttaaaatcccgagaactcaggaaagcatagaaataggagaaaacaagacaattactccattttattgaccctggttattaaaaaaaaacataaagtattgagacagactctgaaatatgcaactgtcacaatgaaagcatttcagagcaaaatttgctgcaatatgctactatgattaaaagccatgtaatctgggaacctctgtaacaaaatgaaaatgaactaggaaaatagcttcttactacttctctaaaaataaaaggctgtaattttgtcataattacacaaaggtaggtgagactttcatctttacccagcattacaacttatttccatccataggtattacaattaacgttgctttgaatgcacatatagtttaataccgagaataaactattattttatgacactacatgtgttttaaactgaacccactatcataacacatattaagggtagtccttcagcacatactctctacccagagaaaagattcccacacagctttccatgtactcgtttttaaaatgtacacatattatcggacacaaatgagaaactaacgagcagcagtgaggtacaccatatgtttccattgtaggctgaatccaggtctttgttccaatattccagagccactgggaagaaagctaactatccattcattaaaattcatttttacattattgctggcaaaagttatacttttgatagattaagtcagagcccatcctatcctgactattcctgcctgcacttgcttctttaatacggatttcttgcaattctaggaaactgcaaaataaccaccctggataacaggtcggtagcaggacaatctgataaaccaacgtaaagggtagacactgaagaagaatgcaaagttattttcctagtgaaatagttcagaagttattctatatcaatagcaaaatttttgctttttataggctacgcacctataacatccaccagataacatccacctcgtcctcaattagcaggatttttctcaatcttcagatctcccagaacagttttactggtgcaactcaaaccaaaaacactaaccacgccctttatacccagagtcaagcttccttttgcttttttgcccttaaagtcgaaaaatgtaaatctttcacccgagaggttttgcaccggtttcctaacccaacgcggactcttttagctgtgtcttgatgtaattcctattggaagacgttttctccagggcagtgcagacgccccgaagaaggacccacgcttacctcccacacacctgcaacccctgacgggatgctggagcttgtgctcggcggactgtgctccgctccgctctcgttcctgctttcgtctctcccgggaaactacagtccagactgcgcctctggcttctacagggacccaagctccgcctctccctcctctagttggcgaatttggcagctgttgctcctccccctgctgtttctgcagctgcccggaccggaggcagcggaaagcagctgccctggtacctttccgctccctgcacttctgcagctgctctgccacttccactcccgtgggggtccctctcccctcctctgtggctcacacctggagcggcctcctgccccacccaggcgtctctgctgggagccccggctcagcctatccttccccgacctgtgtgtccggatgcccggtgtgcctggggcttagctgctctcagggaagctgcccctctgcccagtgcaagtccccacaccaagccctcccttcacctgggcgatttccccgaggcttcctctccacccacacggcatactcagcccgacagccccaggatccccaccacaggcccctcacccccttccttcctctgctctgtcagcccgccccctcaatgggtgaggcgcctgcggggcctactccgcaccctgattggcgcaggtgagggcttgccccgcccttcctctcctttccgtgcaccatctctcttcatctcacctcctcccgcaaaggcagggaattctcctactattggctagaagtgtcaccacccatcgcctcaggatcccccgcatggcctgccgggaagtgtagtcttccgattgcaggaattgcggacaacgccggcgagcgggactacgagtccccataagcctctgcacgactccggctgggcaggattccggacaacgcctggttcctcttgggtccttccggcgtcgccggagtgaattgatccgggagttgaagagggctgcaaggtgggaagtgaagtcagtgcctcagttgctggtaaggtgtagctgttctgtcccagtccccgtagctctgcaccgagcagaagaggtctagggtcacgcaggggccatggctgaggcacttgggcttggttctggcaggcggagcggacggggctgagagcggggccctacgggcgtaagcgaggttaccctacgcgagtggcgtaaagcgggtttgtaaatgccgcctgccggcttgggcccgaacgcctccaggaagtctcctctaggtgggggcgggaggggaagggcgaggttggcccctggtgccccgggagaggggacagggcggatgtgcctggggtggggtcctttgaaggtgtggcttcggaccgagaggtgaggctgctgttttccccctgctttgtaagtaagagaaaagggaggaggaaggaaagggtgcttgggagtcggctcttgggggtgactcgggttatgccctttgagggaagaggagcactggaagaaggaagagacaaatgttggggtctacggattcagttccagtttaatgatgtggccctctaaggagataattttgccttaaacagaaagacttgaccctcttaggtgtcatacctaaggtatgtttttactcctttactgctttcagagcgctttcattttgggatgctgatgaggaaaccgagggattatatgacgtgcccaaggtcacacacgtagggacagactttctgaatctagttcggttcgagtccagctttagagtagggacgttggttgtgctttttgaaaagggtggaggaagttacaaagtaaatgtattttatatagtatatctaagaagccattgtgagataaaaagttgtttcttgaaccggagtgaaattcctcaataaaggaaagatccttttggaaaaaataaaaatggccagtttcaacttttacagatttttcccctttttttaggggtgtattaaatgatagactctactctcacagttcatttttacgggtaggtaata

SEQ ID NO: 1083 - DNA, 6000 bp, Homo sapiens
ctaaatcacttttacagtttatattatggaaaaaattacttatcatgtaagtggcttaaaattcttagtaacacctatcataatgatattaattatccaacaacatataaaaagcagtatttcagttttatcctccacatactggttatgctaggtaaatatgaaaattttatccaagattcaagtaacatcaacactgactttttaaaaagtaagtttaggatttagcaaagacttgtttttaataataaaatggatagtattaccaaattttaaagccaaattatcagcaatctctttttgacaagatcttgtggaagagtaaactggtaaatccatgaaggcatacaaggctacagaaactcagggctgttgaccttactctatgccataccgtggtactacaaatgactgcagaacttgtttccaagaccaaaacctaacacaatttatccctaaaattcagtttgtatgttttaaaaataatctttttatgcttaagtctccagctataaagcaaataagattagaaaagtattagaaaaattttcaggaaacccaaaatataagttcctttgaaacaaaaactactcaattttacaaagccaccttgtctaaatcaagtgatattaaaggtataattcataggaagatagcaaggttaaaaagcaagaaacaaaacaaaaaagcaaagaaaaagaaaaaattatggattctagaatacggagatagatccagattctaaccatggttccagtaccaacgttctggaaactctagcaatttaattaaactttttttagtttaataagtaaatttacttattttcttgatgtcttcagctataaaacagtattaatactactacctagaggaaataaaggtttttagggcaaaacgagacaacattagggaagaagagtccattagaagtttcttccatgtctatattttgttataatgaatatcgcttgcaaaaagcaggacagtgataagtctctaaaatgctgtgttacacagcaattctgcggcaaatgaaagtgattcctttatcatttccacttagaaaattaatcctgatttcagagacctccaaaaagaacaaacatttttccacaatttatattaaaattctgtcaatgactcctttacatataacctaaattgcctaagcattatggctcatttgaaagttcttatatacttcaatccagaaagcatatccgctttattcatttctctatttctgtccccagagaagtgctggaagcactgtgcatgaatacactccttcattcattcagcaaatatttactgaacccttacaatgtgccaggtactgcgtaagtagtggggtaaaacatgacaaatgagagggccctgctcagggagcttatagtccagtgaggagacagtatttgtcaaataaatacagaaataattaagtttctattatgatgatgccacaaaggagtacagagtatggtgaatacatggcggaaacctattctgattttgggaaggcgggcaaggctcccctgacgaacgatatttaaattgagacgtgaaaactgactaccaggtggccacatttaggtaggcgtgaggggaacagtccaaggagtgagacggaatatgtaaaggccaccaagtcaggaagcagcttatgtatgtagtaactgaaaggcatggtaaatgagaaaggctggagataaggacggagagctggataggagaagagataaatttttagtgttaaacagagtaagaaggtaatagtatttgaatatttaagtcacgttaagtcttcttctcatgtaaataatctaagggaactaagtctttactccaaaatattaaagatctgtagtcagaagatctcgattttgtcttactcccaccagttacaagtcacttaaccaacttgagcctcttcattctctttgtaaatattatcttacctactcagactacaataataaacagcccctattcttacagaccttacatccttaagagaaacagacagatgtataatatacggaagacatcccaagtcctctaagaaataatgtccaaaagctgacataaggctcctgcaaagttcaaaatgagaagaaatgcagacactggtgagctgcaaaccacgtgtacacataactctgtgaactcctaattatccaacgtgcagagatctaaagtgacaacagtaccgcagcatgtgactgaaagatgataacaacaatacaaacattaatccaccatccgaatagaagaaatatcaaaactataattggcctcagagataaagagtagtggcagaaatgaaccaagaacaaaatctaaaacacactgaacaaatgcattacattaactaatttccaaaatttcctcatagttcaaaagctctttccataatgacagagttacatgccaaaggttagaacttatttcatacctccttcaacaaaaggcaaatacctacattgtcatctagaaaacagattaatattcttgctttaccatcactgactcatgttcagtttacggtctacttacatcactgcacctttcttaatccagcacaaagtcagttatcaccacataattttccatttgtttaactgggtcttccttgtctgtgtactacattacttatggtacattattcctgattttacttcattctatagtatcatactttttctattttaaaaatcgtattaatttccagaccatcttaatttcaaccatcagggaagataatacctctgttccgaaaaaatgtttttccattaaaaagtgaagcacattgttgataatatagtaactgcagagtacattcaaaattcagcatagtctgatgatcaacttatatataaaacagtaagctatgatttattacatgttaagagtaagccatgatttattacatgctaacctgtatggatataaagttatcacaaataaattctgccatcaatgaacatactctaacaattctattaaaaacttatccaataataatagtcatgagctataactggtcataatcattatagaggataagacttgcataaaggcactactttctgcaagatatgaactatacgtgtactgttttttcattcttcaatgtaaagtaagaatgaattgaaagtcacagttgatgctaagaaaaataaaaatatgcaagagcccaattttattatttgcagacacacacacaaatacagcccagagtcaagaaaatgggggaaaagtaaagtctcaaaaaagacgatgttacctccaagaaatgcaaaataccttcttttctagtaatgggcacactaaactctcctaacgctacattatttgaaaaaagtgtagttttgtgaaagaattccaatcccactattatcagttttacaaaatgagagtaaaaacagtcctaaggtagaaaaagaaaagaatattcttctaaggatgggatatattgtttaactgttgttctcccatcctattacctacccgtaaaaatgaactgtgagagtagagtctatcatttaatacacccctaaaaaaaggggaaaaatctgtaaaagttgaaactggccatttttattttttccaaaaggatctttcctttattgaggaatttcactccggttcaagaaacaactttttatctcacaatggcttcttagatatactatataaaatacatttactttgtaacttcctccacccttttcaaaaagcacaaccaacgtccctactctaaagctggactcgaaccgaactagattcagaaagtctgtccctacgtgtgtgaccttgggcacgtcatataatccctcggtttcctcatcagcatcccaaaatgaaagcgctctgaaagcagtaaaggagtaaaaacataccttaggtatgacacctaagagggtcaagtctttctgtttaaggcaaaattatctccttagagggccacatcattaaactggaactgaatccgtagaccccaacatttgtctcttccttcttccagtgctcctcttccctcaaagggcataacccgagtcacccccaagagccgactcccaagcaccctttccttcctcctcccttttctcttacttacaaagcagggggaaaacagcagcctcacctctcggtccgaagccacaccttcaaaggaccccaccccaggcacatccgccctgtcccctctcccggggcaccaggggccaacctcgcccttcccctcccgcccccacctagaggagacttcctggaggcgttcgggcccaagccggcaggcggcatttacaaacccgctttacgccactcgcgtagggtaacctcgcttacgcccgtagggccccgctctcagccccgtccgctccgcctgccagaaccaagcccaagtgcctcagccatggcccctgcgtgaccctagacctcttctgctcggtgcagagctacggggactgggacagaacagctacaccttaccagcaactgaggcactgacttcacttcccaccttgcagccctcttcaactcccggatcaattcactccggcgacgccggaaggacccaagaggaaccaggcgttgtccggaatcctgcccagccggagtcgtgcagaggcttatggggactcgtagtcccgctcgccggcgttgtccgcaattcctgcaatcggaagactacacttcccggcaggccatgcgggggatcctgaggcgatgggtggtgacacttctagccaatagtaggagaattccctgcctttgcgggaggaggtgagatgaagagagatggtgcacggaaaggagaggaagggcggggcaagccctcacctgcgccaatcagggtgcggagtaggccccgcaggcgcctcacccattgagggggcgggctgacagagcagaggaaggaagggggtgaggggcctgtggtggggatcctggggctgtcgggctgagtatgccgtgtgggtggagaggaagcctcggggaaatcgcccaggtgaagggagggcttggtgtggggacttgcactgggcagaggggcagcttccctgagagcagctaagccccaggcacaccgggcatccggacacacaggtcggggaaggataggctgagccggggctcccagcagagacgcctgggtggggcaggaggccgctccaggtgtgagccacagaggaggggagagggacccccacgggagtggaagtggcagagcagctgcagaagtgcagggagcggaaaggtaccagggcagctgctttccgctgcctccggtccgggcagctgcagaaacagcagggggaggagcaacagctgccaaattcgccaactagaggagggagaggcggagcttgggtccctgtagaagccagaggcgcagtctggactgtagtttcccgggagagacgaaagcaggaacgagagcggagcggagcacagtccgccgagcacaagctccagcatcccgtcaggggttgcaggtgtgtgggaggtaagcgtgggtccttcttcggggcgtctgcactgccctggagaaaacgtcttccaataggaattacatcaagacacagctaaaagagtccgcgttgggttaggaaaccggtgcaaaacctctcgggtgaaagatttacatttttcgactttaagggcaaaaaagcaaaaggaagcttgactctgggtataaagggcgtggttagtgtttttggtttgagttgcaccagtaaaactgttctgggagatctgaagattgagaaaaatcctgctaattgaggacgaggtggatgttatctggtggatgttataggtgcgtagcctataaaaagcaaaaattttgctattgatatagaataacttctgaactatttcactaggaaaataactttgcattcttcttcagtgtctaccctttacgttggtttatcagattgtcctgctaccgacctgttatccagggtggttattttgcagtttcctaga

SEQ ID NO: 1084 - DNA, 6000 bp, Homo sapiens
ggaggcagagtttgcggtgagccaagattgtgccactgcactccaacctgggtgacaagagcgaaactccatctcaaattaaaaataataataataataattaatttcaagtgaaatactttaaggagatttaaaatgatagcacgtttcaatatcacattaagacaattcaagctaaaaatagtgccacaaaattgatcgaaaccttaatcttaataagtgttccagtagctgtgtatacaaggtttcaatctgcatttacttttattttaaaaaagtattttcctttttggagtgccgtggcacaatctcggctcactgcagcctccgggttcaagtgattctcctgcctcagcctcctgagtagcagggattacaggcgcccaccaccacgtctggctaatttttttgtatttttagtagagaagaggtttcaccatgttggccaggctggtcttgaactcctgacctcaagtgatctgcccacctaggcctcctaaagtgctaggaatatagcatgtaacccaggaggcagaggctgcagtgagccaagatcgggccactgcactccagcctgagcaacaaagtgagactctgtctcaaaaaaaaaaaaaggaaaaagaaatagtactgcttttcaatacagaaaacttggaaaatatagaaactcacaaagaaggcagggcatggtagcttatgcctctaatcccaggacattaggaggcccaggcaggaggattgcttgagcccaggagtccagggttggcctggttaacacagcgagaccccaatccctatttaaacatacatacacacacacacacacacacacacacacacacacacgcacacacacagaaagagagacagagaaataaacattcatgatgccactaccctaagagaaccactgttagcattttggtaaagtctttgtaatacattttcatgcaatatacatatatgtatcctgtacaaaattggttgcatatataagctgctttttacagttatagacatcttctcatatcagtagatagtcttctataatttcattgctagtggctgtagaagattccatggtatagtatttaaaaatgaaaatatctttttttttttgagacagtgtattgctctgttgccctggctggaatgcagtggtgcaaacacagctcactgcagcctcgacctccaggctcaagcaatcctcctgcctcagcctcctgagtagcctggactacaggtgcacaccaccacgccctgctaacttttgtcgcttttgtagagacgagctctcattatgttgcccagcctggctttaaactcctggcctcaagtgatccccctgccttgaccttccaaagtgctggaattaaaggtatgagccactgtgcccagccaaaaagaacttttttttttttgatcaggtaacatgctcattgtgaaaaattcagatgaggcaaaaaatatagacattatatagtttacgtaaatcattagcccatcttctggaaatatcctctaataatatatggaaatattaactttcagactttatatatgtatatacacactgcatatatattttaatatgattatgtatggtgttttgtgacattctttaaagtgaacatctttttatgatgatgaaaatagatctacatcaaaattttaaagtttgtgtaatgtcccattttgaatattatatggaggctgcaaacagtcattgatgtggcactggaaatggaaagtaagagggctcaaatcgtagttctgacacttacagcttgtctgatcttacatgtgttactggttgctatagggctcagttgcttaattgaaatcacgaagtctacctagaagaagtagtaaagtgttggctgggttccaaattcaaatgttttcgctatgcaaggcctgaagagggacaatacttattctttagagttcaggcagtatgagatgctttggcctgtgcccaagtggaactttcgcatccatactcaaaatcactcacattgagaacaaacaaaaaatacactgaaagccaaaacagagagagagagaggagagaagagagaagagaaaaggaagagaagggaggggaggggaggacaggaaaggagaggggaacccataaagaaaagcacactgggaccctcatacactgttggtgggaatgcaaataatgcagccactttggaaaagtctggcaattcctcaaaaggtttaaacatggagttatcacgagtcagcaattccatttctagctatatacccaagagaaacaaaaacatacatctgtctataccaaaacatatacagcaattttcatagcagcattattcctaacagccaaaaagtagaaacaaagcaaacttctatcaattgatgaattaataaataaaatgatgtggtatatccatacaacagtatatttgacaaaaaggaatgagtagtaatacattctacaacatggatgaaactataatacattatactaaatgaaagaagccaatcataggccaggtgcagtggcttacatttgtaatcctagcactctgggaggctgaggcggaggcagtggataacttgagcttaggagttcgagaccagcctgggcaacatggtgaaaccccatctctacaaaaaatacaaagattaggctaggcgggcgtggtgggtggtgtctgtactcccagctacttgtggggcagggggttgaggcgggagaatcactttagtccaggaggtggaggttgtggtgagtggagatcaagccactgcactccagcctgggcaacagagtgagactctgtctcaaaaaaaaaaaaaaaggaaaaagaaaaaagaaagccagtcataaaacaacacatattccgcgatttcatttatattaaatatctagactaggccaatctatataggtagaaaacaggatagtgatttcctagggcctggggagctggggttaaatctagagtgaacgctaacaggtatggggttatttttgcagtgatgaaaatgttctaaaattgactgtggtgatggttgcacaaatctgtgaatatactaaaaactactgaattgtacattataaatgggagaattatatctaaagaaaactttttaagaaagcaaatgggacattataattctgaaggatcacaatgagatacaatatagagtgttagcataaggtgcccttaataaatggtggctattactcattgatgggcatttagttgtttacatttttctcatgatgatcaacactttaaaaagaacatcccagcccagtgtgggatggccaagagttcaaggttacagtgagctatgattgtgccactgcacttcagccttggcgatagagatcctgtcttaaaaaaaaaaaaaaaaataggccgggagtgaatacataggctgggcacggtggctcatgcctgcaatcccgaggcaggcagatcatgaggtcaggagttccagaccagcctggccaacatggtgaaaccccatctctactaaaaacacaaaaagattatctgggtgtggtggtgcgcgcctgtaatcccaactactccggaggctgaggcaggagaatcacttgaaccagcaggcggaggttgcagtgagctgagatctcatcactgcactccagcctgggcgatagagcgagattgtctaaaaaaataataataaataaaataaaataaaataaaataaatattgtagtcctagctactcgggaggctgaggtggcagcatcacctgagcctgggaagtccaggctgccacgtaatcacgccactgcactccatcttgggtaacagagtgagaccctgtctctaaataaataaataaatagaatatcctgtacataacaacagtgagcactttcacagccctcattttttcccagaatcttcagagatgcagacgtgctcataaaatgttgtgtacattttatttttttagaatctgaaaaactgggtcagtgggcgtttcatgggaagtatagaatgttagcaaagtatcctttcttaagtttttctgcgaaaacggtaataatgtaagtataacaaggagcacttatagtattattttccaaagcccttgcttagggaaggagcttcagtattaagttgttaaaatccatacccaaagtatttgttatgcttacaaaactggagatggttctgctttgatcctatttgcggaaatttgcatgcatttaacagaggaaaacgtggtctcctgctctattaagtttgtctgactacttttaataaggcgaattcacctaaactctgttctagggtgtgaacacaattacttgccctgaaaatactcagtttgacttttaaagagctaaagtggtaacaggtggggagagggctaggccaaattgtttgagggggtgtggaactgtggaatttgagtgaagagaaggcccaactttttttaaaaaaagagcggggcgaaataacttggggcacaacagtatgtctattttgtaggcatccctcttccccagggcaactggagcccaaaaagtgggtgagaaagccattccagggcagccagcacttccagaagtttaaggtcaggatgccggagctcaggggaatgccgatgcgccgggcaggctgtgcctgggcagttcattctgtggcagctggaggcactactcggccgccgcggtgcgaactgcgggcactgtggggcggagacctaggggcgggtcaacaaaggtcgggcgattgtgtctggaggcaaatccgacgtagacggcggcaggcggagcccaaagccggtgatgcagggtgcgcagggatcccacctggagagtcggggcggcacgttgagaccccaggggtgaagggcgggggatcccaatcccagccctgttttcccctcccctttccccgcctccttctcgcccctcccccctcctcccctctggttggaaagtttctagaatctcttcccagcggcctttgcggttccaacatggcggagctgacggtggaggttcgcggctctaacggggctttctacaaggtactgaccgttttgccactttgtcgagtgttctgggtgctggagcgcgtttgagggagggttggtggtcccagagagtgaggtttggggtcggaaaggcagccaggccaaagctcgaggccgctggattccttgcttctcccccctccacccgcggtttaacggtctcgggggccggggctccgttatgttttgaaacaacacgtcggacacctcttgcattttcctagttatgaaccctcttggttgctagtgcggttcttggcgggccggtgggaagcaactgagtggctgctgggcggcgggagctccttcggagcaggcccgagctctgggaggtgggggagtcgtgaaaggaggcggtgggattgtgtggtctcacccgctcccccgcccctcgaactgggccgggcgggagctcctcagcccgctcctccgacccctccccaccccttggggcgggtgtatcgcggaatctttggaattcacccttgtatttgagttttgggccaacaaatctttagtgtctgaggagaatgggggtaccggattgagggttaggatcaaatacagaaaagcagaaaaccttgaattgtggcgggttggaatatttttgcggcctgggaaattgggcggcgccttagcccctctattacggaagaaaaggagagttgtgagctttaaagtaagatttaaaatgcgaaatggatcagggagataggtggagaggtgactaatttctttatatcactgcccctgtttttggagggaggttttgttttgttttgttttttctcccacgaggttttttgtttgtttgcttgggaggaaggacatccattactatggaatcggggctgaaaaacgtaagaggaatagagtagaggaatttggtggggcattcagcgttcacatatctgaaaatgaaatcctaatagt

SEQ ID NO: 1085 - DNA, 6000 bp, Homo sapiens
cgttgttaggcttaagtcgacgaagactgtacaacagtataaaatgtgattggattaatagggaaagatcccatagtaatagacggtcaggggaaacccagcgaggccttcagtttgagttctccatggcccctctgtgtggcaattcttgcttctgggtatagggcccaatccctctggaatatggatctgaggacctattatcagacagggtatatcctggaatttctttatggccagctcctacaaagaaaggcccaggggggaaggtagagctatattttaggttttatggctgtttgggggcagaggtatttcactttctgggacctgcctgggggaagaagaattctagtttctatggtgccttaagggagaaaggagagcaggagaaagtagagtgggagaaggtcaaacagatctcgcttctgaggcccttttggtttccttcagttcaaaggactcagcatatcaaggcaccacagtttggaacatcgtattctgggtcccaacaatattcaagcgaacacaggagtggtaaacgtactggggctacgtaatgaaggcggatctattaggattgcatgggaagaggcttcagctgtgtagtgatgcatgggtaggatttgcataggaagagggtctgggtaaaggcattcctggtgaattcctggcaccactacttctaggtgggtagggaatcagaaagaagggtgttggggaataattgaatataagcagggggttccagaagttctgtgtgggctctggagctgtcattatttgggagatgagcctgtgggctcatcttaaggcaaaacaaggctactgttttcacttcgattctttgcttacctggagtggatttgagtggctgaagacattatggaaagacatgaagcctcccttctctctcccaaaataaactactccctctttggtgaaacaactgaaatcaggaggacagaccaggagcactacagagtaccacaggagtgctacaaagcaatgtacccttcttaatgtatcagagagggagcactgcaagttgtagagaacaggagtgctggaacttagaattccattcagtgaccttactcccattccagactctgctccaggttatagcacagcgtgcttcagcacagagctacctctgagagctagcatacagagtgggtgagtgggagaggccccagggtgcctggggaatctcaggcaggcgacagggacatgaacttggaagttattttatgtatgcgggaatgagggccagacccaggcagtgggaattagggcaatgagaatgaggaatagacatgagagatactgccagttggttgatgtttgtcatgcatttagaaaatgcaaagttaggccgggcatagtggctcatgcctgtaatcccagcactttgggaggccgaggtgggtggatcgcctgaggtcaggagtttgagaccatccagggcaacatggtgaaaccccgtctctactaaaaatacaaaaaattaaccaggtgtggtggcacgcacctgtagtcccaaatacttgggaggctgaggcagaagaatcgcttgagccccagaggtgaaggttgcaatgagccgagattatgccactgcactccagcttgggccacagagtgagattccatcaaaacagaaagaaaagaaaaagaaaaagaaagaaagaaaagaaggaaagaaacaaagaaagaaagaaagaaagaaagaaagaaagaaagaaagaaagaaaatgcaaaattaaatagactgcaatgtatacaagccatgaagtgaatagaaggctagaaggagaagcatataaaatgaatgacagtggcacctctgagaagaagctggggtgcaggatgggtgatttttcacactcttcttatattcatatcatttgaacgttttcagtgaaatgatattcaccttatcacttaggtggtacattttgtgaaaggcagaatgaagaatggtgttgaagcacaggcaactcaggtctccagggcagaagggttggcctaagggcaaggcagcaatggtatggttttcctcaccaccacccatggggaagcccagtgctggtgcctgctcatgtctagcagacagccatcctcctgtcttagttcacctttcacagctgggtttaggggcctctagagcacaggagtgccagccagttgtagcccttgtacttagggtagagccagcagacacttaccttgacaggatctgtgaaaacccatctttatgctgtatagttcccttttttttcaacactttcctccatggcagaaaaccacaacaacttgaaatgagacacttcaccacctgtgctttcttcaaagtgtacacgaggacagattgttgagccactggtggggcgatctgatcatattactctgatttttctaaagctcttcttcctttgctgaaagactggaagctcacaactctggctgggcatcttcagttccccatatgcatacacacacacagacacacacacacacacacacacacacacacacgcttctctcctctttgaacgtctttggattctgcagagcagatttgtcctatgatgtcataaactgtgaagtcttcaaccctcaggttggttttctaagtaggctttgttatgagcagtaccagactaagtggtatttgcacacacatagtgtctttggttcttatggctctgggtgtgtgtgtgtctgtgtgtgtgagggaggagtaggggaagagatacaacactcctggggaagggagtgcaattgctagtatcacataaaaagtatgaaaacttttccaagaattagggaggaatacgatttggcagaaaagtaaagtcatatccaattcaatcaaccttgaatgaatttaaaggtgctccttgtagttaggacgccagtgctgaggctcagtcattgctagcttttaatattagacatagcatctgggtgcggtggctcacacctgtaattctagcactttgggaagccaaggcaggcagatcactagaggtcaggagttcgagaccagcctggccaacatggtgaaacctcgtctcttctaaaaatacaaaaattagctgggcgtagtggcagtcccctgtaatcccagctacttgggaggctgaggcagaagaattgctttaacccgggaagtgcaatgagctgagattgcaccactgcaccgcagcctaggccacagagcaagactctgtctcaaaaaaaaaaaaaaaaaaaaaaattaggcatagaatctaagaataaatttaacctgaaatttataagtgtatataaaataagatgcaaaaccatgttttacatctctccaagaaatctttgttctattttataggtgagcacaaagattttctttacataattttttatcagaaacaaaaagattgaaaatagtccaaacatctatgtcctgtgtcaaaaaaaaaaaaaggaaaaaagaaagaaaaagaaaaattaggtttgtcctcatgaacatggctctacagactttttaaaaaaataaagtctgaacaaggagcagagtgaataggccgaattttttttttttttttttttttttggacagagttttgctcttgttgcccaggctggattgcaatggcgcaatctcagctcactgcaatctccacctcccgggttccagcaattctcctgcctcagcttcccgagcaactaggattacaggcatgtgccactacgcccggctaattttgtatttttagtggagatggggtttctccatgttggtcaggctggtctcgaactcccgacctcaggtgatccacccatctcagcctcccaaagtgctgggattacaggtgtgagccaccgtgcctggccaatttttactggagtaaggatgttgataccatcaagcctcacacttctgctgagattatcaactgtagttttccaatgttggtctacaggtggggaccattctgtaatatagtttccccactctgtgttgatgtgaggaaaataagaataataaagttttattgctggctttgagggagaagggttctatgacccgccttggggaagagaaattctagcttctgtggcctgccttgagagaagtggagcaggagaaagacgggcaggagaaagcaagaaagagactttgcttttgcagcctttttaatgtctttcagttcaaagtactcggcatgccaaagagccatatttggggctatctttttctgtgccaaaccaacaacaccaaaccagaaagaagcaagcatagggaatccagggcttcactcaacccatcccttcctatgcttttcctctatctccaccctgggagcaattttcttttacagaactaatgcaactgagcagagaaaggctggcctgtccagagagcagataggacgcccatattttattttcagttgtgccaatgtcctgcatgggactcctggaactcactggatgcccctgtgcatgagcttcttaggcatgtaatagaattaacagcagtctgcttctatgcaggtaggtatcctgcaaagaaactttgtatgaaatgtgtctgcacattgtactcattcttgcattgtttacccatgtagtgaccttcaaaaatggctttgcaaaagtcacaggggaataaccgagttagtaggcacttgtttcccctccttcatcagattctgctctgatttgctacataaagttgtataatcacctggaaatatgcactgtgctgccacgtgattttcaaatgcaaatgagcaggttaacaaccccagtgttgcaatgttctagctgtaaatatgtttggataacccagcagagccatttaacctttgggaacaaggcaactagcgtctggcagcaggaatccaaccagtgccctgagttctgaggcagagaggaggacagaagaaacaagaggctggagattgtcaaattcagtatcccagttggctcttgattcttggtgaaaccatccctcagctcctagagggagattgttagatcatgaaactaattaccatccttttcctctgctccaggctgctactaagtttaacccaggaatcacagtccgaggaaattgactgcaatgacaaggatttatttaaagctgtggatgctgctctgaagaaatataacagtcaaaaccaaagtaacaaccagtttgtattgtaccgcataactgaagccactaagacggtgagtgaattgtgtttaaccttgaagtcacttgggatttgtactatcactaggagtccaggcctcacacacacacacacataccaccaccagcacccaccaccaccacccaccacccaccaccatcacccaccaccaccaccacaaccaccaccaccacccaccaccaccaccaccatccaccaccacccaccacccaccaccacccaccaccatcacccaccacccaccacccaccaccacccaccatcatcacccaccaccacccaccaccatcacccaccacccaccaccactcgccaccatcacccaccaccatcacccaccacccaccacccaccaccaccaaccaccaccatccaccaccaccaaccaccacccaccaccactaccacccctcaccacccaccaccaccgccacccaccacccaccaccatcacccaccaccaccaccatccaccaccaccacccaaccaccaccacccaccacccaccaccatcacccaccacccaccaccacccaccacccaccacccaccaccatcacccaccacctaccacccaccacccaccaccaccaccacccaccaccacccaccacccaccaccaccaccacccaccaccacccaccaccactaccacccctcaccacccaccaccaccgccacccaccacccaccaccatcacgcactaccaaatatgtgatcatcaaaggtagaagcttacaacttgtggaaagacagataccactctctggcctggggtggg

SEQ ID NO: 1086 - DNA, 6000 bp, Homo sapiens
aatagctgggactagaggtgtgtgccagcatgcccagttaattttttttgaattttagtagagacaaggtcttgctatgttgcctaggctggtctcaaactcctgagctcaagcgaccctccctttcaaagtgttgggattacaggtgtaagccactgcacctggctatgtctcatcttaaaagggggaaaaaaagtaccccatttccctgctctagctattttattaaaataaaagccaaaccatcctgatttccatttctttttttttttttttttttgaaacggagtcttgctctgtcacccaggttggagtgcagtggctcgatctctgctcactgcaacctccgcctctggggctcaagcgattctcctgcctcagcctcctgagtagctgggattacagggacctgccaccacacctggctactttttgtatttttagtagagacagggtttcaccatgttggccaggctggtctcgaactcctaacctcaggtgatccgcccacctcggcctcccaaagtgctgggattacaggagtgagccactgtgcccagcctgatttccgtttctatcacttcagcgaaacagctcttacggagggcaccataggcttccaatggccattttgctcaattctggttttatctgacctctcagcaatacctgacaatgttgacacctcctcattgttgaaaattcctctcccctgggcagtctctagctttacctctatctcactggccactcattttcagtatcctcaactacccttggaaatgttgggaactcatcaaggcttagacctaacctacttctcactctccctaggcaatctcatctacacccatttcctccattaccatccacatacccatgtttctcaaaattatgtctaatacagttaagttcccccttttggtcagcccctcaatttagagagattaaccaaaactttaggcgttgacaccactctctgtcaccatcataaagacttatttgatctcagtgtggaactcacaagtcgtctttagtttcagtacggagtctcacacgtcttctttggtgttaatagggaattcacaagccgcagcctgtaccagttaaatgattctttatgttcttgctgatccacttggagcgagaccattcaactgtcaacgtacagctgcatacaaaacatttaagacttgagagtatacagagcgccaaggggactattattgcgactattaagaggataccatcaaaatgctaaggcgtactccttgttgttattcaaaaacagcaatcaaagaacaatagaaagtgtacagaattaaacatgtctttaagagttttcttaaaagttcatggaaatgaaaagttgcaatgctcagtgctaggtgtcctctaaaaggaaaaataaaaataaaaaaattaagttgccgccaaatgcagtggcgcacgcctgtaatcctggcattttgggaggccaaggtgagaggattacctgagcccaggagttcgaggccagcctggacaacacgccaagatcctgtgtgaaagaaaagaaaagaaaagaaaagaaaagaacagaaaagaaaagaaaagaaaagaaaattaagaaaagaaaagaaaagaaaagaaaaggaaaggaaaggaaaggaaaggaaaggaaaagaaaagaaaagttgcgatggccaatattaaaaaaatcaacagtaaaaccatgaaatgaattaaggaaattccccaggacataaaatgcaaaaaaaaaaaaaaaaaaaaggtgaaaaacataagaggaaagttaagtgatgcagagctgtggtaatgtggtatccaaagggagtgggaggatgggggcggaatgcatcccgtgggatgaacaaaaggatctactgggattcaggaagaaagtactgaagcttctagatgcagtatgttttgtatcttatcctttaagattatgttagggttgacttacaatgtaaataattagtacagatacatatataatttaaaaataaaaaagtgtgcatatatacatagggtatatgtatgcttttccttttaacagacgacgagtacaaatcttactttggaaatcacggacataacatatcaatctaagaggaccactatcctcctaagagatgtctagaaagaaaaaggacaggaaaaatgaaaggaagataataaaaaataagagagaaaaacgtctcagaaatgaagaaagataaagggaaaggcccactgagtgtgccaagtcaaatgagtagcaaaagaaaacaaaaccaaacccacacctggtccaagccttgagaaatttaggataaaggataaagtcaagaccctaacagattccatgaagggaaaaacaagataatcatgaagatgaaaaaatcagattgtcataagaattctcagcagcaataaacaattacattagaagaaaatgcagcaatgcctttacagttctaaaggaaaagaattttgaatatagacttcaatattcagtcaaaactaaaaatcaagtatgatgcaaaataggtttcccccagaaatctactctcttgttcattgactatcacttttaatcaatatatcatttcctaatatgtaattcttttaaaaataattttacacaattatttattgcacccaaatgttagtattgatcttttcacatgtccatgagcatgtatttacatatgtatgcccaaagaaatgcttatgctctcatctgttagggagcaggaatttaactgtattctttcacaacatgcaaaggaactatagcaaaagaaaaactgcagagcttggggcttctggcttcccacatctctacttctttaggtagctaaactgtgccatcaccaggagacatttttaagccatgactcaatggcatccatggtaactttagaaataatttagcccaatgacagccaattaaataaataccacttataaatcagtttgttttaaaactccgtctttgtagttcttcttatacatcttaattgctccaacagagaatgctatcttctgcagtcttttctctttttatttaaagaaaatcagatatgtttcctcactaaatattgagaagtagaaatgcaagggttgtaaataacttactttaataccaagggctgtgaacttactcaaagactaaaattccatgagattaaaaatacctatgcaataattctaactgactaacactgttaactattgttatctcatctagttctgtattttggactccagttaacctatataaaacaaattgggccgggcgcggtggctcacggttgtaatcccagcactttgggaagtcgaggagggtggatcacatgaggtcaggagttcgagaccagcctggccaaaatggtgaaaccccctctctactaaaaatacaaaaattagctaggcgtgctggcgcgtgcctgtaattccagctactccggaggcggagacaggagaattgcttgaacctgggaggcggaggttgcagtgagccgagatagcgctactgcactccagcctggacgacagagcaagactccgtctcaaaacaaaacaaaaacaaactaacgaatgcattccattccttataaacacgataaattatctataccacttaaaaaggtctggaaaaaattcaaaacaactgcttagaagttaattcaggaaaaccacgtttttccaattttgcttgatgcatcttacttcctatcaaatgcctgcaacaatgagctaagcttgaaggtatctaatgatactagaacaaaatttcctataaaatccaatttaatctcattacaatgcatatagtaacgcacagaaatgaaaagatttctatgattttctatttagaattaaaccaccccagggcaacaatgattgagattagaaaggtggtgccacgttcacgaccttgcatcaaaaagtaagtctccctcccgaaacacagaaaaaagctgctattgaaagggcatctcgaatcaccgtctctgacaccgtgtgcgtcattgctctagttctgacttctatcagcgggctagggaaagagacggacgcccctttccccgatagaagagcccaggtacctgaagatgcaatgtacacatggcgtggaaatggaagaaaaagaagacaccgagagttaggagaaatgtggagagaggtgactcatggacagagccaaacctggcagggagaggacagaaaaaaggcaaaagaggcaaccagagacagacagaacactgaagacacaagggtgtaaagggcagagacaaaaggacaatagagacgggccaagattgagaggcgtccagaattttcgggttgggtagggccagagaaaagggccagtattgaagccggctccgaacgtaagcccagccagggctcctgtcattctgggtcctcaagaacatctgggaattctccaactgccgtcggcctggcctgagagtcacctgcacatttttggagatagagataagacagccccactctcaagaggccccagaattaacggggccagattagagcctgcacttaccaggccacagcggcccgacgtagtcgccacatcccgccggcggggaggtcacgcaggcgccgagacggccacgcgggagcccccgtgtgagccccagcccggctcccggtccaggaatgacccaggaagtggccctcagcagcaagggcacagagccgcggccgaggccctcccaatggcgcatggacttccgcaagagcctgacaggcacccgtactcagtccgtcacggaaacaaccacttcaccctttctaggcgggcagcacgaacggtccgcggaggaccagcgcatgcgcacagtgcgtcgggaacggactggagcaatccatcgcctctcacggggccccgccctcttgcttccgatttggaattcggaattagccttgcaggttagagatttggccaggggagggagcgagagttgggcgggaacgggaagggctaaaggcgtggaatgagaattgatgaatgctcaccgggagccatgaatttattaagagttggatattgagggagcacgaaggaaactagagagtgcaaggtgaaatacagtaatagcgtactacaaactaatgcttgcacatttgcctaccttctttcttgggcatctttgtttgaaagcactttcacatcgttagggcaatcatgggaggtgagaagcaggacgaagagtcatggataggctaagtcccttagaatctctgaggatcagatgggaaagggacttaaatcagttaggccagtaacgggtttggaataagcttgtgtggtttataaaaggcgtcaaaatgatttgttcaactgtttcttccggattttaagcccaccagtttgttgaaatggtcctcgtcaaggcctccaccagctccctattgtttgtggccagtgagcctgccacagcattcagttcagatgcctagtgctgagcactccttcaactactttttcttttggctctctggccatcacattctcctttttccctggaactgctgctcccaggcttctttgatggctcccctcccaaatttctcaatgttggacaggcccagatctcagccatcttgagctcctctcctccatcactttaaatactcctttccccttccaacacaaaccttttatgttttgtaaggaaaccagggcccgtaaaagggatgtggcctgtgaacggttatgaagccaatttttagggactaaaataaaagggtcctgtgcatcctctttacttcagggacctttcacctcctccccactacccgccccccacccatgccacacacatacacaaatacacagagcataaagacaattccttttcccttaattgtcagaatcataagtctggacccatgcactcacaataccaccaagagtagacctagccattgatagtaaacttcccaaatgcaggactcttagaattttctttatttatt

SEQ ID NO: 1087 - DNA, 6000 bp, Homo sapiens
caatcatcattccaaagccagcattatcatccccttgtaatcagcttttctatatttgtgactgttactaataatgtcaattgactttggcttcaaccccattatcttttgattcctcttcctagtttcttcatttagcttttcattgttttaaatactccgaagtatcctttcaaagaatctctcacttcttcccattaccaggctttggttaagggccctcacacttgactttctcaacagccccctatccagtcttcctgaccctcagtttccctctttacaaattcatccttttctgtttctccaggattatcttttttgagcccactttatgacactatagtctgcctctgtgggtagtaactgttgctacccattacttggtcctcagcttgtactacctcacattaatgtttaccttttatgtatgtctgtcttcctaaccaaaccatggttagttgagggtgggaactgtggtttactctttttaaaaaaatatatcctcaggcctggcacggtggctgatgcctgtaatcctagcactttggaaggttgaggcaggcagattacttgaggtcaggagtttgaaaccagcctggccaaaatggtgaaaccccgtctctactaaaatacaaaaacttagccaggcatggtggcatgcacctgtaatcccagctactcaggagactgaggcaggagaatcacttaaacctgggaggtggaggttacagtgagccgagattgtgccactgcgctccagcctgggcgacaaagtgagactctgtctcaaaacaaacaaacaaacaaacaaaaaccaaatatatatatatgtgtgtgtgtgtgtgtatataatttgtgtgtgtatatatatgtatttatatcctcgactagggttcataggaagtgactgtaaatgtttgttaataaggattataacatgcttttctgagggctggggagagtttgataatgatgatggtgcaaacatgtatgacttcagctaattattggcttctccaggaaaccacaaagagtagtgttaaggaacttggagatctcccaagaagaactttgcaaaagcttttatgtataaatttaaatataaaacttatgaaatcaattttaaacatttccatttccattaacatctctcattaccttcctttctgaaaatttctgattcgttggataattctgaaaagggtcccttttcctgctaaggtaaatatttagagttttacctggtgaattgctcaattcccagctgaactggaaaatttagtttaaagtagtaaaattatttcatgacttctggatcagaaaaatatttttaacatgtttttacaagtaattaatacacaagttcagagtataaaagggtttacaataaatgtaagcctccctcccactcatgacccactaacttcaagtccttccttgactctgcccttcactagggcttatcaactcaaatattttcgtgggttaggcatgtaacataaatgagtaatgcaagtatgtctgttgtataatgtcatattaaattgtattcatataatttattcatataattttacttgcctacttgcatacttgtgttcttttgccaaaaaaaaaaaaaaaaaaagctctttctcattgttttggaaatggctgaccctctcagtccttcattttctctcacttttcatattgtaatcatccagcaggttcttcctgctcactgcacagacaaaatcatttcactgagaccagggcatcgcagtagaaaaagagtttaactgattcaagaccagcctatgcaggagaactggagttgtcactcaaatcaatcttcctgaaggctctgaggttagaggtttttatggacaatttagtgggcaaggggtagggaatggatgctgctgattggttggggatgaaataataggaaaacattccttgtgtgctgagtccacctctgggcggggccacaggatcacttgagtcatgagtcataagtctcgatggggtgagtctgaaatataccgcaaaaaagcagtcttagattctatagtaatgatgttatctataggagcaattggggaagtcataagatttgtgagttctggccacattgattcctgagcagtaagggactatagaaaccatacctacgtcttagcacagttcaggcccctctcatgatcctgttctcttggcctttcttacaaaggtggtttttggttcctgagcaacgagggagttagctttaggaagggactattataatcctttctttcaagttaaactataaactacattcctccccaaagttcatttggcttaagtccaggaatgagcaaggacagcttggaggtcagaagcaagatggagtcaactatgtcaggttcctcttgtcataattttgccaaggcagtttcaatataagtagtggttgtttttcctcttaatttttactaagaaaagtagaagcacaagcttcatgataaacagtaattgatgtgttcaatttcagaaagatgaaggagtgtgaactaccggagaggacatgagtgcctgaaggataaaactactacttggctcctggttccgagacattttttgtatataagaattgaaggttgatgttgttaggcatcctgatatttttatgtgattttttaaaatgtgaaatttgttgatttttatttggcaacaaatgtagcatttttttgcttgtttgtttttgagacggagtctcgatctgtcgctcaggctggagtgcagtggcacaatctcagctcactgcaacctctgcctcctgggttcaagcaatttttctgcctcagcctccgagtagctggctaatttttttatttttagtagagacagggtttcaccatattggccaggctggtctcaaactcctgacctcgtgatctgccttcctcggcctcccaaagtgctgggattacaggcataagccgccatgcccagcccaaatgtagtgttatttttaaaacactgcataggccaacactgtctaaaccaaacaaaacaggtctgtgggctgaatttggtccaatggttgcagtttattatacaacagtttgcccttttttcatggcaacactatgtatctatgggagatcattccttatcaggacatacagacctaaagcataggttttcatggctagtacggatgtaatttatgtgtctagttcctatacatggacatttatactgattccaatcttttcccatttcatacagtgcagaaataaacatcatcatgcatacatctttgcatacatgggaatgattccacaggataaatgcctagaagtagaactgcaaaacaagggcttcataaaacatatgataaccatatataaatggtgatggtggttagtttctcctttttttatggttaaagtcttttatccctaatttttcttttttgttgttgttgttaaagtctcttggtttctcttattttattttctaaaataacaaggaagtaacgattacaaagacactttttgtacaaccctacaatcccaggaagatctacagtttgcacaggttggtacagcaaattgctctctggacctgccattgaaacagtcaccacaataaataaagaaaattctaagagtcctgcatttgggaagtttactatcaatggctaggtctactcttggtggtattgtgagtgcatgggtccagacttatgattctgacaattaagggaaaaggaattgtctttatgctctgtgtatttgtgtatgtgtgtggcatgggtggggggcgggtagtggggaggaggtgaaaggtccctgaagtaaagaggatgcacaggacccttttattttagtccctaaaaattggcttcataaccgttcacaggccacatcccttttacgggccctggtttccttacaaaacataaaaggtttgtgttggaaggggaaaggagtatttaaagtgatggaggagaggagctcaagatggctgagatctgggcctgtccaacattgagaaatttgggaggggagccatcaaagaagcctgggagcagcagttccagggaaaaaggagaatgtgatggccagagagccaaaagaaaaagtagttgaaggagtgctcagcactaggcatctgaactgaatgctgtggcaggctcactggccacaaacaatagggagctggtggaggccttgacgaggaccatttcaacaaactggtgggcttaaaatccggaagaaacagttgaacaaatcattttgacgccttttataaaccacacaagcttattccaaacccgttactggcctaactgatttaagtccctttcccatctgatcctcagagattctaagggacttagcctatccatgactcttcgtcctgcttctcacctcccatgattgccctaacgatgtgaaagtgctttcaaacaaagatgcccaagaaagaaggtaggcaaatgtgcaagcattagtttgtagtacgctattactgtatttcaccttgcactctctagtttccttcgtgctccctcaatatccaactcttaataaattcatggctcccggtgagcattcatcaattctcattccacgcctttagcccttcccgttcccgcccaactctcgctccctcccctggccaaatctctaacctgcaaggctaattccgaattccaaatcggaagcaagagggcggggccccgtgagaggcgatggattgctccagtccgttcccgacgcactgtgcgcatgcgctggtcctccgcggaccgttcgtgctgcccgcctagaaagggtgaagtggttgtttccgtgacggactgagtacgggtgcctgtcaggctcttgcggaagtccatgcgccattgggagggcctcggccgcggctctgtgcccttgctgctgagggccacttcctgggtcattcctggaccgggagccgggctggggctcacacgggggctcccgcgtggccgtctcggcgcctgcgtgacctccccgccggcgggatgtggcgactacgtcgggccgctgtggcctggtaagtgcaggctctaatctggccccgttaattctggggcctcttgagagtggggctgtcttatctctatctccaaaaatgtgcaggtgactctcaggccaggccgacggcagttggagaattcccagatgttcttgaggacccagaatgacaggagccctggctgggcttacgttcggagccggcttcaatactggcccttttctctggccctacccaacccgaaaattctggacgcctctcaatcttggcccgtctctattgtccttttgtctctgccctttacacccttgtgtcttcagtgttctgtctgtctctggttgcctcttttgccttttttctgtcctctccctgccaggtttggctctgtccatgagtcacctctctccacatttctcctaactctcggtgtcttctttttcttccatttccacgccatgtgtacattgcatcttcaggtacctgggctcttctatcggggaaaggggcgtccgtctctttccctagcccgctgatagaagtcagaactagagcaatgacgcacacggtgtcagagacggtgattcgagatgccctttcaatagcagcttttttctgtgtttcgggagggagacttactttttgatgcaaggtcgtgaacgtggcaccacctttctaatctcaatcattgttgccctggggtggtttaattctaaatagaaaatcatagaaatcttttcatttctgtgcgttactatatgcattgtaatgagattaaattggattttataggaaattttgttctagtatcattagataccttcaagcttagctcattgttgcaggcatttgataggaagtaagatgcatcaagcaaaattggaaaaacgtggttttcctgaattaacttctaagcagttgttttgaattttttccagacctttttaagtggtatagata

SEQ ID NO: 1088 - DNA, 6000 bp, Homo sapiens
catagctgattagtccagatggacagccaacccacactgggcaagactttggagcctaagattttggaagtttgaaccaagagacgcagaacatggcagctgttgaatgctatactacgacaaaaagtatatttggtcttggtccctggttccggtcaccaagtgtctaaaacccttgcgatttcctgagtgtgggagcgtcttctttcttcataaggaactccttcccaccacacctgagtttatgttaatgaagtgactctgggtggggcctccagatatcactagaaagacccggagattggttggcaggaattctcagcccctctcccactccacctccacctctggggatgaggggggctggggattgagatatgaaaatgtgtgaataatgagattcaggagagcctcctggctggtggatgccccgaagtgctgagcggctgccgcgcagagaaggcttgggagctcctcgccccaccatgcccgatgcactcccgttagctattcctgagctgtgtccttcataataagctgggaagcattaagtgtttcctgagctctgtgagtcattctagcaaattattgaacctgaggaagggtttgtgggagccccaaatgtgtcatctgccttgtgggtggcctgggcaccccatgtgcagccgtcacctggagtggggacagccttgtggaacggagcccttggcctgtggggtctgtgctaactctgcgagtgagtgtgaatggggttggattgtaggatagccagttggtggcagagtctgacagctggacaatttcaagttatataaaccaaaaataagatactaagctcccccaactgactgaatggaaccccctacccccaccttcagccaagggggtttcaaagaaacctgaaaaatcagttcaggacacgatggcggcgcatgacttttcttggtcacttgtcagccagagacccccagccagcgacacccttgctcaggcccaggtttgccacaggagatgcccattcacttggcccatcatgtcatgccaggcccgcactccagcgtttgcggctgttccgactgtgcactcagcccccagtgggagggggtgtgagcgagtgagtgcggggtccagccaacggttccaagtgtcagcacagacgcaggctccatgcagggcttgtggctggaccaggcatgttgcaagccactcccatggtggactccggcgtccagacaaggggaacacggtggcgcccaggtaggggtgctgtgatcctgaagccccagagggggtgttacagcatgctaattagctcttttagtctgcatcctgatggacagtggtgcgtcaacagctctgtcagccgcttgccccgcatcagcccatggctccagggctggctcagtcccactgctgcttctgtcacatggggtggctgccctctgctggtgaagggcaaagggttatggagttacagccttctctgtattcacatttggtgcatcctgagctcttgtcccacgtccaagaagaatgatgatacactgacaattgaagggtgaggaggatggagaagaattttattgagtgacaaagcagctctcagtggagcagggatgtgagggtggtcccccacctgaagtcggatggtttctctctccatgtggctgggtttggggctttcatgggctcagagtgcacactgattggtttgtgaggatgcaaaaatggctaaaacaaaggcatcactcaaaggtggggacaacagtgtaaaaagcaattaggggctgggtgcggtggctcacgcctgtaatcctagcactttgggaggctgaggtgggtggatcacaaggtcaggagattgacaccatcctggctaacacggtgaaaccccatctctactaaaaatacaaaaaaaattagctgggcgtggtggcgggtgcctgtagtcccagctactcgggaggctgaggcaggagaatggcgtgaacctgggaggcagagcttgcagtaagccgagatcgtgccactgcactccagcctgggagacagagcgagactccatctcaaaaaaaaaaaaaaccaaaaaaacaaccaaccaacaaacaaaaagccaattagggaaggataggtatatgtaaaataggtgaagggtggggaccaatcagaggaaagcatgccaggcaggaagacaggttcccaatctagtccatggatttacctgggacttgtaggtcggctttaaactgtcttcggcttgaaggtcgggtttcactgggtaactgctcggtctgcctcctgccactattaacgtgaagggagagttggacatgcctcagtatcccctcctccctttcgagttcaggcacaaaacttaccagcattaacattaaaacagagatcttaagactgacaaaacagactctgtagcaataagatgccaaattccaacttgactctagtagagcatcacatgacagatagctggccttgaaggaaatcaaagtgttttaccccaaaatatatttctttgacatattttgaaagggccctgcaaagctgtctcttgtgggagaaatttacattctgtagggaatcccttgcccttcctttccgggtcttttctgattctgaagaagttaatggttaactgagagtctagcagctcttgtttttttttttttttttttttttttttaggagtctcgctgtgtcacccaggctggagtgcagtggtgtgatcttggcttactgcaacctctgcctcccaggttcaagtgattctcctgcctcagcctcccaagtacctgggactacaggtgagtgccaccacatccagctaatttttgtatttttagtagagacagggttttaccatgttggccaggatagtcttgatctctgacctcgtgatccgcccgcctcggcctcccaaagtgctgggattacaggcgtgagccacagcacccggccaagtctagcagctttttaagatctagatatgaaacatttgccatctattgcttctaatggtggccacctatgaggcttcatctatgtaataagaacgttggtctccacaaccccttttaacccagatgctcctttctctcgattccagatctttagataagcactctttcaaccaaatgccaatcagaaaatctttgaatccacctgtgagctggaagccccgctgtgctttgtgttgtcctgccttttcggaccaatgtaaatctcacatgtactgattgatgcctacatctccttaaaacgtataaaatcaagctgtaacccaaccaccttgggcatgtgttctgaggacctcttgaggctgtgtcactggtcatgatccttaaccttggcaacataaacttctaaactgattgagatctgtctcagacactttttggtttacaaaaggactaattcaaatacagttttatcttccaacataagaaaacctagaatgaatgactcaaaggttgtagagggttaaacaacctctccaacgtgcaaacctctgccttataattcctaagtatttctgactgtagatggtactaggataggatcattttaccatggaaatgaaacccgtgtcctttcctttgggttaatcttgaatccctggtgaagtgaaggcagtctctaagaggagtgcagtccatccaactgctgcagtgctcctgtgtactactgggaccatcccggagagtggcagacacgatgcgaaccgtgaaaggacgcaaagagtacagagtgcatgcttccatctctataggaaggtcaggaacgctgttacggggagcagggttagaatgatggggatatagcccgggaaggggcagaggagctttctgtgccacgggaaatgtcctaaatctcaaccaggacacggttagataaaagtgcaaatatgggtgaaaattcattaaagctgtatagttaagatttgtgcacctcactgtaaaacttacttcaaatgtctaaaagactggagtctgcagccacacacttgaggaataacactttccttagtcccaactcctgtttaagtaagacagagaaagattccacagtgcgggtcggatgtcttgcggctgtaacatgtagcagcctccaagcggaggttctcccttcatcgctgtgtcaccttagatgtttttcctttgtttaaacaccaaatattttaaaagttgtttagaaatgtgttatgtgaaacacaaggtggtttaattgggacgtcatttcctaattaataaaatctaatttcagttttattttggaaaggagggagacgggtggtgtttgaaaggctgagaatgtgaagtggctgaaatgaaggcagcgcacgacctggatgccagcgctgcccgccctgcaaggagagggcggagaggccacacgcttctcatgcttcgggagtttctgtccataaatcagttttaggtactgggcctttcctcttccgttgggaagtcggaggttccacatcaggattccagcagctgtaaatcggtcaaaataaggccaaagaaaaatagctggctacaggcgcatgcggccaggcgttttgttggcgttgcccttggtaccgcaggcacgagggacccacaggggaccaccccgcgggagccccaagtaactggacggacgccaagtcccccagcccgctcggccccagctccacccgcccgggccgcagcccgcaccccatcggcccgccccgggccaggagcatccccagctccggcgtctgcggcctgaacccggtagcgaattcaaggtggaaaccgccagccggggctatcgttgattggctgaacgagaggaaacccggcagtgattggttcgcgccttcttccgcctccggccgactgggcggatacgattggtgcaggggcatcggcccgcccccatcctgctccggccggcgcgtggcgtcatttcccggcgtgcagcgcgctcgcgcgtcccccgcccgctaatgttttggccgcttcaagatggcggtgcaggagtcggcggctcagttgtccatgaccctgaaggtccaggagtacccgaccctcaaggtgggcgcctgcgccgcgcaggctgagggcagcgaaggcgtctccagccagtgccctcgggccgcgaggggccgccccgggagggccagcggcgagggcggcgggagctgggcgcggcctcgcggggccgtgcgggcttctcaggggcgcccggtccgcgccgggcaggtgtggcgggggcggcggctttggccctgccaggcgcccgactgtggcccctctgcttgaagagctgcgtgagccgagccagcgacgactctggcagcgctaagggtggcgaatttggggctggggtggaagccggagtttgcggggcgtggggtctctggcgcccaggcagacggagtgcgcggcgtgcccagccagtgcccggccgccctcccgggagcccagggctgggaggtgccggctgcgccggtcgctagttaggaactgtagggagaaacctcacggcctgatggcacccagcgacctttttgatgggcgtcaccaaacctgaaatacagctcttgccgtccggctgccggttgcgtgaccttgggtggtcacctagccacgtcgcacttcttagaatgaaatttgtgctcctagtagaaggagccgatacttgttctttacctagttagtagaggatttgatatgaagcacctgggaaggaattccttaaaagatcaaggtcatagctttcctagagctgcggctgagcttcgtggttctgtgttgccttcctggagagctgcgtagtttctctctcctcccagagcgccctggtgttcacgtccgtctgaggacggacggtgtggcgacaggtgtggaggatgcagtatggccaggttgctgtgcgttcccccagccccagggcagttcagcgaagggctgaagagcacaggctgtgagccatcctgctggggtgtgaatcagg

SEQ ID NO: 1089 - DNA, 6000 bp, Homo sapiens
tggatggagttgagattggatgcctggtggatgagtgtgcctggtattggatgaagttgagattggatgcctggtggatgagtatgtctggtgttggatgaagttgagattggatgcctggtcaatgagtgtgcctggcgttggatgagttgagattggatgcctggtggatgagcgtgtctggtgttggatgagttgagattggatgcctggtggatgagtgtgtctggtgttggatgaagttgagattggtttggatgaagttgagattggatgcctggtggacgagtgtgtctggtgttggatgaagttgaggttggatgcctggtggatgagtgtgtctggtgttggatgaagttgagattggtgttggatgaagttgagattggatgcctggtggatgaccgtgcctggtgttggataaagttgagattggatgcttggtggatgagcgtgcctggtgttggatgagttgagattggatgagcgtgcctggtgttggatgagttgaggttggatgagtgtgcctggtgttggatgagttgagattggatgagcgtgcctggtgttggatgagttgagattggatgcctggtggatgagtgtgtctggtgttggatgaagttgagattggatgcctggtggatgagtgtgtctggtgttggatgaagttgagattggatgcctggtggatgagtgtgtctggtgttggataaagttgagattggtgttggatgatttgagattggatgcctggtggatgagcgtgcctggtgttggatgagttgagattggatgagcgtgcctggtgttggatgagttgagattggatgagcgtgcctggtgttggatgagttgagattggatgagcgtgcctggtgttggatgaagtcgagactggacggggcctgaatccatatttagatgctgtccagaaatgcgccctgaagactccaaatgacacgaaaacatgcccggtacgagatgcggccgagccagttggggtacacggctgtctgtgcagtctgctcacatgtgcacgcacgccagggggtgtgtggggaggcaaggaggagccagactgtgctctaacgggtccctgggaccagctgtgagaacctagatgggaaaagaaacttgagacccaagtttgacctggctgagagatggatttcacaggcatgggtgggtgagtggccctgaaggcccctgaagcagtgatttgtttgctgcacgtctgtgcgaaagccacacggagccatcagtgtgggcgcctgtcgcagggcgggcacagccttgttggcgctccacgccgtatgggacagtgtagactcggtgttttagatttgggtctgaatacctaagtttcacgacatagacacacttacatattagtggaccaattgaaagtaacctactagagcaaaaggtgttattgaaaagcaggtttgaggtgtctattgtgtgaagcggtaacctagagtgggcccagagtcctgctcttctagagcaccccctcggcagctgcgtcctgcctttagacagagccccggcactcgcctgctctagacacggcagccatcaggcagcccctgggaggcaggtggggccctggtggggagcctctatctcttcccgctggcccttcccttcctctcctgccaggctggctctgaagggagcggagtgctgaccgaagtctgcctgctgattagtggggtggggactcgggaccctgggatgactttgtgcctctcggctgatttgtaccaagcctggcactccccacccagagcctgtgccactgctggggtcagagacagtcctcctgccccagcttggagcaagcctgtgagttctgcgtccagcctgttgacccgtctgtctagggacacagggtgatgaggggctgagggtacagggcagaggcagcagggcagggacctgagcccctctgagcccctggaaggcaggtggcccccgggggtctgggcagcccagtcctccccacacccacgcggagccactgctgtgggtgctatgcgtgtcggggcagcaaggctggcaggcggggtgggctggagcacaggtggctcctcagaaagctcagtggggaaagctctgggaagcggaagtgatgagcttcaacttaaatgcagtggtccggggtggattcatctgccacgtggagtttctgttcatgccgtcctgagagccaggccatgtgaacccagagtgacacgcggccccagcccaagactcgctccgtggtgcccacgcctatatcctgtttccggggtgaagccctgagaatgtcctgaaaccacacggaagatcttacggtttagacggacatgtcacttccgtagaatccgcgtctcatcttggatgactgcggtcaatgttgccgctgcccccaccccagccacaagtctcggcccacgttggactgaggttgctgagatttcagattgagggttgggcttcccttaggtgcacgtgagaggctcataggcagacacatgtgggacttggtcctgcaggagcttcccccacccccgcccctgcctcaggcatagtgccttcagccagcagccccaactcggcctctctccgtcttctacacatcctggaagcgccctcccttcacgcgagccgccccttggcctcacagccacctaggacctcagtgtcccctgggccaggcctccattccatgtgccacccgcctggggcctcggcaccggccccggcttctgcccgccatgttctcgccaggtgtctgtgcggtcccccgtccataacctcggtgcaggcgctccccgccctaccgacctgggtcctgcctgctgcaagcttgcttctctgcctcatgcccctgtgaggcaccagccagcaaccccacatgtggtccctgtctcctccccgccctgccgacctgggtcctgcctgctccaagcttgcttctctgcctcatgcccctgtgaggcaccagccagcagccccacatgtggtccctgtctcctccccacccggggcatcagcgcctcgggacaggacttgcccacgttctcccagaacagccccgggttcaagccagcacccagtctacattcgggatagttgggtccagaggcccggtgggagtgtagaggaagcagtggcctcagggcgggacccaggaagctgctttgtccttgcagaggggttggtgcctttgctccagcagctgcacctgctgctctgccctcccagctgtgctcctggaagcgccctgagcgccctggccttcgggttgaaatgctgggcggctgcacgccccaccgcagctgcaggagcagggggcgggactcacattcagaacccagtgttccctggaaagtctgctgcaggttaaagtggcagcttcagcctcagccctgccttccccgtgcctgtgagagaggggttcagagctttggttgtggggtctgctggtggacatgcgggtgcggcacccgggcacctgggctctgtgggatgtgctgtctaagccctcgtcttgtctttgccctcagagctgcctggagttcagcctcagaatccaggagttcattgaactcatccggcagaataagagactggacgctgtgaggtaggcattgcggacgtgcgtctcctcgagggagggcaggatgttcggctgcggcccctgccagccctccctgtcgtggtctgggtcctgggacgtcccctgggtcgtcccctgggtcttgagtctgacccctgcctgctcaggtggctgcttctcccactgttcctgaatgggacttggggagtgaggcctggagcctggcagggcccccgccaaggtgtggccccaggtgggcatccagacccccgtggctgccaggggaaccagctttgaggtcccgaccgtccacgtaaaacacgtggatcaggctcccggcaccccctttccacattggaaagtgccgccagcctcagtagatgggagtgtctctgacgtgtggtcctcaggtagctccaagcgtcctgagcttgggaatgtccctcacagtcatcggggaatgttgacagcgtgtgatgagggcacttctgggttctccggcctgtctccgacccaagggcggcgtgcagtgagctgaggccagcggcgccctggtggtcaggcctgagaaggggatgctggctgtcactgtggctcagcccagttggggtgcacggcgtctgcaaaggaagagaggctgtccgctggcttcccgctggctccccagagtgggcatcgtcaggcagcagtggtccctggcctgggcagtgtcggccagttcatgctcaccccgtctcggggcagggctgctccttgagtgctaggtcgtctcactcactttcatggaggttcctgagcggccaagccttgcggtgacgcttgagttgctgtgtggggtgtgtgggcctggctggccctcagctcccgggcgagtgcccagcaggtgtgtttgccaggagggggcacctgtccatgcccacagaaacccgaccgcgactccatatccacctgcagtgggccgggtggccgagtgttccacagaaggcccatttggagaagtgggcgtctcacgatgaggtgctgagggtggtccccaagacgcacggcagaaccgcggcaagtccctgcccttgcgtggaccctggagaggcccggggtcctgctccggctcctgatgctgacctgggcgcatggtggcaggtcaggcctcgtcttcacgcacgagggagccaggcctgcaacgaggtcccttctgtgcctgagagggctaaagcggggatctcgggacccgggccagtggagagtggcgtgtgagcattgcggggacacggccaggggccccctgtcaagaggaggggctcccgctctgctctggcctccgtgtggcctcggtgcctgtgtcgctggcctctgtccggcggcagtctgcttccatcccgagtcagcctccgtctccttgagggccccggccactgtcagccctggagtctgaaaacaaaacgtgtccatcccggagtccctccgtcacagatgtcttcatctaggtggcagctggttccgcatagggtctgttgacctgttacccccactccgcatagggtctatttgcctgtgttaccctggctccgtgtagggtctgtttacctgtgttccccccgctccgcgtagggtctctttgcctgtgttccccccgctccgtgtagggtctctttgccttgttccccctgctctgggtagaatctgccctagagactcgcggggcctccacctcataatgtctgagccgagctcagagctgtgccctctgcggcctcgtctgttgcaggggagcaggcaggtcccaggaagtgcgtgtccttcctcccgcaagcagacacgtgctgcctcgaagcctcagcagccagccgggcaggcatggcaaacaacaccccagtgtctcgggggcaggcgcagtgtgagctacatcctctgctggggccgtcttgggagtggttctccaggtgccagggcctggtcagggaagtccggcctcagctcagcgtggccctggagccacccacaaggcacacgggagctgggctggggtggcaggtggggcatcggcaggacgtttgtggggtgagggagtgcgggtgtttggctgggagcccagagggtgttgtgtatcactcactgaggctggacaagagggaaggcggagaagcctggccacatgtctcctgagggctccaggcagggccctctcacctgctgccagggtcccagcccgcaggagcttcccgtccacctctgaactcacggtccacatggcgctggagcgtcgggcaccatctacagggcttgaggccagcagcctagcctctgggtccactggggcaggcaaggtgagtcctgctgtctgtggagccagcgtgctgggccgggcagggggcctcgttggctggggtggc

SEQ ID NO: 1090 - DNA, 6000 bp, Homo sapiens
gagattggatgagcgtgcctggtgttggatgaagtcgagactggacggggcctgaatccatatttagatgctgtccagaaatgcgccctgaagactccaaatgacacgaaaacatgcccggtacgagatgcggccgagccagttggggtacacggctgtctgtgcagtctgctcacatgtgcacgcacgccagggggtgtgtggggaggcaaggaggagccagactgtgctctaacgggtccctgggaccagctgtgagaacctagatgggaaaagaaacttgagacccaagtttgacctggctgagagatggatttcacaggcatgggtgggtgagtggccctgaaggcccctgaagcagtgatttgtttgctgcacgtctgtgcgaaagccacacggagccatcagtgtgggcgcctgtcgcagggcgggcacagccttgttggcgctccacgccgtatgggacagtgtagactcggtgttttagatttgggtctgaatacctaagtttcacgacatagacacacttacatattagtggaccaattgaaagtaacctactagagcaaaaggtgttattgaaaagcaggtttgaggtgtctattgtgtgaagcggtaacctagagtgggcccagagtcctgctcttctagagcaccccctcggcagctgcgtcctgcctttagacagagccccggcactcgcctgctctagacacggcagccatcaggcagcccctgggaggcaggtggggccctggtggggagcctctatctcttcccgctggcccttcccttcctctcctgccaggctggctctgaagggagcggagtgctgaccgaagtctgcctgctgattagtggggtggggactcgggaccctgggatgactttgtgcctctcggctgatttgtaccaagcctggcactccccacccagagcctgtgccactgctggggtcagagacagtcctcctgccccagcttggagcaagcctgtgagttctgcgtccagcctgttgacccgtctgtctagggacacagggtgatgaggggctgagggtacagggcagaggcagcagggcagggacctgagcccctctgagcccctggaaggcaggtggcccccgggggtctgggcagcccagtcctccccacacccacgcggagccactgctgtgggtgctatgcgtgtcggggcagcaaggctggcaggcggggtgggctggagcacaggtggctcctcagaaagctcagtggggaaagctctgggaagcggaagtgatgagcttcaacttaaatgcagtggtccggggtggattcatctgccacgtggagtttctgttcatgccgtcctgagagccaggccatgtgaacccagagtgacacgcggccccagcccaagactcgctccgtggtgcccacgcctatatcctgtttccggggtgaagccctgagaatgtcctgaaaccacacggaagatcttacggtttagacggacatgtcacttccgtagaatccgcgtctcatcttggatgactgcggtcaatgttgccgctgcccccaccccagccacaagtctcggcccacgttggactgaggttgctgagatttcagattgagggttgggcttcccttaggtgcacgtgagaggctcataggcagacacatgtgggacttggtcctgcaggagcttcccccacccccgcccctgcctcaggcatagtgccttcagccagcagccccaactcggcctctctccgtcttctacacatcctggaagcgccctcccttcacgcgagccgccccttggcctcacagccacctaggacctcagtgtcccctgggccaggcctccattccatgtgccacccgcctggggcctcggcaccggccccggcttctgcccgccatgttctcgccaggtgtctgtgcggtcccccgtccataacctcggtgcaggcgctccccgccctaccgacctgggtcctgcctgctgcaagcttgcttctctgcctcatgcccctgtgaggcaccagccagcaaccccacatgtggtccctgtctcctccccgccctgccgacctgggtcctgcctgctccaagcttgcttctctgcctcatgcccctgtgaggcaccagccagcagccccacatgtggtccctgtctcctccccacccggggcatcagcgcctcgggacaggacttgcccacgttctcccagaacagccccgggttcaagccagcacccagtctacattcgggatagttgggtccagaggcccggtgggagtgtagaggaagcagtggcctcagggcgggacccaggaagctgctttgtccttgcagaggggttggtgcctttgctccagcagctgcacctgctgctctgccctcccagctgtgctcctggaagcgccctgagcgccctggccttcgggttgaaatgctgggcggctgcacgccccaccgcagctgcaggagcagggggcgggactcacattcagaacccagtgttccctggaaagtctgctgcaggttaaagtggcagcttcagcctcagccctgccttccccgtgcctgtgagagaggggttcagagctttggttgtggggtctgctggtggacatgcgggtgcggcacccgggcacctgggctctgtgggatgtgctgtctaagccctcgtcttgtctttgccctcagagctgcctggagttcagcctcagaatccaggagttcattgaactcatccggcagaataagagactggacgctgtgaggtaggcattgcggacgtgcgtctcctcgagggagggcaggatgttcggctgcggcccctgccagccctccctgtcgtggtctgggtcctgggacgtcccctgggtcgtcccctgggtcttgagtctgacccctgcctgctcaggtggctgcttctcccactgttcctgaatgggacttggggagtgaggcctggagcctggcagggcccccgccaaggtgtggccccaggtgggcatccagacccccgtggctgccaggggaaccagctttgaggtcccgaccgtccacgtaaaacacgtggatcaggctcccggcaccccctttccacattggaaagtgccgccagcctcagtagatgggagtgtctctgacgtgtggtcctcaggtagctccaagcgtcctgagcttgggaatgtccctcacagtcatcggggaatgttgacagcgtgtgatgagggcacttctgggttctccggcctgtctccgacccaagggcggcgtgcagtgagctgaggccagcggcgccctggtggtcaggcctgagaaggggatgctggctgtcactgtggctcagcccagttggggtgcacggcgtctgcaaaggaagagaggctgtccgctggcttcccgctggctccccagagtgggcatcgtcaggcagcagtggtccctggcctgggcagtgtcggccagttcatgctcaccccgtctcggggcagggctgctccttgagtgctaggtcgtctcactcactttcatggaggttcctgagcggccaagccttgcggtgacgcttgagttgctgtgtggggtgtgtgggcctggctggccctcagctcccgggcgagtgcccagcaggtgtgtttgccaggagggggcacctgtccatgcccacagaaacccgaccgcgactccatatccacctgcagtgggccgggtggccgagtgttccacagaaggcccatttggagaagtgggcgtctcacgatgaggtgctgagggtggtccccaagacgcacggcagaaccgcggcaagtccctgcccttgcgtggaccctggagaggcccggggtcctgctccggctcctgatgctgacctgggcgcatggtggcaggtcaggcctcgtcttcacgcacgagggagccaggcctgcaacgaggtcccttctgtgcctgagagggctaaagcggggatctcgggacccgggccagtggagagtggcgtgtgagcattgcggggacacggccaggggccccctgtcaagaggaggggctcccgctctgctctggcctccgtgtggcctcggtgcctgtgtcgctggcctctgtccggcggcagtctgcttccatcccgagtcagcctccgtctccttgagggccccggccactgtcagccctggagtctgaaaacaaaacgtgtccatcccggagtccctccgtcacagatgtcttcatctaggtggcagctggttccgcatagggtctgttgacctgttacccccactccgcatagggtctatttgcctgtgttaccctggctccgtgtagggtctgtttacctgtgttccccccgctccgcgtagggtctctttgcctgtgttccccccgctccgtgtagggtctctttgccttgttccccctgctctgggtagaatctgccctagagactcgcggggcctccacctcataatgtctgagccgagctcagagctgtgccctctgcggcctcgtctgttgcaggggagcaggcaggtcccaggaagtgcgtgtccttcctcccgcaagcagacacgtgctgcctcgaagcctcagcagccagccgggcaggcatggcaaacaacaccccagtgtctcgggggcaggcgcagtgtgagctacatcctctgctggggccgtcttgggagtggttctccaggtgccagggcctggtcagggaagtccggcctcagctcagcgtggccctggagccacccacaaggcacacgggagctgggctggggtggcaggtggggcatcggcaggacgtttgtggggtgagggagtgcgggtgtttggctgggagcccagagggtgttgtgtatcactcactgaggctggacaagagggaaggcggagaagcctggccacatgtctcctgagggctccaggcagggccctctcacctgctgccagggtcccagcccgcaggagcttcccgtccacctctgaactcacggtccacatggcgctggagcgtcgggcaccatctacagggcttgaggccagcagcctagcctctgggtccactggggcaggcaaggtgagtcctgctgtctgtggagccagcgtgctgggccgggcagggggcctcgttggctggggtggctgcagctccgccctgcctggggcatttgtgggtttttgcgaaatgcaaaagtatgagctgctagtgattaacttttaacgcctttaatttttagtaaatgagtaagtgaatccctgaccccaggcggctgggacctggcctgtacttcatgggctttgtgtgagcagctccgtgccgtctgtcgcacacccacacctcagcctggccaggcacagtttaggaattttgtcttctgggtgtttctctctctctctctttccgtgtgtgtgtgtgtgtgttttgaggttgagttttgctctgttgcctggcacaatctcagctcaccgcaacctccgcctcccgggttcaagtgattgtcctgcctcagcctctgagtagctgggattacaggcgcccaccaccacgcccggctaatttttgtatttttagtagagatggggtttcaccatgttggccaggctggtctcaaactcctgaccttgtgatccgcccaccttggcctcccaaagtgctgggattacaggcgtgagccaccgtgcctggcccgtgtgtttatatttttaaagaaaaatggaagtttttgtgtttcttatgttagctgcatttagtttgttaaaagtcacggttttgtttcccctgtgtcctgtggatgcataccgtgctgttctccccggacctgctctgagggccccacatctcggctgcagttctctgtgtgttggggctgaatgctggcatcaaacgatctgaaaagagtcagccgccactgttaggttttctgtttctgtcttggggtcaggatttgtggatcagggacctggggtgcgaggtgaggcagcttgttaggcggatgatgt

SEQ ID NO: 1091 - DNA, 6000 bp, Homo sapiens
cacacttaactccaacatttttaaaggctgttttaaatctcatttttgtctaaaaatcaaagtctacaagggaggaagcccacagtccagaaggtcctcactgagaagaacagctcctggcatcctcactccccaggactggttgcctctgggcttctggtggcttctgccattctctgaacaaaatgcttccttctgtttcttgcctgacccatggcaacggggcccattttcctgccacgagacacggttgtgccccctgaatctggcaacagatgagccttggggctggcactgcctgcctccctctttaccacactgcagggctgcgtccggtgagaggtgcatgctccacccggcctaggcccgaagtctcagccccctgtatgggtcagcctttcctgcatttctaacaaaatcctctccagagcaagcgagagaaacaaggtgccaactcacagtctgggaagctcagaccccacccctgaagatcctcgtgacctaatgatgatttattatgagatgccccaaacgcctgagaaccaggagaattcaggctgagcttccagcagctttcagaaggcagcaggtctgggactgcccagggctttgcagtccctacagggtggcaggtgggggctgccgggaaacaccccggcctctgacagagactggtgccaggctcagagaacaaactgtcaactccaggaggttttatctgcttcccccttttccaggaactgaaactgttcccagtgtgatgagcacaggggtgggcatgggggtggatgcaggggtgagcacatggtgggcatggggtgggcatgggggtgagcacggtaggcatgggatgggtgcaggggtgagcacacgggcatgggggtgggtgcaggggtgagcacatggtgggcatggggtgggcatgggggtgagcacggtaggcatgggatgggtgcaggggtgagcacacgggcatgggggtgggtgcaggggtgggcacatgggcacgggagtgggcatgggggtgagcacaggtgggcatgggggtgggcatggggtgggtgcagaggtgagcacgggcatgggggtgggcaggggggtgagcacacggtgggcatggggtgggtgcaggggtgggcacatgggcacgggagtgggcatgggggtgagcacaggtgggcatgggggtgggcatggggtgggtgcagaggtgagcacgggcatgggggtgggcaagggggtgagcacacggtgggcatggggtgggtgcaggggtgggcacgggtgcagagtggagccactcacccaggagcagccagctgctgggttggggccaggtctgagcacagggtgcctggttagtgatggcagaacccccaaccctaccccagtgaccgcggagagtcggaggctccaatatttacagataaaatacaaagcgtcagcaagagaaagaaccacggaagacggtgcagcctaactcctgactcaggggctgtagagaaaggagaaccagggggacaggcaaggaagctgggccccggctgaacgctccaggctgaaaggcttcctgaacctttctcaactgctttttttttttttggagacaaggtcctgctctgtcaccccagctggagtgcagtggcacaatcttggctcactgcagcctcaaccttatgggctcaagtgatcctcccacctcagcctcctgggtagctggactataggcaggtgctactatgcccagctaattttcaaaaaaattttttttgtagaggtggggtctcactatgttccccaggctgttctcaaacccctgggctcaagcagtcctcccacctcagcctcccaaagtgctgggattccaggggtgagccaccacacacagccctgattcaaatttcttatgagcaaaatgggagtcaaacaagaaaagcttgtcttggcaggctggacaggctgtgtggctgggatggggccctcacgtcccgccccacgtgtggaagcagctacagaccagagacacaccctggatccccaccccagcatgacaccgaccccagggacgcacgccctaccttgtacggggagatgtgcgtgtcgggcgggaaggccagcatgcccatggcctggcgcacctcgtccagctggctcccttctgcttggctgaagtgctttcttgcatgtctaaaaaacaacattttggcacatttaagtttgcgttttaattttaacttttagagacagggtttcactctgtcacccaggctgcagtgcagtggcacagtcacagctcactgtagcctcgaactctcaggctcaggcgatcttcccgagaagctgagaccgcagatgtgcagcaccacacctagctaatgtaaaaaacatcttgttagagacagattctcgctgtgttgcccaggctggtctccaactcctgggctcaagccatcttcctgccccggcctcccaaagtgctgggattataggcatgagccgctgcacccggcctgcatttttaagttgaaaaatctgagctaacagcttttatgtcagagtctaggtacaaagtaatcgcctcactccaagccgacctgctgggtggggctgggatggcgggaggtgcggctcaccagaggctggaggagcagctaccagacactccttcctccaggggaccagggcacccaagccacacagacaacccacggaaaacaccagaactgcaaatggcacctgcccccgagggctctccaaagcgattctggtttacaaggaacccaaaccctgaggattcccactctccccagatgctcgcccccacggaccccgtggccccagcggaccaagaacgtgtagtcttctcaactgcagtccttgctgtttggcagtgacgcccagcacaaccttccgaagaacagcctccctcagcccacaggctggactccctgcagatccggcccagccctctcagccctgagcgtgccacacaccacatgcagccacgatctttcctgagccaactctgcgggatgcacacaggcctactccaggccagaaccccactccagtctaaggctgggcaaccaagaaaccaaagcagaacataacagatccctttcaagctgaccagcgggcacctgctcacccccagggcccccattctcatgcccccccccacacacagggtcactgtccctctggctgtcctgagggcctgcacccccatgtcctgaccctcacacgggcccctgtgcaccccacgttctcagccctcagggcccctctgccaaagcgaccccaatgcacagaaccaggggcctcaagtcccatgtgtgagtcagccctgtgctgtccagaacaaggcatgtaccaaggaacacagggctgaggaggtgccaggcgctcacggtggccttggagaagatgcagtgtctcgcagagactggagttagtgtaggaggtggcccagcagccccttgatggatagcacggggaccacgtgttggaagcaccaccaggagagcccggggcagcagggagtggggggcgtccacgcttgggacccagcctggggagtccacatggctgacgccccagggcctgtgcagggcctgggagtcgggggtgaatccacacggccgaccccgcagggtgcatacagggactgggagtcgggggtgagtccacacggctgaccccgcagggtgcgtgtgcaggggctggggacggccatccgagattccagtgcccatgcatccccctccttggagcgtgtgggtgggcgtgggtctgagtccaggaggagccccacccaaccccctcattccatctctggagacaagtcacccttcgtcacacgccaagacgtgcacagaacacggccaacgggcatctcacctcctcccagagctgctgaagagaggaaatttaatctccgtggttgacatctacaagatctcatttgcatgacctggtttacgcgtcttatctcaccatcaatcaaaccccagacagacatcatccgcctaacaagctgcctcacctcgcaccccaggtccctgatccacaaatcctgaccccaagacagaaacagaaaacctaacagtggcggctgactcttttcagatcgtttgatgccagcattcagccccaacacacagagaactgcagccgagatgtggggccctcagagcaggtccggggagaacagcacggtatgcatccacaggacacaggggaaacaaaaccgtgacttttaacaaactaaatgcagctaacataagaaacacaaaaacttccatttttctttaaaaatataaacacacgggccaggcacggtggctcacgcctgtaatcccagcactttgggaggccaaggtgggcggatcacaaggtcaggagtttgagaccagcctggccaacatggtgaaaccccatctctactaaaaatacaaaaattagccgggcgtggtggtgggcgcctgtaatcccagctactcagaggctgaggcaggacaatcacttgaacccgggaggcggaggttgcggtgagctgagattgtgccaggcaacagagcaaaactcaacctcaaaacacacacacacacacacggaaagagagagagagagaaacacccagaagacaaaattcctaaactgtgcctggccaggctgaggtgtgggtgtgcgacagacggcacggagctgctcacacaaagcccatgaagtacaggccaggtcccagccgcctggggtcagggattcacttactcatttactaaaaattaaaggcgttaaaagttaatcactagcagctcatacttttgcatttcgcaaaaacccacaaatgccccaggcagggcggagctgcagccaccccagccaacgaggccccctgcccggcccagcacgctggctccacagacagcaggactcaccttgcctgccccagtggacccagaggctaggctgctggcctcaagccctgtagatggtgcccgacgctccagcgccatgtggaccgtgagttcagaggtggacgggaagctcctgcgggctgggaccctggcagcaggtgagagggccctgcctggagccctcaggagacatgtggccaggcttctccgccttccctcttgtccagcctcagtgagtgatacacaacaccctctgggctcccagccaaacacccgcactccctcaccccacaaacgtcctgccgatgccccacctgccaccccagcccagctcccgtgtgccttgtgggtggctccagggccacgctgagctgaggccggacttccctgaccaggccctggcacctggagaaccactcccaagacggccccagcagaggatgtagctcacactgcgcctgcccccgagacactggggtgttgtttgccatgcctgcccggctggctgctgaggcttcgaggcagcacgtgtctgcttgcgggaggaaggacacgcacttcctgggacctgcctgctcccctgcaacagacgaggccgcagagggcacagctctgagctcggctcagacattatgaggtggaggccccgcgagtctctagggcagattctacccagagcagggggaacaaggcaaagagaccctacacggagcggggggaacacaggcaaagagaccctacgcggagcggggggaacacaggtaaacagaccctacacggagccagggtaacacaggcaaatagaccctatgcggagtgggggtaacaggtcaacagaccctatgcggaaccagctgccacctagatgaagacatctgtgacggagggactccgggatggacacgttttgttttcagactccagggctgacagtggccggggccctcaaggagacggaggctgactcgggatggaagcagactgccgccggacagaggccagcgacacaggcaccgaggccacacggaggccagagcagagcgggagcccctcctcttgacagggggcccctggccgtgtc

SEQ ID NO: 1092 - DNA, 6000 bp, Homo sapiens
aaggaggacgcgcccccgccgctgtcctgcgcctcagccatcctatgagacgggaaaggtttctgtctgcagctgggcccgtgctctttaccagctcctggctttcttctctggaaggttcctgcctgttttgccctcacacctgctcctctctcagccctctcaggggtggggctggaggccaccaaagagcctcctctgctctccagttgctcgactgctcctcatttccccctggggtctgcgtcagggtttccttcttttccagccccaccccgcgtgcatcccacctggtctcgggtcggggctgctcccgcttactgccccctgcccaggctggtgtgcaccccctctggctgctttcaaggcctcttctctcttctcggcaggacaggcacaggcaggtggccaggtgtcatgcttagctccccgcccagtgagattctttcatttaacaatcttcccctgaatagttcatgttcattgctgaaaatttgaaaaatatggaaaagcacaaagattaagatataaaccgccctcaattcccctgcccagagagagtcactgctatgacttggtgactaggaaccttatttctctctcgctcttttttttttttttgagacagagtcttgctctgtcacccaggctggagtgcagtggctcgatctcagctcactgcaacctccgcctcctgggttcaagcgattctcctgcctcagcctcttgagtagctgggattacaggcacctgccaccatgcccggctaatttttgtatttttagttgagagagggtttcatcttgttggtcaggcggacttgaactcctgacctcaggtgatcagcccacctcggcctcccaaagtgctgggattacaggtgtgagccactgcgccttcatctctcttctgtgtatgtgtacgctgttttttctttagaatgggggacgttatcaggctctacatggtgtgtagtcggctagcatgttgtaagcctttccctgtgtcacaagtgctcatctggaacaggattctaatgactgcctgtggctatgttgggattcctttaactcagctccttctgcccagcatctatcttttttccatcttttgtcctaagtgttgctataataaatcattgatcacacatgcctgactgtttgcataggataaattacgggaaatgtttttgctgttcagggactgtgcccatttttaggcctcagagacaccatgccagactgcccagtattgatctttactctttttagatgatgccaaacttttctgtgaactttaaaaacctgtgtcttgacagtccatttctgtaagtctttcacattagatttcctgtcaggatgatagtcaattctaggcagatgatgttttctcagccatggctgaagcagttgtgatttgttgtggccatgtaaagtcccgatgatccattgcctccctggatgggttggaataatttggtttgggagcatataacagaatgacctggagtcacagcagctcagacggaagtgtatttctcccttacagatgaaagaattccaggccaggctggaatgacaactgcacacagtcatctgggccccctccttccagctcccatcaccccaggatgtggcttttatgcagatgatccaaaatggctgctcaagtcccagccaacacatcccattccagggagcaggaaaaaggtgtgtctttcccttcattttatgtgattcctttctagaagtactactcattacttctgcttgcatctccctggctagcacttacttagttatatggccatagctagctgaaggaaggacagggactgtcatacactagctaagaggcaaactgcttagataaaaaggtctctaaagaaggtcagagcggctgctagggtgcaactctattacttattgttatgggacgaactgtgtccctcattcaggttgatgtcctaagccccagaacctcagaatgggattgtatttggagacaggttctttaaggaggtaaggaggctaaaatgagatcattagggtgggccataatccgactgatgtcttacaagaagagattaggacacggacatgctcagagggacggccacgtgaggacaccaagaaaggcagctgtctgcaagtcaaggacagggctcaggggaaaccaaccttgccaacaccttcatctcggacttctagcctctaggaccatgagaagatacatttctgttgtttaagctgcccggtctgtggtactttgttatggcagcccaagtaaacaaatacagtcatctgctgctggaacaaatcaccccagcactgtggcttggcagcacacatgtctagtcatagagttatatgtagttacgtgtagagccatatgtatcgtcacacgttctgtgggtcaggaatttggacccagcttaaccagctccacttctcgccagggttcagtcaaataccagctgcctcccacctgagagctcagccggggaagggtccctttccaatctcacgtggtgttggcaggatccagttcctcatggcctgctggactgagaacctcagttctcactgcctgttggccagaggccgcctttatgtcctcgccatgtgggcctctccaacatggcagctgacttcatcagagcatccatgccaagaaggcaacagagagggccagggagactgaagtcatacccttttgcgacctagtcatggggtgacattccatcacctttgcccattggttagaagcaggccaccaggtacagcccaagctcacggggaggggtcatacaagggtgtcaataccaggaggtgaggggtgctggggccatcttatgagtctgcccactgaggtaactaacaaccttgaggcctgacacagtggacaaaggcccttattaacagcagagaactgggaactttatttatttatttatttttgagacagagtctcactcttgtcacccaggctggagtgcaatggcatgatcttggctcactgcaacctccacctcccaggttcaagcaattctgcctcagcctccggaatagctgggactacaggcatgcaccactacacccggctaatttttgtatttttagtagagacagggtttcgccatgttggccaggctggtctcgaactcctgacctctggtgatctgcctgccttggcctcccaaagtgctgggattacaggcgtgagccaccgcacctcgctggaacttaatttttttagagacagtgtcgctctatcacccaagctggagtgcagtggtgcaatcctagctcacttgcagcctcaaattcctgggttcaggtgatcctcccacatcagcctcccaagaactgggaactaacggctgtttctctgctgtccttctcaagaaaagggaggctactgctaccccactggggacaatgctgggtttccctttaggacaggctctgagacaaggcggaggtgctgtttgtggccacagagcaggggactctgggttgcaggtgtggcctggctaaagtaggctttactgggctcctctctgcctgcatcaccccccggctgggcggttgtctctgaggccaaccttactccctgctgggcaggctggacagctgccctctccgtttgcccctctaccacccaaaaggcaggaggctctggagaccaggaccctgcccgccacggcctgtgtcccaggcgtgagggggtgccccacagacctctgctgagctgctgctgaatgacgccccttgggggtcctgccggaaggtcagagcaggggtgcactcccataaagaaacgcccccaggtcgggactcattcctgtgggcggcatcttgtggccatagctgcttctcgctgcactaatcacagtgcctctgtgggcagcaggcgctgaccacccaggcctgccccagaccctctcctcccttccggggcgctgcgctgggaccgatggggggcgccaggcctgtggacaccgccctgcaggggcctctccagctcactgggggtggggtgggggtcacacttggggtcctcaggtcgtgccgaccacgcgcattctctgcgctctgcgcaggagctcgcccaccctctccccgtgcagagagccccgcagctggctccccgcagggctgtccgggtgagtatggctctggccacgggccagtgtggcgggagggcaaaccccaaggccacctcggctcagagtccacggccggctgtcgccccgctccaggcgtcggcgggggatcctttccgcatgggcctgcgcccgcgctcggcgccccctccacggccccgccccgtccatggccccgtccttcatgggcgagcccctccatggccctgcccctccgcgccccacccctccctcgccccacctctcaccttcctgccccgcccccagcctccccaaccctcaccggccagtcccctcccctatcccgtccgcccctcagccgccccgcccctcagccggcctgcctaatgtccccgtccccagcatcgccccgccccgcccccgtctcgccccgcccctcaggcggcctccctgctgtgccccgccccggcctcgccacgcccctacctcaccacgccccccgcatcgccacgccccccgcatcgccacgcctcccttaccatgcagtcccgccccgtcccttcctcgtcccgcctcgccgcgacacttcacacacagcttcgcctcaccccattacagtctcaccacgccccgtcccctctccgttgagccccgcgccttcgcccgggtggggcgctgcgctgtcagcggccttgctgtgtgaggcagaacctgcgggggcaggggcgggctggttccctggccagccattggcagagtccgcaggctagggctgtcaatcatgctggccggcgtggccccgcctccgccggcgcggccccgcctccgccggcgcagcgtctgggacgcaaggcgccgtgggggctgccgggacgggtccaagatggacggccgctcaggttctgcttttacctgcggcccagagccccattcattgccccggtgctgagcggcgccgcgagtcggcccgaggcctccggggactgccgtgccgggcgggagaccgccatggcgaccctggaaaagctgatgaaggccttcgagtccctcaagtccttccagcagcagcagcagcagcagcagcagcagcagcagcagcagcagcagcagcagcagcaacagccgccaccgccgccgccgccgccgccgcctcctcagcttcctcagccgccgccgcaggcacagccgctgctgcctcagccgcagccgcccccgccgccgcccccgccgccacccggcccggctgtggctgaggagccgctgcaccgaccgtgagtttgggcccgctgcagctccctgtcccggcgggtcccaggctacggcggggatggcggtaaccctgcagcctgcgggccggcgacacgaacccccggccccgcagagacagagtgacccagcaacccagagcccatgagggacacccgccccctcctggggcgaggccttcccccacttcagccccgctccctcacttgggtcttcccttgtcctctcgcgaggggaggcagagccttgttggggcctgtcctgaattcaccgaggggagtcacggcctcagccctctcgcccttcgcaggatgcgaagagttggggcgagaacttgtttctttttatttgcgagaaaccagggcgggggttcttttaactgcgttgtgaagagaacttggaggagccgagatttgctcagtgccacttccctcttctagtctgagagggaagagggctgggggcgcgggacacttcgagaggaggcggggtttggagctggagagatgtgggggcagtggatgacataatgcttttaggacgcctcggcgggagtggcggggcagggggggggcggggagtgagggcgcgtccaatgggagatt

SEQ ID NO: 1093 - DNA, 6000 bp, Homo sapiens
tcacccttcttttgcccccacttcagtttctgtgggacttagatgttatggaccattattaaaatcccatccttgaggagagtggatggcctgaatccaggagtttgaaatcagcctgggcaacatggcgaaaccccatctctacaaaaaaaatccaataagttgtggtagtgcacatctgcagccccagctactcaggagactgaggcaggaggatcgcttgagcccaggaggttaaggctgcagtgagccacgggctcagcactgcatccagagcctgggtgacagagcaagagcctgtctcaaacaaaacaaaacaaaacaaaaacaaacaaacaaaaaccaaaaacaaaacaacccataaaaaccaaaaacaaaacccattcttgcttaaagtttctacttccctgacgtttttttctccgttatatttactggtgttaggggctgaatggtgtacaccccaaattcatatgttgaaatcctaaccctcagtaccttagaatgtggctgtatttgaagatagggtaatagcttcaaaaaggtaattaagttaaaatggggtaattaaagtgagctcaaattcactatgactggtgttcttataaaaacaggaaaattggacacagaggagttcaccgggaagaccacgtgcagacagagtgagaagacagccacttacaagccaaggagagaggcctcagaagaaatcagcctggtgacgccttgatcttggacttctagcctccagacctgtgagtcaatacatttctgttgcttaagccaccccattgtggcactttgttatggcaaccctagaacacaaatacacacagcaaaccccaaccctgtcaaatccaactctgctcactttcacccttctgtttaaacagtggggagtggctgggcaaaagaacgcaacctactaaccgaccttttaaaaaattcctgaccacttgatgataccctgagaacccacagtccatttgctctcctggtctccttccaggtctaccagcaccccaccaactctcagaagatgaccttttcttctcatttcactgaaaagcagcagaaaagtacatccacatcatcatcaccaaatccatgaacctcccaacccccaaagctgtgttttccatctttcttctgtgaggtggtggagctcctacccacactctcacctgtgcttcggatacctctcaccaatatatgagtccaggagttcaagaccagcttgggcaacatggtgaaaccctgcctctacaaaaataaataaataaataactgcaaaaaattaaccaggcccatggtggtgcgtgcctgtagtcccagctactcgggagactgaggcaggatgatcgcttgagctcagcaggtcaagggaaattactggagcaattgccaattgtcgcctgcctactgggtcatcccagcatcctacaaacatactgtgataatctcaacttagaacaaaatattctctcctgactgcccagcatcctctagctatggctttatttctcgatttcattttacagaaaagctctccacacacacgcaaaccccagctaacttactgatatcacttatcttctcacatactctcctaaacctgctgtgggtgggctttgtcctcatctttcctctaaaatgattcctcttgtcactatcatcaataactttcagggcacccttcctcttgtctcagggatcatccttcccagttctctttgctgaagctctctcatctttctggcctctgtcacaggagtagcccatggctgagactctgaaactcttctgtttctgcacacactcttcacatgatcttatatatacactcttggctttaagaactgtccatatctaaggtctcccttattagtgtctccagcattaatcccttgcccaaactccagaagcttatacccaagtggctccttgatgcctcctgttgggggtctaatagacatctcaaacttagcacatcaaaaaccaaattcttgattcatgcctcttcccaagaccaaatctacttcacctcccgttttcccatcactgtagattgcagtgctttccttcctttggtcagttacacaaataaaaaatcttggcatcatctttgactcatctctttcttgcaaatgctacatccaattcatcagcaaatcctgctgctgctaccttcaaactctattcagaatccatctttttttttctttgccaccttcattactgctactacagccattgtaactgttctccatccttatcctcctacaatttattcttaataccaaagccagattgatcctttaaaataatatgccagatcaagtcatttggtgacttgtatgggtaaaaataaaatgcacacgaatgggttaaaaataaaatccaaaaacaggcacatagaccaatgaaacagaatagagatctcagaaataagactcacatctacaaccatctgatctttgacagacctgacaaaaacaagcaatggggaaaggattccctatttaataaatggtgctgggaaaactggctagctatacgcagaaaattgaaactggatcccttccttacacctttttcaaaaattaactcaagatggattaaagatttaaaatgtaaaacccaaaactataaaaaccctagaagaaaatctaggcaataccattcaggacataggcatgggcaaagatttcataatgaaaatgtcaaaagcaattccaacaaaagcgaaaatgacaaatgggatccaattaaactcaggaacttctgcacaccgaaagaaactataatcagggtgaacagacaacctacagcatgggagaacattttcaaaatctatccatctgacaaaggtctaatatccagaatctacaaggaacttaaactaatttataagaaataaacaaccccattaaaaagtgggcaaaggacatgaacagatatttctcaaaagaagacatttatatagccaacaaacatatgaaaaaaagctcaacatcattgatcattagaaaaatgcaaaccaaaaccacaatgaaatatcatctcatgccagtcagaatggtgatcattaaaaagtcaataaacaacagatgctggtgaggttgtggagaaataggaacacttacactgttgatgggagtgtaaattagttcaaccattgtggaagacagtatggggattcctcaaagatctagaaccagaaataccatttgacccagcaatctcattactgggtatatacccaaaggaatataaatcattctgttataaagatacatgcatgcatatgttcattgtagcactattcacaatagcaatgacatggaatcaacccaaatgcccatcaatgacagactggataaagacaatgtggtacatatacaccagggaatactgtgcagccacaaaaaggaacgagatcatgtcctttgcagggacatggatggagctggaagccattatcctcagcaaactaacacaggaacagaaaaccaagcactgcatgttctcacttataagtgggagctgaacaatgaacacagggaggggaacaacacacactggggcctgttggggagagtggagggagggagagcatcagaaagaatagctaaaacatgaggggcttaatacctaagcaatggattgataggtgcagcaaaccaccatggcacacatttacctatgtaacaactctgcacgtcctgtacatgtatcccagaacttaaaacaaaataaaaaagataaaaaataaataaaacacacagtccaaaaagtcatcctgtcttacagagctatgggtgatctggtctcctgctactttccgaacttctgttctgtttccctcaaccctctagcctaactacaattggcctccttgctgctctggaacaggccaagagcttttctgcctcagagtctttgcacctgccatttcctctgcttgggaaatgtttgccccaagggagttgggtgacttgatcgctcacattacttaggtctctgcttgaatgtcacagatgttctcttaataaagaagaggcaagaaaagccactttattatttattaaactcccgcatagagtgcagtattattactgtgtgccagaccctgcttcaaacacattccatggactataaaattgcatctctgagcagctcctagagctggtagtaacaacttacatttactgggtgattaccatgtgccaggtattgtgctaaacacgttgtagatattaactcacttaatcctcgtaacaatcccatgaagtaggtactgctactatcccggctttacatctgaagtacagagaggttaagtaacttgccccatgtcatccagcaagaactaaatttgaacccagagcttagccactgatgcctcttgagagaaggagtcagacttaagttgagtctttaaaggtggttgaccaggcatttgtcagagttaagaaagagaggtaggacatccttttccaggcagagggcattgtgtgcacacacgtatagaagcaggcagcccaccctcatgctttccaggaagcaaatgtggctcaggtgtaaagtgcccggttgatgaagggagttagcggagggagtataaggatgtactgtctgcccccttaggacacctgcagaggattaaggtggctgtttctccctggaggtggagtgggtgggtcactgcacaggagcctatagttgttggtcttttaaactcttattggtgtaaccagccacggaactctgaggcaaggggttgggggtgggaagggaaacagagaaaaggcaagtgaaacagaaggggaggtgcagtttcagaacccagccagcctctctcttgctgcctagcctcctgccggcctcatcttcgcccagccaaccccgcctggagccctatggccaactgcgagttcagcccggtgtccggggacaaaccctgctgccggctctctaggagagcccaactctgtcttggcgtcagtatcctggtcctgatcctcgtcgtggtgctcgcggtggtcgtcccgaggtggcgccagcagtggagcggtccgggcaccaccaagcgctttcccgagaccgtcctggcgcgatgcgtcaagtacactgaaattcatcctgagatgaggtgggttggcgactaaggcgcaccggtgggcactgcggggacagcagggccccgcgcgcagggaagccgcccggatcgcccggaaccgggcatcttccgtggcgggtcagccgagagcccgccgggtggtgctgagtagggagtcccgggctcggggctccgcgggccgctttcaggagcagctggccttggcaccgagcgtgcccgcgggaggcgggggggggcgctgctcggtggctctgctgcgtagccggtgaacacttggcaccgatgcccgccttctgggcaaggtgccctgagcccagcccctcgccgggctgcagcccaccctcggcgcgctcagcccgcttcaccgcttcagggacggaatagaactcgcagatgcagggtgtcgctgacattttcaactttttctgcggtttccgcccgctgtctctgacccgaaagtgcccccggacggttacagaggacacttaagtggtttgcaaagcctgtggtaggggaggagggtgtagaagggccaaaccacggaacttagttttattcatttatataaagcagcactccgattctttttgcgcggcctgaaatgcatgtgaccagagaagtaattaacaaaacaatgtcaacttctaaaaccgagacattacttagatgataaggcgcagcaactcggtgaatctgtacaaaccttggaaaaaaaacacattagtctatgggaccttccagttttctcatgctcctttccagctactaacctctcctaaagggaacaaccactttttggatttgattcccaggcctcgctttcaccgggaaattatcgttgcttgtaaaacagaaga

SEQ ID NO: 1094 - DNA, 6000 bp, Homo sapiens
cttatatacccaaaaatattttacaattatttttgaaagcatttatattatgtagtttattataatttggctagagatgaatttctctcaaaaaagtgaacatctgccaattatttatatgatatatttcttaaaacttacacttttttggatcaaataattcatttattgatgtcagcgcacacataccttcttggaaaactcctgagaatttcaaggcttaaattccaagcttcagctgggttacgggttgagaaagttttagctaagaactggcactaaaagattacaaaacatctcgcaaagcttaaagctatagaagacatcaagaagaaaaaataccttttaataaaaacattctaaactctatccactaaaatttcaacatgagactattttagctatacaatcttagttgttttatagaagattgataaagttcaattttataactttaaacttaagtaacaagtttcttgaatttcatgtttaaaatatagaatatgaatagattcaaagtgcattcatttctgtttaatttccatctgtggctatccttatgagacaggattagtattaatttcaatttatatgtttatagattctattagttgttaatttattaagaatggataaacatggattgcagacattaactatatttttcttgcacttgaaaaacttgataaaaaaatatgagaaagtctcattaatatagtttaaataagtttaaatgaactttttattctttaaaaatattaagctgaactagctagagcgtaatacttgaggagcaattgtgaggcttaggaatgaacaagctctcaaacttgaatcctaattgcctaacttgatatattctttcctaccactcaggtccttttctcatttgataaggctgtcacattgaaaacatggaattgcagaatgttcaaggtagaaggatcgttaaagataatttagtccaacttgacccatatggcatagagatatatgcagatctgcatgtccagttctgcagctagaaactgacactgagctgaattaaaccacacggagaagaactgagaaatttaaagtaaaaggttaggaaattcgaatgtatatatattccagaggcccagtgtaacatgaagaaagtcaaggagagggactctttcatcatggaagatctgggggcagagggacttaaaaggtgggacaagccaaagatggtgacctagggtggtttttatgatataaccttttttctcctcattccctatgaaatcttcagccaattccatatttctcactaattcaagtgaatatctggggggatggcttatggagggaaataagggagcaattgtttggattatattccaattttttatttgcattagaatacctatatgtttatacatttttatttgcattagaaatacttatataagtttatacactttcattctaactttttttgagggaaatgtatctccataagtgaataagaagttaaattactgattatgtttcaattggttagtttgatgcttaacagtctttcacttttccactcttgcatattttgtagagagtaatacaagctcttcatgataggaaggatctgcatatgtttattttatagtagaaaaatggtaagattttcctgtccccaattttctctccaaacaaatccaaatttcttgtattttggaatgactctgggtaaagtggttgtttatagaaagtctcttataaaatattgaggatattattagatattattacatttccatgaatatgtttccctttatctttaagagaagaagagtcagaaatataacctatcagagtgggagatggcataaaagctggactaaatggattgctagatggagggcaaacctggtgtgaatgactcagtgagaagcttcgggagtcctgagggtagcagaagggtgcggatttaaagttactgttagagtggctggaaaatgggagaccggttcagagacattttatctacttaaaaactgtgccttttgtatcacgtcaaagtgaatgcaaaacaaagaacaaaagggttaaaggctcaggtttaaatcccaggtatatgtacatttcaattgaggtattttttttttcttttctaaatgatcagtacacttattctttctaaagaaaatacttttcttaactactctctatttttaaacttctcccacaaagatgagaaaacatttaaaaatcattggggctatttttctgtttaccgagtaaagagaatctctaaaccatatttataactcttactctaaatatttgcatttaccctcatgccagagcccgttgatgactgactaaacagagtttcaaagtttgaagaacaggaaatttagaaatgactaacaattatgtaggtttatttctctcagtatagaatgttcatatagaattaatgccagaggttttcagagaaaaatgcagaaatttttactttgcaaatccagaagatgcaattgttcaagtatttcttaagaaacattaattttaagtatgcagatatcattgagaattaaatattttaatttctaaactattaatcttttagtaggatgcacatatgcaaaatgcctcattagtactgtaagaaaagattcttggccgggcgcggtggctcatgactgtaatcccagcactttgggaggccgaggtgggcggatgacgaggtcaggagatcgagaccaccctggcacacggtgaaaccccgtctctactaaagatacaaaaaattagccgggcgtgatggcgggcgcctgtagtcccagctactcgggaggctgaggcagaagaatggcgtgaactcgggaggcggagcttgcaagtgagccgagatagtgccactgcactccagtctgggcgaaagagcgagactccatctcaaaaaaaaaaaaaaaaaaagaaaagattcttttaggtttcatcaattttgttttaaagctagggctcttcattagatataggaaaatcaattcaaagtttctattcagtcatgatgaatttgagatttttttaggtttctttgtatttaacaatatattacattataatgttgtggtgaaaactaaatggactaatattattcttttcatttgttaaatgaaaaagtatgcacaaagtatatgtgagagtgacaaaggcctgaatttgtcaattagtaacaattgtattcaacagtaaggattttatgtttgggtaggcctttcccagggacttctacaaggaaaaagctagagttggttactgacttctaataaataatgcctacaatttctaggaagttaaaagttgacataatttatccaagaaagaattattttcttaacttagaatagtttcttttttcttttcagatgtaggtttttctggctttagaaaaaatgcttgtttttcttcaatggaaaataggcacacttgttttatgtctgttcatctgtagtcagaaagacaagtctggtatttcctttcaggactcccttgagtcattaaaaaaaatcttcctatctatctatgtatctatcatccatctagctttgattttttcctcttctgtgctttattagttaattagtacccatttctgaagaagaaataacataagattatagaaaataatttctttcattgtaagactgaatagaaaaaattttctttcattataagactgagtagaaaaaataatactttgttagtctctgtgcctctatgtgccatgaggaaatttgactactggttttgactgactgagttatttaattaagtaaaataactggcttagtactaattattgttctgtagtatcagagaaagttgttcttcctactggttgagctcagtagttcttcatattctgagcaaaagggcagaggtaggatagcttttctgaggtagagataagaaccttgggtagggaaggaagatttatgaaatatttaaaaaattattcttccttcgctttgtttttagacataatgttaaatttattttgaaatttaaagcaacataaaagaacatgtgatttttctacttattgaaagagagaaaggaaaaaaatatgaaacagggatggaaagaatcctatgcctggtgaaggtcaagggttctcataacctacagagaatttggggtcagcctgtcctattgtatattatggcaaagataatcatcatctcatttgggtccattttcctctccatctctgcttaactgaagatcccatgagatatactcacactgaatctaaatagcctatctcagggcttgaatcacatgtgggccacagcaggaatgggaacatggaatttctaagtcctatcttacttgttattgttgctatgtctttttcttagtttgcatctgaggcaacatcagctttttcagacagaatggctttggaatagtaaaaaagacacagaagccctaaaatatgtatgtatgtatatgtgtgtgtgcatgcgtgagtacttgtgtgtaaatttttcattatctataggtaaaagcacacttggaattagcaatagatgcaatttgggacttaactctttcagtatgtcttatttctaagcaaagtatttagtttggttagtaattactaaacactgagaactaaattgcaaacaccaagaactaaaatgttcaagtgggaaattacagttaaataccatggtaatgaataaaaggtacaaatcgtttaaactcttatgtaaaatttgataagatgttttacacaactttaatacattgacaaggtcttgtggagaaaacagttccagatggtaaatatacacaagggatttagtcaaacaattttttggcaagaatattatgaattttgtaatcggttggcagccaatgaaatacaaagatgagtctagttaataatctacaattattggttaaagaagtatattagtgctaatttccctccgtttgtcctagcttttctcttctgtcaaccccacacgcctttggcacaatgaagtgggtaacctttatttcccttctttttctctttagctcggcttattccaggggtgtgtttcgtcgagatgcacgtaagaaatccatttttctattgttcaacttttattctattttcccagtaaaataaagttttagtaaactctgcatctttaaagaattattttggcatttatttctaaaatggcatagtattttgtatttgtgaagtcttacaaggttatcttattaataaaattcaaacatcctaggtaaaaaaaaaaaaaggtcagaattgtttagtgactgtaattttcttttgcgcactaaggaaagtgcaaagtaacttagagtgactgaaacttcacagaatagggttgaagattgaattcataactatcccaaagacctatccattgcactatgctttatttaaaaaccacaaaacctgtgctgttgatctcataaatagaacttgtatttatatttattttcattttagtctgtcttcttggttgctgttgatagacactaaaagagtattagatattatctaagtttgaatataaggctataaatatttaataatttttaaaatagtattcttggtaattgaattattcttctgtttaaaggcagaagaaataattgaacatcatcctgagtttttctgtaggaatcagagcccaatattttgaaacaaatgcataatctaagtcaaatggaaagaaatataaaaagtaacattattacttcttgttttcttcagtatttaacaatccttttttttcttcccttgcccagacaagagtgaggttgctcatcggtttaaagatttgggagaagaaaatttcaaagccttgtaagttaaaatattgatgaatcaaatttaatgtttctaatagtgttgtttattattctaaagtgcttatatttccttgtcatcagggttcagattctaaaacagtgctgcctcgtagagttttctgcgttgag

SEQ ID NO: 1095 - DNA, 6000 bp, Homo sapiens
ctaacttgatatattctttcctaccactcaggtccttttctcatttgataaggctgtcacattgaaaacatggaattgcagaatgttcaaggtagaaggatcgttaaagataatttagtccaacttgacccatatggcatagagatatatgcagatctgcatgtccagttctgcagctagaaactgacactgagctgaattaaaccacacggagaagaactgagaaatttaaagtaaaaggttaggaaattcgaatgtatatatattccagaggcccagtgtaacatgaagaaagtcaaggagagggactctttcatcatggaagatctgggggcagagggacttaaaaggtgggacaagccaaagatggtgacctagggtggtttttatgatataaccttttttctcctcattccctatgaaatcttcagccaattccatatttctcactaattcaagtgaatatctggggggatggcttatggagggaaataagggagcaattgtttggattatattccaattttttatttgcattagaatacctatatgtttatacatttttatttgcattagaaatacttatataagtttatacactttcattctaactttttttgagggaaatgtatctccataagtgaataagaagttaaattactgattatgtttcaattggttagtttgatgcttaacagtctttcacttttccactcttgcatattttgtagagagtaatacaagctcttcatgataggaaggatctgcatatgtttattttatagtagaaaaatggtaagattttcctgtccccaattttctctccaaacaaatccaaatttcttgtattttggaatgactctgggtaaagtggttgtttatagaaagtctcttataaaatattgaggatattattagatattattacatttccatgaatatgtttccctttatctttaagagaagaagagtcagaaatataacctatcagagtgggagatggcataaaagctggactaaatggattgctagatggagggcaaacctggtgtgaatgactcagtgagaagcttcgggagtcctgagggtagcagaagggtgcggatttaaagttactgttagagtggctggaaaatgggagaccggttcagagacattttatctacttaaaaactgtgccttttgtatcacgtcaaagtgaatgcaaaacaaagaacaaaagggttaaaggctcaggtttaaatcccaggtatatgtacatttcaattgaggtattttttttttcttttctaaatgatcagtacacttattctttctaaagaaaatacttttcttaactactctctatttttaaacttctcccacaaagatgagaaaacatttaaaaatcattggggctatttttctgtttaccgagtaaagagaatctctaaaccatatttataactcttactctaaatatttgcatttaccctcatgccagagcccgttgatgactgactaaacagagtttcaaagtttgaagaacaggaaatttagaaatgactaacaattatgtaggtttatttctctcagtatagaatgttcatatagaattaatgccagaggttttcagagaaaaatgcagaaatttttactttgcaaatccagaagatgcaattgttcaagtatttcttaagaaacattaattttaagtatgcagatatcattgagaattaaatattttaatttctaaactattaatcttttagtaggatgcacatatgcaaaatgcctcattagtactgtaagaaaagattcttggccgggcgcggtggctcatgactgtaatcccagcactttgggaggccgaggtgggcggatgacgaggtcaggagatcgagaccaccctggcacacggtgaaaccccgtctctactaaagatacaaaaaattagccgggcgtgatggcgggcgcctgtagtcccagctactcgggaggctgaggcagaagaatggcgtgaactcgggaggcggagcttgcaagtgagccgagatagtgccactgcactccagtctgggcgaaagagcgagactccatctcaaaaaaaaaaaaaaaaaaagaaaagattcttttaggtttcatcaattttgttttaaagctagggctcttcattagatataggaaaatcaattcaaagtttctattcagtcatgatgaatttgagatttttttaggtttctttgtatttaacaatatattacattataatgttgtggtgaaaactaaatggactaatattattcttttcatttgttaaatgaaaaagtatgcacaaagtatatgtgagagtgacaaaggcctgaatttgtcaattagtaacaattgtattcaacagtaaggattttatgtttgggtaggcctttcccagggacttctacaaggaaaaagctagagttggttactgacttctaataaataatgcctacaatttctaggaagttaaaagttgacataatttatccaagaaagaattattttcttaacttagaatagtttcttttttcttttcagatgtaggtttttctggctttagaaaaaatgcttgtttttcttcaatggaaaataggcacacttgttttatgtctgttcatctgtagtcagaaagacaagtctggtatttcctttcaggactcccttgagtcattaaaaaaaatcttcctatctatctatgtatctatcatccatctagctttgattttttcctcttctgtgctttattagttaattagtacccatttctgaagaagaaataacataagattatagaaaataatttctttcattgtaagactgaatagaaaaaattttctttcattataagactgagtagaaaaaataatactttgttagtctctgtgcctctatgtgccatgaggaaatttgactactggttttgactgactgagttatttaattaagtaaaataactggcttagtactaattattgttctgtagtatcagagaaagttgttcttcctactggttgagctcagtagttcttcatattctgagcaaaagggcagaggtaggatagcttttctgaggtagagataagaaccttgggtagggaaggaagatttatgaaatatttaaaaaattattcttccttcgctttgtttttagacataatgttaaatttattttgaaatttaaagcaacataaaagaacatgtgatttttctacttattgaaagagagaaaggaaaaaaatatgaaacagggatggaaagaatcctatgcctggtgaaggtcaagggttctcataacctacagagaatttggggtcagcctgtcctattgtatattatggcaaagataatcatcatctcatttgggtccattttcctctccatctctgcttaactgaagatcccatgagatatactcacactgaatctaaatagcctatctcagggcttgaatcacatgtgggccacagcaggaatgggaacatggaatttctaagtcctatcttacttgttattgttgctatgtctttttcttagtttgcatctgaggcaacatcagctttttcagacagaatggctttggaatagtaaaaaagacacagaagccctaaaatatgtatgtatgtatatgtgtgtgtgcatgcgtgagtacttgtgtgtaaatttttcattatctataggtaaaagcacacttggaattagcaatagatgcaatttgggacttaactctttcagtatgtcttatttctaagcaaagtatttagtttggttagtaattactaaacactgagaactaaattgcaaacaccaagaactaaaatgttcaagtgggaaattacagttaaataccatggtaatgaataaaaggtacaaatcgtttaaactcttatgtaaaatttgataagatgttttacacaactttaatacattgacaaggtcttgtggagaaaacagttccagatggtaaatatacacaagggatttagtcaaacaattttttggcaagaatattatgaattttgtaatcggttggcagccaatgaaatacaaagatgagtctagttaataatctacaattattggttaaagaagtatattagtgctaatttccctccgtttgtcctagcttttctcttctgtcaaccccacacgcctttggcacaatgaagtgggtaacctttatttcccttctttttctctttagctcggcttattccaggggtgtgtttcgtcgagatgcacgtaagaaatccatttttctattgttcaacttttattctattttcccagtaaaataaagttttagtaaactctgcatctttaaagaattattttggcatttatttctaaaatggcatagtattttgtatttgtgaagtcttacaaggttatcttattaataaaattcaaacatcctaggtaaaaaaaaaaaaaggtcagaattgtttagtgactgtaattttcttttgcgcactaaggaaagtgcaaagtaacttagagtgactgaaacttcacagaatagggttgaagattgaattcataactatcccaaagacctatccattgcactatgctttatttaaaaaccacaaaacctgtgctgttgatctcataaatagaacttgtatttatatttattttcattttagtctgtcttcttggttgctgttgatagacactaaaagagtattagatattatctaagtttgaatataaggctataaatatttaataatttttaaaatagtattcttggtaattgaattattcttctgtttaaaggcagaagaaataattgaacatcatcctgagtttttctgtaggaatcagagcccaatattttgaaacaaatgcataatctaagtcaaatggaaagaaatataaaaagtaacattattacttcttgttttcttcagtatttaacaatccttttttttcttcccttgcccagacaagagtgaggttgctcatcggtttaaagatttgggagaagaaaatttcaaagccttgtaagttaaaatattgatgaatcaaatttaatgtttctaatagtgttgtttattattctaaagtgcttatatttccttgtcatcagggttcagattctaaaacagtgctgcctcgtagagttttctgcgttgaggaagatattctgtatctgggctatccaataaggtagtcactggtcacatggctattgagtacttcaaatatgacaagtgcaactgagaaacaaaaacttaaattgtatttaattgtagttaatttgaatgtatatagtcacatgtggctaatggctactgtattggacagtacagctctggaacttgcttggtggaaaggactttaatataggtttcctttggtggcttacccactaaatcttctttacatagcaagcattcctgtgcttagttgggaatatttaatttttttttttttttaagacagggtctcgctctgtcgcccaggctggagtgcagtggcgcaatctcggctcactgcaaactccgcctcccgggttcacgccattctcctgcctcagcctcccgagtagctgggactacaggcgcccgccatcacgcccggctaatcttttgtatttttagtagagatggggtttcaccgtgtgccaggatggtctcaatctcctgacatcgtgatctgcccacctcggcctcccaaagtgctgggattacaggagtgagccaccgcgcccggcctatttaaatgttttttaatctagtaaaaaatgagaaaattgtttttttaaaagtctacctaatcctacaggctaattaaagacgtgtgtggggatcaggtgcggtggttcacacctgtaatcccagcactttggaaggctgatgcaggaggattgcttgagcccaggagttcaagaccagcctgggcaagtctctttaaaaaaaacaaaacaaacaaacaaaaaaattaggcatggtggcacatgcctgtagtcctagctactta

SEQ ID NO: 1096 - DNA, 6000 bp, Homo sapiens
tatagaattaatgccagaggttttcagagaaaaatgcagaaatttttactttgcaaatccagaagatgcaattgttcaagtatttcttaagaaacattaattttaagtatgcagatatcattgagaattaaatattttaatttctaaactattaatcttttagtaggatgcacatatgcaaaatgcctcattagtactgtaagaaaagattcttggccgggcgcggtggctcatgactgtaatcccagcactttgggaggccgaggtgggcggatgacgaggtcaggagatcgagaccaccctggcacacggtgaaaccccgtctctactaaagatacaaaaaattagccgggcgtgatggcgggcgcctgtagtcccagctactcgggaggctgaggcagaagaatggcgtgaactcgggaggcggagcttgcaagtgagccgagatagtgccactgcactccagtctgggcgaaagagcgagactccatctcaaaaaaaaaaaaaaaaaaagaaaagattcttttaggtttcatcaattttgttttaaagctagggctcttcattagatataggaaaatcaattcaaagtttctattcagtcatgatgaatttgagatttttttaggtttctttgtatttaacaatatattacattataatgttgtggtgaaaactaaatggactaatattattcttttcatttgttaaatgaaaaagtatgcacaaagtatatgtgagagtgacaaaggcctgaatttgtcaattagtaacaattgtattcaacagtaaggattttatgtttgggtaggcctttcccagggacttctacaaggaaaaagctagagttggttactgacttctaataaataatgcctacaatttctaggaagttaaaagttgacataatttatccaagaaagaattattttcttaacttagaatagtttcttttttcttttcagatgtaggtttttctggctttagaaaaaatgcttgtttttcttcaatggaaaataggcacacttgttttatgtctgttcatctgtagtcagaaagacaagtctggtatttcctttcaggactcccttgagtcattaaaaaaaatcttcctatctatctatgtatctatcatccatctagctttgattttttcctcttctgtgctttattagttaattagtacccatttctgaagaagaaataacataagattatagaaaataatttctttcattgtaagactgaatagaaaaaattttctttcattataagactgagtagaaaaaataatactttgttagtctctgtgcctctatgtgccatgaggaaatttgactactggttttgactgactgagttatttaattaagtaaaataactggcttagtactaattattgttctgtagtatcagagaaagttgttcttcctactggttgagctcagtagttcttcatattctgagcaaaagggcagaggtaggatagcttttctgaggtagagataagaaccttgggtagggaaggaagatttatgaaatatttaaaaaattattcttccttcgctttgtttttagacataatgttaaatttattttgaaatttaaagcaacataaaagaacatgtgatttttctacttattgaaagagagaaaggaaaaaaatatgaaacagggatggaaagaatcctatgcctggtgaaggtcaagggttctcataacctacagagaatttggggtcagcctgtcctattgtatattatggcaaagataatcatcatctcatttgggtccattttcctctccatctctgcttaactgaagatcccatgagatatactcacactgaatctaaatagcctatctcagggcttgaatcacatgtgggccacagcaggaatgggaacatggaatttctaagtcctatcttacttgttattgttgctatgtctttttcttagtttgcatctgaggcaacatcagctttttcagacagaatggctttggaatagtaaaaaagacacagaagccctaaaatatgtatgtatgtatatgtgtgtgtgcatgcgtgagtacttgtgtgtaaatttttcattatctataggtaaaagcacacttggaattagcaatagatgcaatttgggacttaactctttcagtatgtcttatttctaagcaaagtatttagtttggttagtaattactaaacactgagaactaaattgcaaacaccaagaactaaaatgttcaagtgggaaattacagttaaataccatggtaatgaataaaaggtacaaatcgtttaaactcttatgtaaaatttgataagatgttttacacaactttaatacattgacaaggtcttgtggagaaaacagttccagatggtaaatatacacaagggatttagtcaaacaattttttggcaagaatattatgaattttgtaatcggttggcagccaatgaaatacaaagatgagtctagttaataatctacaattattggttaaagaagtatattagtgctaatttccctccgtttgtcctagcttttctcttctgtcaaccccacacgcctttggcacaatgaagtgggtaacctttatttcccttctttttctctttagctcggcttattccaggggtgtgtttcgtcgagatgcacgtaagaaatccatttttctattgttcaacttttattctattttcccagtaaaataaagttttagtaaactctgcatctttaaagaattattttggcatttatttctaaaatggcatagtattttgtatttgtgaagtcttacaaggttatcttattaataaaattcaaacatcctaggtaaaaaaaaaaaaaggtcagaattgtttagtgactgtaattttcttttgcgcactaaggaaagtgcaaagtaacttagagtgactgaaacttcacagaatagggttgaagattgaattcataactatcccaaagacctatccattgcactatgctttatttaaaaaccacaaaacctgtgctgttgatctcataaatagaacttgtatttatatttattttcattttagtctgtcttcttggttgctgttgatagacactaaaagagtattagatattatctaagtttgaatataaggctataaatatttaataatttttaaaatagtattcttggtaattgaattattcttctgtttaaaggcagaagaaataattgaacatcatcctgagtttttctgtaggaatcagagcccaatattttgaaacaaatgcataatctaagtcaaatggaaagaaatataaaaagtaacattattacttcttgttttcttcagtatttaacaatccttttttttcttcccttgcccagacaagagtgaggttgctcatcggtttaaagatttgggagaagaaaatttcaaagccttgtaagttaaaatattgatgaatcaaatttaatgtttctaatagtgttgtttattattctaaagtgcttatatttccttgtcatcagggttcagattctaaaacagtgctgcctcgtagagttttctgcgttgaggaagatattctgtatctgggctatccaataaggtagtcactggtcacatggctattgagtacttcaaatatgacaagtgcaactgagaaacaaaaacttaaattgtatttaattgtagttaatttgaatgtatatagtcacatgtggctaatggctactgtattggacagtacagctctggaacttgcttggtggaaaggactttaatataggtttcctttggtggcttacccactaaatcttctttacatagcaagcattcctgtgcttagttgggaatatttaatttttttttttttttaagacagggtctcgctctgtcgcccaggctggagtgcagtggcgcaatctcggctcactgcaaactccgcctcccgggttcacgccattctcctgcctcagcctcccgagtagctgggactacaggcgcccgccatcacgcccggctaatcttttgtatttttagtagagatggggtttcaccgtgtgccaggatggtctcaatctcctgacatcgtgatctgcccacctcggcctcccaaagtgctgggattacaggagtgagccaccgcgcccggcctatttaaatgttttttaatctagtaaaaaatgagaaaattgtttttttaaaagtctacctaatcctacaggctaattaaagacgtgtgtggggatcaggtgcggtggttcacacctgtaatcccagcactttggaaggctgatgcaggaggattgcttgagcccaggagttcaagaccagcctgggcaagtctctttaaaaaaaacaaaacaaacaaacaaaaaaattaggcatggtggcacatgcctgtagtcctagctacttaggaggctgacgtaggaggatcgtttggacctgagaggtcaaggctacagtgagccatgattgtgccactgcactccagcctgggtgacagagtgagactctgtctcaaaaaagaaaaaggaaatctgtggggtttgttttagttttaagtaattctaaggactttaaaaatgcctagtcttgacaattagatctatttggcatacaatttgcttgcttaatctatgtgtgtgcatagatctactgacacacgcatacatataaacattagggaactaccattctctttgcgtaggaagccacatatgcctatctaggcctcagatcatacctgatatgaataggctttctggataatggtgaagaagatgtataaaagatagaacctatacccatacatgatttgttctctagcgtagcaacctgttacatattaaagttttattatactacatttttctacatcctttgtttcagggtgttgattgcctttgctcagtatcttcagcagtgtccatttgaagatcatgtaaaattagtgaatgaagtaactgaatttgcaaaaacatgtgttgctgatgagtcagctgaaaattgtgacaaatcacttgtaagtacattctaattgtggagattctttcttctgtttgaagtaatcccaagcatttcaaaggaattttttttaagttttctcaattattattaagtgtcctgatttgtaagaaacactaaaaagttgctcatagactgataagccattgtttcttttgtgatagagatgctttagctatgtccacagttttaaaatcatttctttattgagaccaaacacaacagtcatggtgtatttaaatggcaatttgtcatttataaacacctctttttaaaatttgaggtttggtttctttttgtagaggctaatagggatatgatagcatgtatttatttatttatttatcttattttattatagtaagaacccttaacatgagatctaccctgttatatttttaagtgtacaatccattattgttaactacgggtacactgttgtatagcttactcatcttgctgtattaaaactttgtgcccattgattagtaacccctcgtttcgtcctcccccagccactggcaaccagcattatactctttgattctatgagtttgactactttagctaccttatataagtggtattatgtactgtttatctttttatgactgacttatttcccttagcatagtgcattcaaagtccaaccatgttgttgcctattgcagaatttccttcttttcaaggctgaataatattccagtgcatgtgtgtaccacattttctttatccattaatttgttgattgatagacatttaggttggttttctacatcttgactatcatgaatagtgttgcaatgaacacaggagagctactatctcttagagatgatatcatggtttttatcatcagaaaacacccactgatttctatgctaattttgttacctgggtggaataatagtacagctatatattcctcattttagatatctttgtatttctacatacaataaaaaagcagagtactt

SEQ ID NO: 1097 - DNA, 6000 bp, Homo sapiens
tgtatgtatgtatatgtgtgtgtgcatgcgtgagtacttgtgtgtaaatttttcattatctataggtaaaagcacacttggaattagcaatagatgcaatttgggacttaactctttcagtatgtcttatttctaagcaaagtatttagtttggttagtaattactaaacactgagaactaaattgcaaacaccaagaactaaaatgttcaagtgggaaattacagttaaataccatggtaatgaataaaaggtacaaatcgtttaaactcttatgtaaaatttgataagatgttttacacaactttaatacattgacaaggtcttgtggagaaaacagttccagatggtaaatatacacaagggatttagtcaaacaattttttggcaagaatattatgaattttgtaatcggttggcagccaatgaaatacaaagatgagtctagttaataatctacaattattggttaaagaagtatattagtgctaatttccctccgtttgtcctagcttttctcttctgtcaaccccacacgcctttggcacaatgaagtgggtaacctttatttcccttctttttctctttagctcggcttattccaggggtgtgtttcgtcgagatgcacgtaagaaatccatttttctattgttcaacttttattctattttcccagtaaaataaagttttagtaaactctgcatctttaaagaattattttggcatttatttctaaaatggcatagtattttgtatttgtgaagtcttacaaggttatcttattaataaaattcaaacatcctaggtaaaaaaaaaaaaaggtcagaattgtttagtgactgtaattttcttttgcgcactaaggaaagtgcaaagtaacttagagtgactgaaacttcacagaatagggttgaagattgaattcataactatcccaaagacctatccattgcactatgctttatttaaaaaccacaaaacctgtgctgttgatctcataaatagaacttgtatttatatttattttcattttagtctgtcttcttggttgctgttgatagacactaaaagagtattagatattatctaagtttgaatataaggctataaatatttaataatttttaaaatagtattcttggtaattgaattattcttctgtttaaaggcagaagaaataattgaacatcatcctgagtttttctgtaggaatcagagcccaatattttgaaacaaatgcataatctaagtcaaatggaaagaaatataaaaagtaacattattacttcttgttttcttcagtatttaacaatccttttttttcttcccttgcccagacaagagtgaggttgctcatcggtttaaagatttgggagaagaaaatttcaaagccttgtaagttaaaatattgatgaatcaaatttaatgtttctaatagtgttgtttattattctaaagtgcttatatttccttgtcatcagggttcagattctaaaacagtgctgcctcgtagagttttctgcgttgaggaagatattctgtatctgggctatccaataaggtagtcactggtcacatggctattgagtacttcaaatatgacaagtgcaactgagaaacaaaaacttaaattgtatttaattgtagttaatttgaatgtatatagtcacatgtggctaatggctactgtattggacagtacagctctggaacttgcttggtggaaaggactttaatataggtttcctttggtggcttacccactaaatcttctttacatagcaagcattcctgtgcttagttgggaatatttaatttttttttttttttaagacagggtctcgctctgtcgcccaggctggagtgcagtggcgcaatctcggctcactgcaaactccgcctcccgggttcacgccattctcctgcctcagcctcccgagtagctgggactacaggcgcccgccatcacgcccggctaatcttttgtatttttagtagagatggggtttcaccgtgtgccaggatggtctcaatctcctgacatcgtgatctgcccacctcggcctcccaaagtgctgggattacaggagtgagccaccgcgcccggcctatttaaatgttttttaatctagtaaaaaatgagaaaattgtttttttaaaagtctacctaatcctacaggctaattaaagacgtgtgtggggatcaggtgcggtggttcacacctgtaatcccagcactttggaaggctgatgcaggaggattgcttgagcccaggagttcaagaccagcctgggcaagtctctttaaaaaaaacaaaacaaacaaacaaaaaaattaggcatggtggcacatgcctgtagtcctagctacttaggaggctgacgtaggaggatcgtttggacctgagaggtcaaggctacagtgagccatgattgtgccactgcactccagcctgggtgacagagtgagactctgtctcaaaaaagaaaaaggaaatctgtggggtttgttttagttttaagtaattctaaggactttaaaaatgcctagtcttgacaattagatctatttggcatacaatttgcttgcttaatctatgtgtgtgcatagatctactgacacacgcatacatataaacattagggaactaccattctctttgcgtaggaagccacatatgcctatctaggcctcagatcatacctgatatgaataggctttctggataatggtgaagaagatgtataaaagatagaacctatacccatacatgatttgttctctagcgtagcaacctgttacatattaaagttttattatactacatttttctacatcctttgtttcagggtgttgattgcctttgctcagtatcttcagcagtgtccatttgaagatcatgtaaaattagtgaatgaagtaactgaatttgcaaaaacatgtgttgctgatgagtcagctgaaaattgtgacaaatcacttgtaagtacattctaattgtggagattctttcttctgtttgaagtaatcccaagcatttcaaaggaattttttttaagttttctcaattattattaagtgtcctgatttgtaagaaacactaaaaagttgctcatagactgataagccattgtttcttttgtgatagagatgctttagctatgtccacagttttaaaatcatttctttattgagaccaaacacaacagtcatggtgtatttaaatggcaatttgtcatttataaacacctctttttaaaatttgaggtttggtttctttttgtagaggctaatagggatatgatagcatgtatttatttatttatttatcttattttattatagtaagaacccttaacatgagatctaccctgttatatttttaagtgtacaatccattattgttaactacgggtacactgttgtatagcttactcatcttgctgtattaaaactttgtgcccattgattagtaacccctcgtttcgtcctcccccagccactggcaaccagcattatactctttgattctatgagtttgactactttagctaccttatataagtggtattatgtactgtttatctttttatgactgacttatttcccttagcatagtgcattcaaagtccaaccatgttgttgcctattgcagaatttccttcttttcaaggctgaataatattccagtgcatgtgtgtaccacattttctttatccattaatttgttgattgatagacatttaggttggttttctacatcttgactatcatgaatagtgttgcaatgaacacaggagagctactatctcttagagatgatatcatggtttttatcatcagaaaacacccactgatttctatgctaattttgttacctgggtggaataatagtacagctatatattcctcattttagatatctttgtatttctacatacaataaaaaagcagagtacttagtcatgttgaagaactttaaacttttagtatttccagatcaatcttcaaaacaaggacaggtttatctttctctcaccactcaatctatatatacctcttgtgggcaaggccagtttttatcactggagcctttcccctttttattatgtacctctccctcacagcagagtcaggactttaactttacacaatactatggctctacatatgaaatcttaaaaatacataaaaattaataaattctgtctagagtagtatattttccctggggttacagttactttcataataaaaattagagataaggaaaggactcatttattggaaagtgattttaggtaacatttctggaagaaaaatgtctatatcttaatagtcacttaatatatgatggattgtgttactcctcagttttcaatggcatatactaaaacatggccctctaaaaagggggcaaatgaaatgagaaactctctgaatgtttttctcccctaggtgaattcacctgctgcttagaagcttattttctcttgatttctgttataatgattgctcttaccctttagttttaagtttcaaaataggagtcatataactttccttaaagctattgactgtctttttgtcctgttttattcaccatgagttatagtgtgacagttaattcttatgaaaattatatagagatggttaaatcatcagaaactgtaaacctcgattgggaggggaagcggatttttaaatgatttcctgaccaagcttaaccagtatattaaatcctttgtactgttctttggctataaagaaaaaaggtactgtccagcaactgaaacctgctttcttccatttagcataccctttttggagacaaattatgcacagttgcaactcttcgtgaaacctatggtgaaatggctgactgctgtgcaaaacaagaacctgagagaaatgaatgcttcttgcaacacaaagatgacaacccaaacctcccccgattggtgagaccagaggttgatgtgatgtgcactgcttttcatgacaatgaagagacatttttgaaaaagtaagtaatcagatgtttatagttcaaaattaaaaagcatggagtaactccataggccaacactctataaaaattaccataacaaaaatattttcaacattaagacttggaagttttgttatgatgattttttaaagaagtagtatttgataccacaaaattctacacagcaaaaaatatgatcaaagatattttgaagtttattgaaacaggatacaatctttctgaaaaatttaagatagacaaattatttaatgtattacgaagatatgtatatatggttgttataattgatttcgttttagtcagcaacattatattgccaaaatttaaccatttatgcacacacacacacacacacacacacttaacccttttttccacatacttaaagaatgacagagacaagaccatcatgtgcaaattgagcttaattggttaattagatatctttggaatttggaggttctggggagaatgtcgattacaattatttctgtaatattgtctgctatagaaaagtgactgtttttctttttcaaaatttagatacttatatgaaattgccagaagacatccttacttttatgccccggaactccttttctttgctaaaaggtataaagctgcttttacagaatgttgccaagctgctgataaagctgcctgcctgttgccaaaggtattatgcaaaagaatagaaaaaaagagttcattatccaacctgattttgtccattttgtggctagatttagggaacctgagtgtctgatacaaactttccgacatggtcaaaaaagccttccttttatctgtcttgaaaatctttcatctttgaaggcctacactctcgtttcttcttttaagatttgccaatgatgatctgtcagaggtaatcactgtgcatgtgtttaaagatttcaccactttttatggtggtgatcactatagtgaaatactgaaacttgtttgtc

SEQ ID NO: 1098 - DNA, 6000 bp, Homo sapiens
aaagttttagtaaactctgcatctttaaagaattattttggcatttatttctaaaatggcatagtattttgtatttgtgaagtcttacaaggttatcttattaataaaattcaaacatcctaggtaaaaaaaaaaaaaggtcagaattgtttagtgactgtaattttcttttgcgcactaaggaaagtgcaaagtaacttagagtgactgaaacttcacagaatagggttgaagattgaattcataactatcccaaagacctatccattgcactatgctttatttaaaaaccacaaaacctgtgctgttgatctcataaatagaacttgtatttatatttattttcattttagtctgtcttcttggttgctgttgatagacactaaaagagtattagatattatctaagtttgaatataaggctataaatatttaataatttttaaaatagtattcttggtaattgaattattcttctgtttaaaggcagaagaaataattgaacatcatcctgagtttttctgtaggaatcagagcccaatattttgaaacaaatgcataatctaagtcaaatggaaagaaatataaaaagtaacattattacttcttgttttcttcagtatttaacaatccttttttttcttcccttgcccagacaagagtgaggttgctcatcggtttaaagatttgggagaagaaaatttcaaagccttgtaagttaaaatattgatgaatcaaatttaatgtttctaatagtgttgtttattattctaaagtgcttatatttccttgtcatcagggttcagattctaaaacagtgctgcctcgtagagttttctgcgttgaggaagatattctgtatctgggctatccaataaggtagtcactggtcacatggctattgagtacttcaaatatgacaagtgcaactgagaaacaaaaacttaaattgtatttaattgtagttaatttgaatgtatatagtcacatgtggctaatggctactgtattggacagtacagctctggaacttgcttggtggaaaggactttaatataggtttcctttggtggcttacccactaaatcttctttacatagcaagcattcctgtgcttagttgggaatatttaatttttttttttttttaagacagggtctcgctctgtcgcccaggctggagtgcagtggcgcaatctcggctcactgcaaactccgcctcccgggttcacgccattctcctgcctcagcctcccgagtagctgggactacaggcgcccgccatcacgcccggctaatcttttgtatttttagtagagatggggtttcaccgtgtgccaggatggtctcaatctcctgacatcgtgatctgcccacctcggcctcccaaagtgctgggattacaggagtgagccaccgcgcccggcctatttaaatgttttttaatctagtaaaaaatgagaaaattgtttttttaaaagtctacctaatcctacaggctaattaaagacgtgtgtggggatcaggtgcggtggttcacacctgtaatcccagcactttggaaggctgatgcaggaggattgcttgagcccaggagttcaagaccagcctgggcaagtctctttaaaaaaaacaaaacaaacaaacaaaaaaattaggcatggtggcacatgcctgtagtcctagctacttaggaggctgacgtaggaggatcgtttggacctgagaggtcaaggctacagtgagccatgattgtgccactgcactccagcctgggtgacagagtgagactctgtctcaaaaaagaaaaaggaaatctgtggggtttgttttagttttaagtaattctaaggactttaaaaatgcctagtcttgacaattagatctatttggcatacaatttgcttgcttaatctatgtgtgtgcatagatctactgacacacgcatacatataaacattagggaactaccattctctttgcgtaggaagccacatatgcctatctaggcctcagatcatacctgatatgaataggctttctggataatggtgaagaagatgtataaaagatagaacctatacccatacatgatttgttctctagcgtagcaacctgttacatattaaagttttattatactacatttttctacatcctttgtttcagggtgttgattgcctttgctcagtatcttcagcagtgtccatttgaagatcatgtaaaattagtgaatgaagtaactgaatttgcaaaaacatgtgttgctgatgagtcagctgaaaattgtgacaaatcacttgtaagtacattctaattgtggagattctttcttctgtttgaagtaatcccaagcatttcaaaggaattttttttaagttttctcaattattattaagtgtcctgatttgtaagaaacactaaaaagttgctcatagactgataagccattgtttcttttgtgatagagatgctttagctatgtccacagttttaaaatcatttctttattgagaccaaacacaacagtcatggtgtatttaaatggcaatttgtcatttataaacacctctttttaaaatttgaggtttggtttctttttgtagaggctaatagggatatgatagcatgtatttatttatttatttatcttattttattatagtaagaacccttaacatgagatctaccctgttatatttttaagtgtacaatccattattgttaactacgggtacactgttgtatagcttactcatcttgctgtattaaaactttgtgcccattgattagtaacccctcgtttcgtcctcccccagccactggcaaccagcattatactctttgattctatgagtttgactactttagctaccttatataagtggtattatgtactgtttatctttttatgactgacttatttcccttagcatagtgcattcaaagtccaaccatgttgttgcctattgcagaatttccttcttttcaaggctgaataatattccagtgcatgtgtgtaccacattttctttatccattaatttgttgattgatagacatttaggttggttttctacatcttgactatcatgaatagtgttgcaatgaacacaggagagctactatctcttagagatgatatcatggtttttatcatcagaaaacacccactgatttctatgctaattttgttacctgggtggaataatagtacagctatatattcctcattttagatatctttgtatttctacatacaataaaaaagcagagtacttagtcatgttgaagaactttaaacttttagtatttccagatcaatcttcaaaacaaggacaggtttatctttctctcaccactcaatctatatatacctcttgtgggcaaggccagtttttatcactggagcctttcccctttttattatgtacctctccctcacagcagagtcaggactttaactttacacaatactatggctctacatatgaaatcttaaaaatacataaaaattaataaattctgtctagagtagtatattttccctggggttacagttactttcataataaaaattagagataaggaaaggactcatttattggaaagtgattttaggtaacatttctggaagaaaaatgtctatatcttaatagtcacttaatatatgatggattgtgttactcctcagttttcaatggcatatactaaaacatggccctctaaaaagggggcaaatgaaatgagaaactctctgaatgtttttctcccctaggtgaattcacctgctgcttagaagcttattttctcttgatttctgttataatgattgctcttaccctttagttttaagtttcaaaataggagtcatataactttccttaaagctattgactgtctttttgtcctgttttattcaccatgagttatagtgtgacagttaattcttatgaaaattatatagagatggttaaatcatcagaaactgtaaacctcgattgggaggggaagcggatttttaaatgatttcctgaccaagcttaaccagtatattaaatcctttgtactgttctttggctataaagaaaaaaggtactgtccagcaactgaaacctgctttcttccatttagcataccctttttggagacaaattatgcacagttgcaactcttcgtgaaacctatggtgaaatggctgactgctgtgcaaaacaagaacctgagagaaatgaatgcttcttgcaacacaaagatgacaacccaaacctcccccgattggtgagaccagaggttgatgtgatgtgcactgcttttcatgacaatgaagagacatttttgaaaaagtaagtaatcagatgtttatagttcaaaattaaaaagcatggagtaactccataggccaacactctataaaaattaccataacaaaaatattttcaacattaagacttggaagttttgttatgatgattttttaaagaagtagtatttgataccacaaaattctacacagcaaaaaatatgatcaaagatattttgaagtttattgaaacaggatacaatctttctgaaaaatttaagatagacaaattatttaatgtattacgaagatatgtatatatggttgttataattgatttcgttttagtcagcaacattatattgccaaaatttaaccatttatgcacacacacacacacacacacacacttaacccttttttccacatacttaaagaatgacagagacaagaccatcatgtgcaaattgagcttaattggttaattagatatctttggaatttggaggttctggggagaatgtcgattacaattatttctgtaatattgtctgctatagaaaagtgactgtttttctttttcaaaatttagatacttatatgaaattgccagaagacatccttacttttatgccccggaactccttttctttgctaaaaggtataaagctgcttttacagaatgttgccaagctgctgataaagctgcctgcctgttgccaaaggtattatgcaaaagaatagaaaaaaagagttcattatccaacctgattttgtccattttgtggctagatttagggaacctgagtgtctgatacaaactttccgacatggtcaaaaaagccttccttttatctgtcttgaaaatctttcatctttgaaggcctacactctcgtttcttcttttaagatttgccaatgatgatctgtcagaggtaatcactgtgcatgtgtttaaagatttcaccactttttatggtggtgatcactatagtgaaatactgaaacttgtttgtcaaattgcacagcaaggggccacagttcttgtttatcttttcatgataatttttagtagggagggaattcaaagtagagaattttactgcatctagatgcctgagttcatgcattcattccataaatatatattatggaatgctttattttcttttctgaggagtttactgatgttggtggaggagagactgaaatgaattatacacaaaatttaaaaattagcaaaattgcagcccctgggatattagcgtactctttctctgacttttctcccacttttaaggctctttttcctggcaatgtttccagttggtttctaactacatagggaattccgctgtgaccagaatgatcgaatgatctttccttttcttagagagcaaaatcattattcgctaaagggagtacttgggaatttaggcataaattatgccttcaaaatttaatttggcacagtctcatctgagcttatggaggggtgtttcatgtagaatttttcttctaattttcatcaaattattcctttttgtagctcgatgaacttcgggatgaagggaaggcttcgtctgccaaacagagactcaagtgtgccagtctccaaaaatttggagaaagagctttcaaagcatggtaaatacttttaaacatagttggcatctttataacgatgtaaatgataat

SEQ ID NO: 1099 - DNA, 6000 bp, Homo sapiens
actgagaaacaaaaacttaaattgtatttaattgtagttaatttgaatgtatatagtcacatgtggctaatggctactgtattggacagtacagctctggaacttgcttggtggaaaggactttaatataggtttcctttggtggcttacccactaaatcttctttacatagcaagcattcctgtgcttagttgggaatatttaatttttttttttttttaagacagggtctcgctctgtcgcccaggctggagtgcagtggcgcaatctcggctcactgcaaactccgcctcccgggttcacgccattctcctgcctcagcctcccgagtagctgggactacaggcgcccgccatcacgcccggctaatcttttgtatttttagtagagatggggtttcaccgtgtgccaggatggtctcaatctcctgacatcgtgatctgcccacctcggcctcccaaagtgctgggattacaggagtgagccaccgcgcccggcctatttaaatgttttttaatctagtaaaaaatgagaaaattgtttttttaaaagtctacctaatcctacaggctaattaaagacgtgtgtggggatcaggtgcggtggttcacacctgtaatcccagcactttggaaggctgatgcaggaggattgcttgagcccaggagttcaagaccagcctgggcaagtctctttaaaaaaaacaaaacaaacaaacaaaaaaattaggcatggtggcacatgcctgtagtcctagctacttaggaggctgacgtaggaggatcgtttggacctgagaggtcaaggctacagtgagccatgattgtgccactgcactccagcctgggtgacagagtgagactctgtctcaaaaaagaaaaaggaaatctgtggggtttgttttagttttaagtaattctaaggactttaaaaatgcctagtcttgacaattagatctatttggcatacaatttgcttgcttaatctatgtgtgtgcatagatctactgacacacgcatacatataaacattagggaactaccattctctttgcgtaggaagccacatatgcctatctaggcctcagatcatacctgatatgaataggctttctggataatggtgaagaagatgtataaaagatagaacctatacccatacatgatttgttctctagcgtagcaacctgttacatattaaagttttattatactacatttttctacatcctttgtttcagggtgttgattgcctttgctcagtatcttcagcagtgtccatttgaagatcatgtaaaattagtgaatgaagtaactgaatttgcaaaaacatgtgttgctgatgagtcagctgaaaattgtgacaaatcacttgtaagtacattctaattgtggagattctttcttctgtttgaagtaatcccaagcatttcaaaggaattttttttaagttttctcaattattattaagtgtcctgatttgtaagaaacactaaaaagttgctcatagactgataagccattgtttcttttgtgatagagatgctttagctatgtccacagttttaaaatcatttctttattgagaccaaacacaacagtcatggtgtatttaaatggcaatttgtcatttataaacacctctttttaaaatttgaggtttggtttctttttgtagaggctaatagggatatgatagcatgtatttatttatttatttatcttattttattatagtaagaacccttaacatgagatctaccctgttatatttttaagtgtacaatccattattgttaactacgggtacactgttgtatagcttactcatcttgctgtattaaaactttgtgcccattgattagtaacccctcgtttcgtcctcccccagccactggcaaccagcattatactctttgattctatgagtttgactactttagctaccttatataagtggtattatgtactgtttatctttttatgactgacttatttcccttagcatagtgcattcaaagtccaaccatgttgttgcctattgcagaatttccttcttttcaaggctgaataatattccagtgcatgtgtgtaccacattttctttatccattaatttgttgattgatagacatttaggttggttttctacatcttgactatcatgaatagtgttgcaatgaacacaggagagctactatctcttagagatgatatcatggtttttatcatcagaaaacacccactgatttctatgctaattttgttacctgggtggaataatagtacagctatatattcctcattttagatatctttgtatttctacatacaataaaaaagcagagtacttagtcatgttgaagaactttaaacttttagtatttccagatcaatcttcaaaacaaggacaggtttatctttctctcaccactcaatctatatatacctcttgtgggcaaggccagtttttatcactggagcctttcccctttttattatgtacctctccctcacagcagagtcaggactttaactttacacaatactatggctctacatatgaaatcttaaaaatacataaaaattaataaattctgtctagagtagtatattttccctggggttacagttactttcataataaaaattagagataaggaaaggactcatttattggaaagtgattttaggtaacatttctggaagaaaaatgtctatatcttaatagtcacttaatatatgatggattgtgttactcctcagttttcaatggcatatactaaaacatggccctctaaaaagggggcaaatgaaatgagaaactctctgaatgtttttctcccctaggtgaattcacctgctgcttagaagcttattttctcttgatttctgttataatgattgctcttaccctttagttttaagtttcaaaataggagtcatataactttccttaaagctattgactgtctttttgtcctgttttattcaccatgagttatagtgtgacagttaattcttatgaaaattatatagagatggttaaatcatcagaaactgtaaacctcgattgggaggggaagcggatttttaaatgatttcctgaccaagcttaaccagtatattaaatcctttgtactgttctttggctataaagaaaaaaggtactgtccagcaactgaaacctgctttcttccatttagcataccctttttggagacaaattatgcacagttgcaactcttcgtgaaacctatggtgaaatggctgactgctgtgcaaaacaagaacctgagagaaatgaatgcttcttgcaacacaaagatgacaacccaaacctcccccgattggtgagaccagaggttgatgtgatgtgcactgcttttcatgacaatgaagagacatttttgaaaaagtaagtaatcagatgtttatagttcaaaattaaaaagcatggagtaactccataggccaacactctataaaaattaccataacaaaaatattttcaacattaagacttggaagttttgttatgatgattttttaaagaagtagtatttgataccacaaaattctacacagcaaaaaatatgatcaaagatattttgaagtttattgaaacaggatacaatctttctgaaaaatttaagatagacaaattatttaatgtattacgaagatatgtatatatggttgttataattgatttcgttttagtcagcaacattatattgccaaaatttaaccatttatgcacacacacacacacacacacacacttaacccttttttccacatacttaaagaatgacagagacaagaccatcatgtgcaaattgagcttaattggttaattagatatctttggaatttggaggttctggggagaatgtcgattacaattatttctgtaatattgtctgctatagaaaagtgactgtttttctttttcaaaatttagatacttatatgaaattgccagaagacatccttacttttatgccccggaactccttttctttgctaaaaggtataaagctgcttttacagaatgttgccaagctgctgataaagctgcctgcctgttgccaaaggtattatgcaaaagaatagaaaaaaagagttcattatccaacctgattttgtccattttgtggctagatttagggaacctgagtgtctgatacaaactttccgacatggtcaaaaaagccttccttttatctgtcttgaaaatctttcatctttgaaggcctacactctcgtttcttcttttaagatttgccaatgatgatctgtcagaggtaatcactgtgcatgtgtttaaagatttcaccactttttatggtggtgatcactatagtgaaatactgaaacttgtttgtcaaattgcacagcaaggggccacagttcttgtttatcttttcatgataatttttagtagggagggaattcaaagtagagaattttactgcatctagatgcctgagttcatgcattcattccataaatatatattatggaatgctttattttcttttctgaggagtttactgatgttggtggaggagagactgaaatgaattatacacaaaatttaaaaattagcaaaattgcagcccctgggatattagcgtactctttctctgacttttctcccacttttaaggctctttttcctggcaatgtttccagttggtttctaactacatagggaattccgctgtgaccagaatgatcgaatgatctttccttttcttagagagcaaaatcattattcgctaaagggagtacttgggaatttaggcataaattatgccttcaaaatttaatttggcacagtctcatctgagcttatggaggggtgtttcatgtagaatttttcttctaattttcatcaaattattcctttttgtagctcgatgaacttcgggatgaagggaaggcttcgtctgccaaacagagactcaagtgtgccagtctccaaaaatttggagaaagagctttcaaagcatggtaaatacttttaaacatagttggcatctttataacgatgtaaatgataatgcttcagtgacaaattgtacatttttatgtattttgcaaagtgctgtcaaatacatttctttggttgtctaacaggtagaactctaatagaggtaaaaatcagaatatcaatgacaatttgacattatttttaatcttttcttttctaaatagttgaataatttagaggacgctgtcctttttgtcctaaaaaaagggacagatatttaagttctatttatttataaaatcttggactcttattctaatggttcattatttttatagagctgtaggcatggttctttatttaattttttaaagttatttttaatttttgtggatacagagtaggtatacatatttacggggtatatgagatattttgatataagtatacaacatatataatccctttatttaattttatcttccccccaatgatctaaaactatttgcttgtccttttatgtcttatagttaaattcagtcaccaactaagttgaagttacttcttatttttgcatagctccagctctgatcttcatctcatgtttttgcctgagcctctgttttcatattacttagttggttctgggagcatactttaatagccgagtcaagaaaaatactagctgccccgtcacccacactcctcacctgctagtcaacagcaaatcaacacaacaggaaataaaatgaaaataatagacattatgcatgctctctagaaactgtcaattgaactgtatttgctcatcattcctaccatctacaccaccaaaatcaaccaaatttatgaaaaaaaacagccccaacataaaattatacacagataaacaggctatgattggttttgggaaagaagtcacctttacctgatttaggcaactgtgaaatgactagagaatgaagaaaattagacgtttacatcttgtcatagagtttg

SEQ ID NO: 1100 - DNA, 6000 bp, Homo sapiens
atgatagcatgtatttatttatttatttatcttattttattatagtaagaacccttaacatgagatctaccctgttatatttttaagtgtacaatccattattgttaactacgggtacactgttgtatagcttactcatcttgctgtattaaaactttgtgcccattgattagtaacccctcgtttcgtcctcccccagccactggcaaccagcattatactctttgattctatgagtttgactactttagctaccttatataagtggtattatgtactgtttatctttttatgactgacttatttcccttagcatagtgcattcaaagtccaaccatgttgttgcctattgcagaatttccttcttttcaaggctgaataatattccagtgcatgtgtgtaccacattttctttatccattaatttgttgattgatagacatttaggttggttttctacatcttgactatcatgaatagtgttgcaatgaacacaggagagctactatctcttagagatgatatcatggtttttatcatcagaaaacacccactgatttctatgctaattttgttacctgggtggaataatagtacagctatatattcctcattttagatatctttgtatttctacatacaataaaaaagcagagtacttagtcatgttgaagaactttaaacttttagtatttccagatcaatcttcaaaacaaggacaggtttatctttctctcaccactcaatctatatatacctcttgtgggcaaggccagtttttatcactggagcctttcccctttttattatgtacctctccctcacagcagagtcaggactttaactttacacaatactatggctctacatatgaaatcttaaaaatacataaaaattaataaattctgtctagagtagtatattttccctggggttacagttactttcataataaaaattagagataaggaaaggactcatttattggaaagtgattttaggtaacatttctggaagaaaaatgtctatatcttaatagtcacttaatatatgatggattgtgttactcctcagttttcaatggcatatactaaaacatggccctctaaaaagggggcaaatgaaatgagaaactctctgaatgtttttctcccctaggtgaattcacctgctgcttagaagcttattttctcttgatttctgttataatgattgctcttaccctttagttttaagtttcaaaataggagtcatataactttccttaaagctattgactgtctttttgtcctgttttattcaccatgagttatagtgtgacagttaattcttatgaaaattatatagagatggttaaatcatcagaaactgtaaacctcgattgggaggggaagcggatttttaaatgatttcctgaccaagcttaaccagtatattaaatcctttgtactgttctttggctataaagaaaaaaggtactgtccagcaactgaaacctgctttcttccatttagcataccctttttggagacaaattatgcacagttgcaactcttcgtgaaacctatggtgaaatggctgactgctgtgcaaaacaagaacctgagagaaatgaatgcttcttgcaacacaaagatgacaacccaaacctcccccgattggtgagaccagaggttgatgtgatgtgcactgcttttcatgacaatgaagagacatttttgaaaaagtaagtaatcagatgtttatagttcaaaattaaaaagcatggagtaactccataggccaacactctataaaaattaccataacaaaaatattttcaacattaagacttggaagttttgttatgatgattttttaaagaagtagtatttgataccacaaaattctacacagcaaaaaatatgatcaaagatattttgaagtttattgaaacaggatacaatctttctgaaaaatttaagatagacaaattatttaatgtattacgaagatatgtatatatggttgttataattgatttcgttttagtcagcaacattatattgccaaaatttaaccatttatgcacacacacacacacacacacacacttaacccttttttccacatacttaaagaatgacagagacaagaccatcatgtgcaaattgagcttaattggttaattagatatctttggaatttggaggttctggggagaatgtcgattacaattatttctgtaatattgtctgctatagaaaagtgactgtttttctttttcaaaatttagatacttatatgaaattgccagaagacatccttacttttatgccccggaactccttttctttgctaaaaggtataaagctgcttttacagaatgttgccaagctgctgataaagctgcctgcctgttgccaaaggtattatgcaaaagaatagaaaaaaagagttcattatccaacctgattttgtccattttgtggctagatttagggaacctgagtgtctgatacaaactttccgacatggtcaaaaaagccttccttttatctgtcttgaaaatctttcatctttgaaggcctacactctcgtttcttcttttaagatttgccaatgatgatctgtcagaggtaatcactgtgcatgtgtttaaagatttcaccactttttatggtggtgatcactatagtgaaatactgaaacttgtttgtcaaattgcacagcaaggggccacagttcttgtttatcttttcatgataatttttagtagggagggaattcaaagtagagaattttactgcatctagatgcctgagttcatgcattcattccataaatatatattatggaatgctttattttcttttctgaggagtttactgatgttggtggaggagagactgaaatgaattatacacaaaatttaaaaattagcaaaattgcagcccctgggatattagcgtactctttctctgacttttctcccacttttaaggctctttttcctggcaatgtttccagttggtttctaactacatagggaattccgctgtgaccagaatgatcgaatgatctttccttttcttagagagcaaaatcattattcgctaaagggagtacttgggaatttaggcataaattatgccttcaaaatttaatttggcacagtctcatctgagcttatggaggggtgtttcatgtagaatttttcttctaattttcatcaaattattcctttttgtagctcgatgaacttcgggatgaagggaaggcttcgtctgccaaacagagactcaagtgtgccagtctccaaaaatttggagaaagagctttcaaagcatggtaaatacttttaaacatagttggcatctttataacgatgtaaatgataatgcttcagtgacaaattgtacatttttatgtattttgcaaagtgctgtcaaatacatttctttggttgtctaacaggtagaactctaatagaggtaaaaatcagaatatcaatgacaatttgacattatttttaatcttttcttttctaaatagttgaataatttagaggacgctgtcctttttgtcctaaaaaaagggacagatatttaagttctatttatttataaaatcttggactcttattctaatggttcattatttttatagagctgtaggcatggttctttatttaattttttaaagttatttttaatttttgtggatacagagtaggtatacatatttacggggtatatgagatattttgatataagtatacaacatatataatccctttatttaattttatcttccccccaatgatctaaaactatttgcttgtccttttatgtcttatagttaaattcagtcaccaactaagttgaagttacttcttatttttgcatagctccagctctgatcttcatctcatgtttttgcctgagcctctgttttcatattacttagttggttctgggagcatactttaatagccgagtcaagaaaaatactagctgccccgtcacccacactcctcacctgctagtcaacagcaaatcaacacaacaggaaataaaatgaaaataatagacattatgcatgctctctagaaactgtcaattgaactgtatttgctcatcattcctaccatctacaccaccaaaatcaaccaaatttatgaaaaaaaacagccccaacataaaattatacacagataaacaggctatgattggttttgggaaagaagtcacctttacctgatttaggcaactgtgaaatgactagagaatgaagaaaattagacgtttacatcttgtcatagagtttgaagatagtgctggatctttctttttataagtaagatcaataaaaactccctcattctgtagaagttatgatttcttttctaagagacctttagaagtcagaaaaaatgtgtttcaattgagaaaaaagataactggagtttgtgtagtacttcccagattataaaatgcttttgtatgtattatctaatttaatcctcaaaacttcttcaatttagcatgttgtcatgacactgcagaggctgaagctcagagaggctgagccctctgctaacaagtcctactgctaacaagtgataaagccagagctggaagtcacatctggactccaaacctgatgcttctcagcctgttgccccttttagagttcctttttaatttctgcttttatgacttgctagatttctacctaccacacacactcttaaatggataattctgccctaaggataagtgattaccatttggttcagaactagaactaatgaattttaaaaattatttctgtatgtccattttgaattttcttatgagaaatagtatttgcctagtgttttcatataaaatatcgcatgataataccattttgattggcgattttctttttagggcagtagctcgcctgagccagagatttcccaaagctgagtttgcagaagtttccaagttagtgacagatcttaccaaagtccacacggaatgctgccatggagatctgcttgaatgtgctgatgacagggtaaagagtcgtcgatatgctttttggtagcttgcatgctcaagttggtagaatggatgcgtttggtatcattggtgatagctgacagtgggttgagattgtcttctgtgctttcgtctgtcctatcttcaatctttccctgcctatggtggtggtacctttctgtttttaacctggctataaattaccagataaacccattcactgatttgtaactcctttcagtcatgctctaactgtaaatgaaggcttaaactgaagtagaacagttacaaggttttacttggcagaacatcttgcaaggtagatgtctaagaagatttttttttctttttttaagacagagtttcgctcttgtttcccaggctggggtgcaatggtgtgatcttggctcagcgcaacctctgcctcctgggttcaagtgattctcatgcctcagcctcccaagtagctgggattacaggcatgcgccaccacacctggctaattttgtatttttagtagaggcggggtttcaccatattgtccagactggtctcgaactcctgacctcaggtgatccacccgccttggcctcccaaagtgctgggattacaggcatgagccaccttgcccagcctaagaagattttttgagggaggtaggtggacttggagaaggtcactacttgaagagatttttggaaatgatgtatttttcttctctatattccttcccttaattaactctgtttgttagatgtgcaaatatttggaatgatatctcttttctcaaaacttataatattttctttctccctttcttcaagattaaacttatgggcaaatactagaatcctaatctctcatggcactttctggaaaatttaaggcggttattttatatatgtaagcagggcctatgactatgatcttgactcatttttcaaaaatcttctatattttatttagttat

SEQ ID NO: 1101 - DNA, 6000 bp, Homo sapiens
aattatgcacagttgcaactcttcgtgaaacctatggtgaaatggctgactgctgtgcaaaacaagaacctgagagaaatgaatgcttcttgcaacacaaagatgacaacccaaacctcccccgattggtgagaccagaggttgatgtgatgtgcactgcttttcatgacaatgaagagacatttttgaaaaagtaagtaatcagatgtttatagttcaaaattaaaaagcatggagtaactccataggccaacactctataaaaattaccataacaaaaatattttcaacattaagacttggaagttttgttatgatgattttttaaagaagtagtatttgataccacaaaattctacacagcaaaaaatatgatcaaagatattttgaagtttattgaaacaggatacaatctttctgaaaaatttaagatagacaaattatttaatgtattacgaagatatgtatatatggttgttataattgatttcgttttagtcagcaacattatattgccaaaatttaaccatttatgcacacacacacacacacacacacacttaacccttttttccacatacttaaagaatgacagagacaagaccatcatgtgcaaattgagcttaattggttaattagatatctttggaatttggaggttctggggagaatgtcgattacaattatttctgtaatattgtctgctatagaaaagtgactgtttttctttttcaaaatttagatacttatatgaaattgccagaagacatccttacttttatgccccggaactccttttctttgctaaaaggtataaagctgcttttacagaatgttgccaagctgctgataaagctgcctgcctgttgccaaaggtattatgcaaaagaatagaaaaaaagagttcattatccaacctgattttgtccattttgtggctagatttagggaacctgagtgtctgatacaaactttccgacatggtcaaaaaagccttccttttatctgtcttgaaaatctttcatctttgaaggcctacactctcgtttcttcttttaagatttgccaatgatgatctgtcagaggtaatcactgtgcatgtgtttaaagatttcaccactttttatggtggtgatcactatagtgaaatactgaaacttgtttgtcaaattgcacagcaaggggccacagttcttgtttatcttttcatgataatttttagtagggagggaattcaaagtagagaattttactgcatctagatgcctgagttcatgcattcattccataaatatatattatggaatgctttattttcttttctgaggagtttactgatgttggtggaggagagactgaaatgaattatacacaaaatttaaaaattagcaaaattgcagcccctgggatattagcgtactctttctctgacttttctcccacttttaaggctctttttcctggcaatgtttccagttggtttctaactacatagggaattccgctgtgaccagaatgatcgaatgatctttccttttcttagagagcaaaatcattattcgctaaagggagtacttgggaatttaggcataaattatgccttcaaaatttaatttggcacagtctcatctgagcttatggaggggtgtttcatgtagaatttttcttctaattttcatcaaattattcctttttgtagctcgatgaacttcgggatgaagggaaggcttcgtctgccaaacagagactcaagtgtgccagtctccaaaaatttggagaaagagctttcaaagcatggtaaatacttttaaacatagttggcatctttataacgatgtaaatgataatgcttcagtgacaaattgtacatttttatgtattttgcaaagtgctgtcaaatacatttctttggttgtctaacaggtagaactctaatagaggtaaaaatcagaatatcaatgacaatttgacattatttttaatcttttcttttctaaatagttgaataatttagaggacgctgtcctttttgtcctaaaaaaagggacagatatttaagttctatttatttataaaatcttggactcttattctaatggttcattatttttatagagctgtaggcatggttctttatttaattttttaaagttatttttaatttttgtggatacagagtaggtatacatatttacggggtatatgagatattttgatataagtatacaacatatataatccctttatttaattttatcttccccccaatgatctaaaactatttgcttgtccttttatgtcttatagttaaattcagtcaccaactaagttgaagttacttcttatttttgcatagctccagctctgatcttcatctcatgtttttgcctgagcctctgttttcatattacttagttggttctgggagcatactttaatagccgagtcaagaaaaatactagctgccccgtcacccacactcctcacctgctagtcaacagcaaatcaacacaacaggaaataaaatgaaaataatagacattatgcatgctctctagaaactgtcaattgaactgtatttgctcatcattcctaccatctacaccaccaaaatcaaccaaatttatgaaaaaaaacagccccaacataaaattatacacagataaacaggctatgattggttttgggaaagaagtcacctttacctgatttaggcaactgtgaaatgactagagaatgaagaaaattagacgtttacatcttgtcatagagtttgaagatagtgctggatctttctttttataagtaagatcaataaaaactccctcattctgtagaagttatgatttcttttctaagagacctttagaagtcagaaaaaatgtgtttcaattgagaaaaaagataactggagtttgtgtagtacttcccagattataaaatgcttttgtatgtattatctaatttaatcctcaaaacttcttcaatttagcatgttgtcatgacactgcagaggctgaagctcagagaggctgagccctctgctaacaagtcctactgctaacaagtgataaagccagagctggaagtcacatctggactccaaacctgatgcttctcagcctgttgccccttttagagttcctttttaatttctgcttttatgacttgctagatttctacctaccacacacactcttaaatggataattctgccctaaggataagtgattaccatttggttcagaactagaactaatgaattttaaaaattatttctgtatgtccattttgaattttcttatgagaaatagtatttgcctagtgttttcatataaaatatcgcatgataataccattttgattggcgattttctttttagggcagtagctcgcctgagccagagatttcccaaagctgagtttgcagaagtttccaagttagtgacagatcttaccaaagtccacacggaatgctgccatggagatctgcttgaatgtgctgatgacagggtaaagagtcgtcgatatgctttttggtagcttgcatgctcaagttggtagaatggatgcgtttggtatcattggtgatagctgacagtgggttgagattgtcttctgtgctttcgtctgtcctatcttcaatctttccctgcctatggtggtggtacctttctgtttttaacctggctataaattaccagataaacccattcactgatttgtaactcctttcagtcatgctctaactgtaaatgaaggcttaaactgaagtagaacagttacaaggttttacttggcagaacatcttgcaaggtagatgtctaagaagatttttttttctttttttaagacagagtttcgctcttgtttcccaggctggggtgcaatggtgtgatcttggctcagcgcaacctctgcctcctgggttcaagtgattctcatgcctcagcctcccaagtagctgggattacaggcatgcgccaccacacctggctaattttgtatttttagtagaggcggggtttcaccatattgtccagactggtctcgaactcctgacctcaggtgatccacccgccttggcctcccaaagtgctgggattacaggcatgagccaccttgcccagcctaagaagattttttgagggaggtaggtggacttggagaaggtcactacttgaagagatttttggaaatgatgtatttttcttctctatattccttcccttaattaactctgtttgttagatgtgcaaatatttggaatgatatctcttttctcaaaacttataatattttctttctccctttcttcaagattaaacttatgggcaaatactagaatcctaatctctcatggcactttctggaaaatttaaggcggttattttatatatgtaagcagggcctatgactatgatcttgactcatttttcaaaaatcttctatattttatttagttatttggtttcaaaaggcctgcacttaattttgggggattatttggaaaaacagcattgagttttaatgaaaaaaacttaaatgccctaacagtagaaacataaaattaataaataactgagctgagcacctgctactgattagtctattttaattaagtgggaatgtttttgtagtcctatctacatctccaggtttaggagcaaacagagtatgttcatagaaggaatatgtgtatggtcttagaatacaatgaatatgttctgccaacttaataaaggtctgaggagaaagtgtagcaatgtcaattcgtgttgaacaatttccaccaacttacttataggcggaccttgccaagtatatctgtgaaaatcaagattcgatctccagtaaactgaaggaatgctgtgaaaaacctctgttggaaaaatcccactgcattgccgaagtggaaaatgatgagatgcctgctgacttgccttcattagctgctgattttgttgaaagtaaggatgtttgcaaaaactatgctgaggcaaaggatgtcttcctgggcatgtaagtagataagaaattattcttttatagctttggcatgacctcacaacttaggaggatagcctaggcttttctgtggagttgctacaatttccctgctgcccagaatgtttcttcatccttccctttcccaggctttaacaatttttgaaatagttaattagttgaatacattgtcataaaataatacatgttcatggcaaagctcaacattccttactccttaggggtatttctgaaaatacgtctagaaacattttgtgtatatataaattatgtatacttcagtcattcattccaagtgtatttcttgaacatctataatatatgtgtgtgactatgtattgcctgtctatctaactaatctaatctaatctagtctatctatctaatctatgcaatgatagcaaagaagtataaaaagaaatatagagtctgacaccaggtgctttatatttggtgaaaagaccagaagttcagtataatggcaatatggtaggcaactcaattacaaaataaatgtttacatattgtcagaagttgtggtgataaactgcatttttgttgttggattatgataatgcactaaataatatttcctaaaattatgtaccctacaagatttcactcatacagagaagaaagagaatattttaagaacatatctctgcccatctatttatcagaatccttttgagatgtagtttaaatcaaacaaaatgttaataaaaataacaagtatcattcatcaaagacttcatatgtgccaagcagtgtgtgctttgtgtagattatgtcatatagttctcataatccaccttccgagacagatactatttattttttgagacagagttttactcttgttgcccaggctggagtgcaatggtgccatctcggctcaccacaacctccgcctcccaggttcaagcgattctcctgcctcagcctcctgggattacaggcatgcaccaccat

SEQ ID NO: 1102 - DNA, 6000 bp, Homo sapiens
ttcttagagagcaaaatcattattcgctaaagggagtacttgggaatttaggcataaattatgccttcaaaatttaatttggcacagtctcatctgagcttatggaggggtgtttcatgtagaatttttcttctaattttcatcaaattattcctttttgtagctcgatgaacttcgggatgaagggaaggcttcgtctgccaaacagagactcaagtgtgccagtctccaaaaatttggagaaagagctttcaaagcatggtaaatacttttaaacatagttggcatctttataacgatgtaaatgataatgcttcagtgacaaattgtacatttttatgtattttgcaaagtgctgtcaaatacatttctttggttgtctaacaggtagaactctaatagaggtaaaaatcagaatatcaatgacaatttgacattatttttaatcttttcttttctaaatagttgaataatttagaggacgctgtcctttttgtcctaaaaaaagggacagatatttaagttctatttatttataaaatcttggactcttattctaatggttcattatttttatagagctgtaggcatggttctttatttaattttttaaagttatttttaatttttgtggatacagagtaggtatacatatttacggggtatatgagatattttgatataagtatacaacatatataatccctttatttaattttatcttccccccaatgatctaaaactatttgcttgtccttttatgtcttatagttaaattcagtcaccaactaagttgaagttacttcttatttttgcatagctccagctctgatcttcatctcatgtttttgcctgagcctctgttttcatattacttagttggttctgggagcatactttaatagccgagtcaagaaaaatactagctgccccgtcacccacactcctcacctgctagtcaacagcaaatcaacacaacaggaaataaaatgaaaataatagacattatgcatgctctctagaaactgtcaattgaactgtatttgctcatcattcctaccatctacaccaccaaaatcaaccaaatttatgaaaaaaaacagccccaacataaaattatacacagataaacaggctatgattggttttgggaaagaagtcacctttacctgatttaggcaactgtgaaatgactagagaatgaagaaaattagacgtttacatcttgtcatagagtttgaagatagtgctggatctttctttttataagtaagatcaataaaaactccctcattctgtagaagttatgatttcttttctaagagacctttagaagtcagaaaaaatgtgtttcaattgagaaaaaagataactggagtttgtgtagtacttcccagattataaaatgcttttgtatgtattatctaatttaatcctcaaaacttcttcaatttagcatgttgtcatgacactgcagaggctgaagctcagagaggctgagccctctgctaacaagtcctactgctaacaagtgataaagccagagctggaagtcacatctggactccaaacctgatgcttctcagcctgttgccccttttagagttcctttttaatttctgcttttatgacttgctagatttctacctaccacacacactcttaaatggataattctgccctaaggataagtgattaccatttggttcagaactagaactaatgaattttaaaaattatttctgtatgtccattttgaattttcttatgagaaatagtatttgcctagtgttttcatataaaatatcgcatgataataccattttgattggcgattttctttttagggcagtagctcgcctgagccagagatttcccaaagctgagtttgcagaagtttccaagttagtgacagatcttaccaaagtccacacggaatgctgccatggagatctgcttgaatgtgctgatgacagggtaaagagtcgtcgatatgctttttggtagcttgcatgctcaagttggtagaatggatgcgtttggtatcattggtgatagctgacagtgggttgagattgtcttctgtgctttcgtctgtcctatcttcaatctttccctgcctatggtggtggtacctttctgtttttaacctggctataaattaccagataaacccattcactgatttgtaactcctttcagtcatgctctaactgtaaatgaaggcttaaactgaagtagaacagttacaaggttttacttggcagaacatcttgcaaggtagatgtctaagaagatttttttttctttttttaagacagagtttcgctcttgtttcccaggctggggtgcaatggtgtgatcttggctcagcgcaacctctgcctcctgggttcaagtgattctcatgcctcagcctcccaagtagctgggattacaggcatgcgccaccacacctggctaattttgtatttttagtagaggcggggtttcaccatattgtccagactggtctcgaactcctgacctcaggtgatccacccgccttggcctcccaaagtgctgggattacaggcatgagccaccttgcccagcctaagaagattttttgagggaggtaggtggacttggagaaggtcactacttgaagagatttttggaaatgatgtatttttcttctctatattccttcccttaattaactctgtttgttagatgtgcaaatatttggaatgatatctcttttctcaaaacttataatattttctttctccctttcttcaagattaaacttatgggcaaatactagaatcctaatctctcatggcactttctggaaaatttaaggcggttattttatatatgtaagcagggcctatgactatgatcttgactcatttttcaaaaatcttctatattttatttagttatttggtttcaaaaggcctgcacttaattttgggggattatttggaaaaacagcattgagttttaatgaaaaaaacttaaatgccctaacagtagaaacataaaattaataaataactgagctgagcacctgctactgattagtctattttaattaagtgggaatgtttttgtagtcctatctacatctccaggtttaggagcaaacagagtatgttcatagaaggaatatgtgtatggtcttagaatacaatgaatatgttctgccaacttaataaaggtctgaggagaaagtgtagcaatgtcaattcgtgttgaacaatttccaccaacttacttataggcggaccttgccaagtatatctgtgaaaatcaagattcgatctccagtaaactgaaggaatgctgtgaaaaacctctgttggaaaaatcccactgcattgccgaagtggaaaatgatgagatgcctgctgacttgccttcattagctgctgattttgttgaaagtaaggatgtttgcaaaaactatgctgaggcaaaggatgtcttcctgggcatgtaagtagataagaaattattcttttatagctttggcatgacctcacaacttaggaggatagcctaggcttttctgtggagttgctacaatttccctgctgcccagaatgtttcttcatccttccctttcccaggctttaacaatttttgaaatagttaattagttgaatacattgtcataaaataatacatgttcatggcaaagctcaacattccttactccttaggggtatttctgaaaatacgtctagaaacattttgtgtatatataaattatgtatacttcagtcattcattccaagtgtatttcttgaacatctataatatatgtgtgtgactatgtattgcctgtctatctaactaatctaatctaatctagtctatctatctaatctatgcaatgatagcaaagaagtataaaaagaaatatagagtctgacaccaggtgctttatatttggtgaaaagaccagaagttcagtataatggcaatatggtaggcaactcaattacaaaataaatgtttacatattgtcagaagttgtggtgataaactgcatttttgttgttggattatgataatgcactaaataatatttcctaaaattatgtaccctacaagatttcactcatacagagaagaaagagaatattttaagaacatatctctgcccatctatttatcagaatccttttgagatgtagtttaaatcaaacaaaatgttaataaaaataacaagtatcattcatcaaagacttcatatgtgccaagcagtgtgtgctttgtgtagattatgtcatatagttctcataatccaccttccgagacagatactatttattttttgagacagagttttactcttgttgcccaggctggagtgcaatggtgccatctcggctcaccacaacctccgcctcccaggttcaagcgattctcctgcctcagcctcctgggattacaggcatgcaccaccatgcctggctaattttgtatttttagtagagatggggtttcaccatgttggtcagactggtctcaaactcctgacctctggtgatatgcctgcctcagcctcctaaagtgctgggattacaggcatgagccactgtgcccagccgacagatactattattatttccattctaccgagaaggagactaaggctctgatcatttaaataagttgcctaaggtgatgcagtgatataagtagcagagctaggaattgagccttggtaactttaactctggaccccaagtccttagctactaagctttactgcatggggtttagtcaaattaagacttttggaatatgagttacttttgagattagctttgtgatattttttgtgctcatttgtccaacaaagtctattttattttcatcttaattaggtttttgtatgaatatgcaagaaggcatcctgattactctgtcgtgctgctgctgagacttgccaagacatatgaaaccactctagagaagtgctgtgccgctgcagatcctcatgaatgctatgccaaagtggtaggtttattgttggaaaaaaatgtagttctttgactgatgattccaataatgagaaagaaaaataatgcaagaatgtaaaatgatatacagtgcaatttagatcttttcttgagatggtttcaattctggaatcttaaacatgaaagaaaaagtagccttagaatgattaacaaaatttagactagttagaatagaaagatctgaatagagcaatctctaaaaaattttgatctttttttctctttttcacaatcctgagaacaaaaaaaaattaaatttaaatgttaattagaagatatttaacttagatgtaaagtgagttaacctgattccaggattaatcaagtactagaattagtatcttatggcaaattatagaacctatccctttagaatattttcaaatctttttgaggatgtttaggaatagttttacaagaaattaagttaggagaggaaatctgttctggaggatttttagggttcccactagcatatgtaatggtttctgaactattcagaatcagagaaaactcatttttcctgctttcaagaagctactgtatgccaggcaccatgcacaaacaatgaccaacgtaaaatctctcattttggagagcctggaatctaactggaaaggtgaactaataataataatatgtacaatcatagccatcatttattaaacttttattatatgcaaggcactgtttaatttcattagcttacctggtttacagagcagctctatgagatgagtgccatctttgcccctattttagggataaggattctgaaatgtggagatggtaagtaaaattgcacaactgaagaatgagttacatgacttggctcaaatactggtcattgaactccagagcctgaatattcttaaccacttacatgatgcaagctcaccaaataaatagttcgaatgtattgtgacagagcggcattgatattcatctattcatgtgg

SEQ ID NO: 1103 - DNA, 6000 bp, Homo sapiens
gaaatgactagagaatgaagaaaattagacgtttacatcttgtcatagagtttgaagatagtgctggatctttctttttataagtaagatcaataaaaactccctcattctgtagaagttatgatttcttttctaagagacctttagaagtcagaaaaaatgtgtttcaattgagaaaaaagataactggagtttgtgtagtacttcccagattataaaatgcttttgtatgtattatctaatttaatcctcaaaacttcttcaatttagcatgttgtcatgacactgcagaggctgaagctcagagaggctgagccctctgctaacaagtcctactgctaacaagtgataaagccagagctggaagtcacatctggactccaaacctgatgcttctcagcctgttgccccttttagagttcctttttaatttctgcttttatgacttgctagatttctacctaccacacacactcttaaatggataattctgccctaaggataagtgattaccatttggttcagaactagaactaatgaattttaaaaattatttctgtatgtccattttgaattttcttatgagaaatagtatttgcctagtgttttcatataaaatatcgcatgataataccattttgattggcgattttctttttagggcagtagctcgcctgagccagagatttcccaaagctgagtttgcagaagtttccaagttagtgacagatcttaccaaagtccacacggaatgctgccatggagatctgcttgaatgtgctgatgacagggtaaagagtcgtcgatatgctttttggtagcttgcatgctcaagttggtagaatggatgcgtttggtatcattggtgatagctgacagtgggttgagattgtcttctgtgctttcgtctgtcctatcttcaatctttccctgcctatggtggtggtacctttctgtttttaacctggctataaattaccagataaacccattcactgatttgtaactcctttcagtcatgctctaactgtaaatgaaggcttaaactgaagtagaacagttacaaggttttacttggcagaacatcttgcaaggtagatgtctaagaagatttttttttctttttttaagacagagtttcgctcttgtttcccaggctggggtgcaatggtgtgatcttggctcagcgcaacctctgcctcctgggttcaagtgattctcatgcctcagcctcccaagtagctgggattacaggcatgcgccaccacacctggctaattttgtatttttagtagaggcggggtttcaccatattgtccagactggtctcgaactcctgacctcaggtgatccacccgccttggcctcccaaagtgctgggattacaggcatgagccaccttgcccagcctaagaagattttttgagggaggtaggtggacttggagaaggtcactacttgaagagatttttggaaatgatgtatttttcttctctatattccttcccttaattaactctgtttgttagatgtgcaaatatttggaatgatatctcttttctcaaaacttataatattttctttctccctttcttcaagattaaacttatgggcaaatactagaatcctaatctctcatggcactttctggaaaatttaaggcggttattttatatatgtaagcagggcctatgactatgatcttgactcatttttcaaaaatcttctatattttatttagttatttggtttcaaaaggcctgcacttaattttgggggattatttggaaaaacagcattgagttttaatgaaaaaaacttaaatgccctaacagtagaaacataaaattaataaataactgagctgagcacctgctactgattagtctattttaattaagtgggaatgtttttgtagtcctatctacatctccaggtttaggagcaaacagagtatgttcatagaaggaatatgtgtatggtcttagaatacaatgaatatgttctgccaacttaataaaggtctgaggagaaagtgtagcaatgtcaattcgtgttgaacaatttccaccaacttacttataggcggaccttgccaagtatatctgtgaaaatcaagattcgatctccagtaaactgaaggaatgctgtgaaaaacctctgttggaaaaatcccactgcattgccgaagtggaaaatgatgagatgcctgctgacttgccttcattagctgctgattttgttgaaagtaaggatgtttgcaaaaactatgctgaggcaaaggatgtcttcctgggcatgtaagtagataagaaattattcttttatagctttggcatgacctcacaacttaggaggatagcctaggcttttctgtggagttgctacaatttccctgctgcccagaatgtttcttcatccttccctttcccaggctttaacaatttttgaaatagttaattagttgaatacattgtcataaaataatacatgttcatggcaaagctcaacattccttactccttaggggtatttctgaaaatacgtctagaaacattttgtgtatatataaattatgtatacttcagtcattcattccaagtgtatttcttgaacatctataatatatgtgtgtgactatgtattgcctgtctatctaactaatctaatctaatctagtctatctatctaatctatgcaatgatagcaaagaagtataaaaagaaatatagagtctgacaccaggtgctttatatttggtgaaaagaccagaagttcagtataatggcaatatggtaggcaactcaattacaaaataaatgtttacatattgtcagaagttgtggtgataaactgcatttttgttgttggattatgataatgcactaaataatatttcctaaaattatgtaccctacaagatttcactcatacagagaagaaagagaatattttaagaacatatctctgcccatctatttatcagaatccttttgagatgtagtttaaatcaaacaaaatgttaataaaaataacaagtatcattcatcaaagacttcatatgtgccaagcagtgtgtgctttgtgtagattatgtcatatagttctcataatccaccttccgagacagatactatttattttttgagacagagttttactcttgttgcccaggctggagtgcaatggtgccatctcggctcaccacaacctccgcctcccaggttcaagcgattctcctgcctcagcctcctgggattacaggcatgcaccaccatgcctggctaattttgtatttttagtagagatggggtttcaccatgttggtcagactggtctcaaactcctgacctctggtgatatgcctgcctcagcctcctaaagtgctgggattacaggcatgagccactgtgcccagccgacagatactattattatttccattctaccgagaaggagactaaggctctgatcatttaaataagttgcctaaggtgatgcagtgatataagtagcagagctaggaattgagccttggtaactttaactctggaccccaagtccttagctactaagctttactgcatggggtttagtcaaattaagacttttggaatatgagttacttttgagattagctttgtgatattttttgtgctcatttgtccaacaaagtctattttattttcatcttaattaggtttttgtatgaatatgcaagaaggcatcctgattactctgtcgtgctgctgctgagacttgccaagacatatgaaaccactctagagaagtgctgtgccgctgcagatcctcatgaatgctatgccaaagtggtaggtttattgttggaaaaaaatgtagttctttgactgatgattccaataatgagaaagaaaaataatgcaagaatgtaaaatgatatacagtgcaatttagatcttttcttgagatggtttcaattctggaatcttaaacatgaaagaaaaagtagccttagaatgattaacaaaatttagactagttagaatagaaagatctgaatagagcaatctctaaaaaattttgatctttttttctctttttcacaatcctgagaacaaaaaaaaattaaatttaaatgttaattagaagatatttaacttagatgtaaagtgagttaacctgattccaggattaatcaagtactagaattagtatcttatggcaaattatagaacctatccctttagaatattttcaaatctttttgaggatgtttaggaatagttttacaagaaattaagttaggagaggaaatctgttctggaggatttttagggttcccactagcatatgtaatggtttctgaactattcagaatcagagaaaactcatttttcctgctttcaagaagctactgtatgccaggcaccatgcacaaacaatgaccaacgtaaaatctctcattttggagagcctggaatctaactggaaaggtgaactaataataataatatgtacaatcatagccatcatttattaaacttttattatatgcaaggcactgtttaatttcattagcttacctggtttacagagcagctctatgagatgagtgccatctttgcccctattttagggataaggattctgaaatgtggagatggtaagtaaaattgcacaactgaagaatgagttacatgacttggctcaaatactggtcattgaactccagagcctgaatattcttaaccacttacatgatgcaagctcaccaaataaatagttcgaatgtattgtgacagagcggcattgatattcatctattcatgtggctttgagtaggaagaagaaaggatatcattctgaccagaggggtgaaaaacaacctgcatctgatcctgaggcataatactattaacacaattcttttatgtttcagttcgatgaatttaaacctcttgtggaagagcctcagaatttaatcaaacaaaattgtgagctttttgagcagcttggagagtacaaattccagaatgcgtaagtaatttttattgactgattttttttatcaatttgtaattatttaagacttaatatatgagccacctagcatagaacttttaagaatgaaaatacattgcatatttctaatcactctttgtcaagaaagataggagaggagagataaaatagttgatggggtggagaggtctatatttgaatgtagtctaaaaattgttctcttaagattggaagtatgtaggctgggagggtaaataccaaatcttggtatatcagaactgagcatgtcccttgaaggttaagaaatagttaatgggcaaatagagcatggcaatattttgtagagcagcaagtagtaggccttgaatagatgtcgctcaaaaagtaatatgtaagctgaacacaaaaatgtaacaaatgaatttagatacatatttgaatattaaattcaggttgtttgggagatgcacctagtctttgatggttaaacctttccctccatagaagagacagagacagaatggcttgctggactaatgtcccaattcaatagagtcttatctatgaaggttaaaaacaagaagagacatattatacagtagatatttattgtgtggctcatacacatggtgctcttctgattatggattttagagataataacagtgaacaagacatagtttctttcctcgagtagattaaagtcatacattgacttttaatggtgactggcattcttaatacatgattattatatattaggtaccatgtcagattaattataatactttactacttttaatttaacccttgaactatccctattgagtcagatatatttccttccattttctacttgtatctttcaagtttagcatatgctgatacatatgaagctctctccaggttttattgaaagaagaaattaataaatttattaatgtcactgaattaggcaactcactttcccaagattatgcaagtggtacaggtgga

SEQ ID NO: 1104 - DNA, 6000 bp, Homo sapiens
ttgtccagactggtctcgaactcctgacctcaggtgatccacccgccttggcctcccaaagtgctgggattacaggcatgagccaccttgcccagcctaagaagattttttgagggaggtaggtggacttggagaaggtcactacttgaagagatttttggaaatgatgtatttttcttctctatattccttcccttaattaactctgtttgttagatgtgcaaatatttggaatgatatctcttttctcaaaacttataatattttctttctccctttcttcaagattaaacttatgggcaaatactagaatcctaatctctcatggcactttctggaaaatttaaggcggttattttatatatgtaagcagggcctatgactatgatcttgactcatttttcaaaaatcttctatattttatttagttatttggtttcaaaaggcctgcacttaattttgggggattatttggaaaaacagcattgagttttaatgaaaaaaacttaaatgccctaacagtagaaacataaaattaataaataactgagctgagcacctgctactgattagtctattttaattaagtgggaatgtttttgtagtcctatctacatctccaggtttaggagcaaacagagtatgttcatagaaggaatatgtgtatggtcttagaatacaatgaatatgttctgccaacttaataaaggtctgaggagaaagtgtagcaatgtcaattcgtgttgaacaatttccaccaacttacttataggcggaccttgccaagtatatctgtgaaaatcaagattcgatctccagtaaactgaaggaatgctgtgaaaaacctctgttggaaaaatcccactgcattgccgaagtggaaaatgatgagatgcctgctgacttgccttcattagctgctgattttgttgaaagtaaggatgtttgcaaaaactatgctgaggcaaaggatgtcttcctgggcatgtaagtagataagaaattattcttttatagctttggcatgacctcacaacttaggaggatagcctaggcttttctgtggagttgctacaatttccctgctgcccagaatgtttcttcatccttccctttcccaggctttaacaatttttgaaatagttaattagttgaatacattgtcataaaataatacatgttcatggcaaagctcaacattccttactccttaggggtatttctgaaaatacgtctagaaacattttgtgtatatataaattatgtatacttcagtcattcattccaagtgtatttcttgaacatctataatatatgtgtgtgactatgtattgcctgtctatctaactaatctaatctaatctagtctatctatctaatctatgcaatgatagcaaagaagtataaaaagaaatatagagtctgacaccaggtgctttatatttggtgaaaagaccagaagttcagtataatggcaatatggtaggcaactcaattacaaaataaatgtttacatattgtcagaagttgtggtgataaactgcatttttgttgttggattatgataatgcactaaataatatttcctaaaattatgtaccctacaagatttcactcatacagagaagaaagagaatattttaagaacatatctctgcccatctatttatcagaatccttttgagatgtagtttaaatcaaacaaaatgttaataaaaataacaagtatcattcatcaaagacttcatatgtgccaagcagtgtgtgctttgtgtagattatgtcatatagttctcataatccaccttccgagacagatactatttattttttgagacagagttttactcttgttgcccaggctggagtgcaatggtgccatctcggctcaccacaacctccgcctcccaggttcaagcgattctcctgcctcagcctcctgggattacaggcatgcaccaccatgcctggctaattttgtatttttagtagagatggggtttcaccatgttggtcagactggtctcaaactcctgacctctggtgatatgcctgcctcagcctcctaaagtgctgggattacaggcatgagccactgtgcccagccgacagatactattattatttccattctaccgagaaggagactaaggctctgatcatttaaataagttgcctaaggtgatgcagtgatataagtagcagagctaggaattgagccttggtaactttaactctggaccccaagtccttagctactaagctttactgcatggggtttagtcaaattaagacttttggaatatgagttacttttgagattagctttgtgatattttttgtgctcatttgtccaacaaagtctattttattttcatcttaattaggtttttgtatgaatatgcaagaaggcatcctgattactctgtcgtgctgctgctgagacttgccaagacatatgaaaccactctagagaagtgctgtgccgctgcagatcctcatgaatgctatgccaaagtggtaggtttattgttggaaaaaaatgtagttctttgactgatgattccaataatgagaaagaaaaataatgcaagaatgtaaaatgatatacagtgcaatttagatcttttcttgagatggtttcaattctggaatcttaaacatgaaagaaaaagtagccttagaatgattaacaaaatttagactagttagaatagaaagatctgaatagagcaatctctaaaaaattttgatctttttttctctttttcacaatcctgagaacaaaaaaaaattaaatttaaatgttaattagaagatatttaacttagatgtaaagtgagttaacctgattccaggattaatcaagtactagaattagtatcttatggcaaattatagaacctatccctttagaatattttcaaatctttttgaggatgtttaggaatagttttacaagaaattaagttaggagaggaaatctgttctggaggatttttagggttcccactagcatatgtaatggtttctgaactattcagaatcagagaaaactcatttttcctgctttcaagaagctactgtatgccaggcaccatgcacaaacaatgaccaacgtaaaatctctcattttggagagcctggaatctaactggaaaggtgaactaataataataatatgtacaatcatagccatcatttattaaacttttattatatgcaaggcactgtttaatttcattagcttacctggtttacagagcagctctatgagatgagtgccatctttgcccctattttagggataaggattctgaaatgtggagatggtaagtaaaattgcacaactgaagaatgagttacatgacttggctcaaatactggtcattgaactccagagcctgaatattcttaaccacttacatgatgcaagctcaccaaataaatagttcgaatgtattgtgacagagcggcattgatattcatctattcatgtggctttgagtaggaagaagaaaggatatcattctgaccagaggggtgaaaaacaacctgcatctgatcctgaggcataatactattaacacaattcttttatgtttcagttcgatgaatttaaacctcttgtggaagagcctcagaatttaatcaaacaaaattgtgagctttttgagcagcttggagagtacaaattccagaatgcgtaagtaatttttattgactgattttttttatcaatttgtaattatttaagacttaatatatgagccacctagcatagaacttttaagaatgaaaatacattgcatatttctaatcactctttgtcaagaaagataggagaggagagataaaatagttgatggggtggagaggtctatatttgaatgtagtctaaaaattgttctcttaagattggaagtatgtaggctgggagggtaaataccaaatcttggtatatcagaactgagcatgtcccttgaaggttaagaaatagttaatgggcaaatagagcatggcaatattttgtagagcagcaagtagtaggccttgaatagatgtcgctcaaaaagtaatatgtaagctgaacacaaaaatgtaacaaatgaatttagatacatatttgaatattaaattcaggttgtttgggagatgcacctagtctttgatggttaaacctttccctccatagaagagacagagacagaatggcttgctggactaatgtcccaattcaatagagtcttatctatgaaggttaaaaacaagaagagacatattatacagtagatatttattgtgtggctcatacacatggtgctcttctgattatggattttagagataataacagtgaacaagacatagtttctttcctcgagtagattaaagtcatacattgacttttaatggtgactggcattcttaatacatgattattatatattaggtaccatgtcagattaattataatactttactacttttaatttaacccttgaactatccctattgagtcagatatatttccttccattttctacttgtatctttcaagtttagcatatgctgatacatatgaagctctctccaggttttattgaaagaagaaattaataaatttattaatgtcactgaattaggcaactcactttcccaagattatgcaagtggtacaggtggaactcaaagccaagtttaactagttgttcaggagaatgttttctaccctccactaacccactactctgcagatggagataatatgatgaatggaacatagcaacatcttagttgattccggccaagtgttctctgttttatctactatgttagacagtttcttgccttgctgaaaacacatgacttctttttttcaggctattagttcgttacaccaagaaagtaccccaagtgtcaactccaactcttgtagaggtctcaagaaacctaggaaaagtgggcagcaaatgttgtaaacatcctgaagcaaaaagaatgccctgtgcagaagactatgtgagtctttaaaaaaatataataaattaataatgaaaaaattttacctttagatattgataatgctagctttcataagcagaaggaagtaatgtgtgtgtgtgcatgtttgtgtgcatgtgtgtgtgcatgcacgtgtgtgtatgtgtgatattggcagtcaaggccccgaggatgataattttttttttttttttgagacggagtctcgctttgttgtccaggctggagtgcagtggtgccatctcggctcactgcaacctccgcctcccaggttcaagccattctcctgcctcagcctcccaagtagctgggactacaggtgcatgccaccatgcctggctaattttttgtatttttagtagaaaattttcagcttcacctcttttgaatttctgctctcctgcctgttctttagctatccgtggtcctgaaccagttatgtgtgttgcatgagaaaacgccagtaagtgacagagtcaccaaatgctgcacagaatccttggtgaacaggcgaccatgcttttcagctctggaagtcgatgaaacatacgttcccaaagagtttaatgctgaaacattcaccttccatgcagatatatgcacactttctgagaaggagagacaaatcaagaaacaaacgtgaggagtatttcattactgcatgtgtttgtagtcttgatagcaagaactgtcaattcaagctagcaactttttcctgaagtagtgattatatttcttagaggaaagtattggagtgttgcccttattatgctgataagagtacccagaataaaatgaataactttttaaagacaaaatcctctgttataatattgctaaaattattcagagtaatattgtggattaaagccacaatagaataacatgttaggccatattcagtagaaaaagatgaacaattaactgataaatttgtgcacatggcaaattagttaatgggaaccataggagaat

SEQ ID NO: 1105 - DNA, 6000 bp, Homo sapiens
agagtatgttcatagaaggaatatgtgtatggtcttagaatacaatgaatatgttctgccaacttaataaaggtctgaggagaaagtgtagcaatgtcaattcgtgttgaacaatttccaccaacttacttataggcggaccttgccaagtatatctgtgaaaatcaagattcgatctccagtaaactgaaggaatgctgtgaaaaacctctgttggaaaaatcccactgcattgccgaagtggaaaatgatgagatgcctgctgacttgccttcattagctgctgattttgttgaaagtaaggatgtttgcaaaaactatgctgaggcaaaggatgtcttcctgggcatgtaagtagataagaaattattcttttatagctttggcatgacctcacaacttaggaggatagcctaggcttttctgtggagttgctacaatttccctgctgcccagaatgtttcttcatccttccctttcccaggctttaacaatttttgaaatagttaattagttgaatacattgtcataaaataatacatgttcatggcaaagctcaacattccttactccttaggggtatttctgaaaatacgtctagaaacattttgtgtatatataaattatgtatacttcagtcattcattccaagtgtatttcttgaacatctataatatatgtgtgtgactatgtattgcctgtctatctaactaatctaatctaatctagtctatctatctaatctatgcaatgatagcaaagaagtataaaaagaaatatagagtctgacaccaggtgctttatatttggtgaaaagaccagaagttcagtataatggcaatatggtaggcaactcaattacaaaataaatgtttacatattgtcagaagttgtggtgataaactgcatttttgttgttggattatgataatgcactaaataatatttcctaaaattatgtaccctacaagatttcactcatacagagaagaaagagaatattttaagaacatatctctgcccatctatttatcagaatccttttgagatgtagtttaaatcaaacaaaatgttaataaaaataacaagtatcattcatcaaagacttcatatgtgccaagcagtgtgtgctttgtgtagattatgtcatatagttctcataatccaccttccgagacagatactatttattttttgagacagagttttactcttgttgcccaggctggagtgcaatggtgccatctcggctcaccacaacctccgcctcccaggttcaagcgattctcctgcctcagcctcctgggattacaggcatgcaccaccatgcctggctaattttgtatttttagtagagatggggtttcaccatgttggtcagactggtctcaaactcctgacctctggtgatatgcctgcctcagcctcctaaagtgctgggattacaggcatgagccactgtgcccagccgacagatactattattatttccattctaccgagaaggagactaaggctctgatcatttaaataagttgcctaaggtgatgcagtgatataagtagcagagctaggaattgagccttggtaactttaactctggaccccaagtccttagctactaagctttactgcatggggtttagtcaaattaagacttttggaatatgagttacttttgagattagctttgtgatattttttgtgctcatttgtccaacaaagtctattttattttcatcttaattaggtttttgtatgaatatgcaagaaggcatcctgattactctgtcgtgctgctgctgagacttgccaagacatatgaaaccactctagagaagtgctgtgccgctgcagatcctcatgaatgctatgccaaagtggtaggtttattgttggaaaaaaatgtagttctttgactgatgattccaataatgagaaagaaaaataatgcaagaatgtaaaatgatatacagtgcaatttagatcttttcttgagatggtttcaattctggaatcttaaacatgaaagaaaaagtagccttagaatgattaacaaaatttagactagttagaatagaaagatctgaatagagcaatctctaaaaaattttgatctttttttctctttttcacaatcctgagaacaaaaaaaaattaaatttaaatgttaattagaagatatttaacttagatgtaaagtgagttaacctgattccaggattaatcaagtactagaattagtatcttatggcaaattatagaacctatccctttagaatattttcaaatctttttgaggatgtttaggaatagttttacaagaaattaagttaggagaggaaatctgttctggaggatttttagggttcccactagcatatgtaatggtttctgaactattcagaatcagagaaaactcatttttcctgctttcaagaagctactgtatgccaggcaccatgcacaaacaatgaccaacgtaaaatctctcattttggagagcctggaatctaactggaaaggtgaactaataataataatatgtacaatcatagccatcatttattaaacttttattatatgcaaggcactgtttaatttcattagcttacctggtttacagagcagctctatgagatgagtgccatctttgcccctattttagggataaggattctgaaatgtggagatggtaagtaaaattgcacaactgaagaatgagttacatgacttggctcaaatactggtcattgaactccagagcctgaatattcttaaccacttacatgatgcaagctcaccaaataaatagttcgaatgtattgtgacagagcggcattgatattcatctattcatgtggctttgagtaggaagaagaaaggatatcattctgaccagaggggtgaaaaacaacctgcatctgatcctgaggcataatactattaacacaattcttttatgtttcagttcgatgaatttaaacctcttgtggaagagcctcagaatttaatcaaacaaaattgtgagctttttgagcagcttggagagtacaaattccagaatgcgtaagtaatttttattgactgattttttttatcaatttgtaattatttaagacttaatatatgagccacctagcatagaacttttaagaatgaaaatacattgcatatttctaatcactctttgtcaagaaagataggagaggagagataaaatagttgatggggtggagaggtctatatttgaatgtagtctaaaaattgttctcttaagattggaagtatgtaggctgggagggtaaataccaaatcttggtatatcagaactgagcatgtcccttgaaggttaagaaatagttaatgggcaaatagagcatggcaatattttgtagagcagcaagtagtaggccttgaatagatgtcgctcaaaaagtaatatgtaagctgaacacaaaaatgtaacaaatgaatttagatacatatttgaatattaaattcaggttgtttgggagatgcacctagtctttgatggttaaacctttccctccatagaagagacagagacagaatggcttgctggactaatgtcccaattcaatagagtcttatctatgaaggttaaaaacaagaagagacatattatacagtagatatttattgtgtggctcatacacatggtgctcttctgattatggattttagagataataacagtgaacaagacatagtttctttcctcgagtagattaaagtcatacattgacttttaatggtgactggcattcttaatacatgattattatatattaggtaccatgtcagattaattataatactttactacttttaatttaacccttgaactatccctattgagtcagatatatttccttccattttctacttgtatctttcaagtttagcatatgctgatacatatgaagctctctccaggttttattgaaagaagaaattaataaatttattaatgtcactgaattaggcaactcactttcccaagattatgcaagtggtacaggtggaactcaaagccaagtttaactagttgttcaggagaatgttttctaccctccactaacccactactctgcagatggagataatatgatgaatggaacatagcaacatcttagttgattccggccaagtgttctctgttttatctactatgttagacagtttcttgccttgctgaaaacacatgacttctttttttcaggctattagttcgttacaccaagaaagtaccccaagtgtcaactccaactcttgtagaggtctcaagaaacctaggaaaagtgggcagcaaatgttgtaaacatcctgaagcaaaaagaatgccctgtgcagaagactatgtgagtctttaaaaaaatataataaattaataatgaaaaaattttacctttagatattgataatgctagctttcataagcagaaggaagtaatgtgtgtgtgtgcatgtttgtgtgcatgtgtgtgtgcatgcacgtgtgtgtatgtgtgatattggcagtcaaggccccgaggatgataattttttttttttttttgagacggagtctcgctttgttgtccaggctggagtgcagtggtgccatctcggctcactgcaacctccgcctcccaggttcaagccattctcctgcctcagcctcccaagtagctgggactacaggtgcatgccaccatgcctggctaattttttgtatttttagtagaaaattttcagcttcacctcttttgaatttctgctctcctgcctgttctttagctatccgtggtcctgaaccagttatgtgtgttgcatgagaaaacgccagtaagtgacagagtcaccaaatgctgcacagaatccttggtgaacaggcgaccatgcttttcagctctggaagtcgatgaaacatacgttcccaaagagtttaatgctgaaacattcaccttccatgcagatatatgcacactttctgagaaggagagacaaatcaagaaacaaacgtgaggagtatttcattactgcatgtgtttgtagtcttgatagcaagaactgtcaattcaagctagcaactttttcctgaagtagtgattatatttcttagaggaaagtattggagtgttgcccttattatgctgataagagtacccagaataaaatgaataactttttaaagacaaaatcctctgttataatattgctaaaattattcagagtaatattgtggattaaagccacaatagaataacatgttaggccatattcagtagaaaaagatgaacaattaactgataaatttgtgcacatggcaaattagttaatgggaaccataggagaatttatttctagatgtaaataattattttaagtttgccctatggtggccccacacatgagacaaacccccaagatgtgacttttgagaatgagacttggataaaaaacatgtagaaatgcaagccctgaagctcaactccctattgctatcacaggggttataattgcataaaatttagctatagaaagttgctgtcatctcttgtgggctgtaatcatcgtctaggcttaagagtaatattgcaaaacctgtcatgcccacacaaatctctccctggcattgttgtctttgcagatgtcagtgaaagagaaccagcagctcccatgagtttggatagccttattttctatagcctccccactattagctttgaagggagcaaagtttaagaaccaaatataaagtttctcatctttatagatgagaaaaattttaaataaagtccaagataattaaatttttaaggatcatttttagctctttaatagcaataaaactcaatatgacataatatggcacttccaaaatctgaataatatataattgcaatgacatacttcttttcagagatttactgaaaagaaatttgttgacactacataacgtgatgagtggtttatactgattgtttcagttgg

SEQ ID NO: 1106 - DNA, 6000 bp, Homo sapiens
gctaattttgtatttttagtagagatggggtttcaccatgttggtcagactggtctcaaactcctgacctctggtgatatgcctgcctcagcctcctaaagtgctgggattacaggcatgagccactgtgcccagccgacagatactattattatttccattctaccgagaaggagactaaggctctgatcatttaaataagttgcctaaggtgatgcagtgatataagtagcagagctaggaattgagccttggtaactttaactctggaccccaagtccttagctactaagctttactgcatggggtttagtcaaattaagacttttggaatatgagttacttttgagattagctttgtgatattttttgtgctcatttgtccaacaaagtctattttattttcatcttaattaggtttttgtatgaatatgcaagaaggcatcctgattactctgtcgtgctgctgctgagacttgccaagacatatgaaaccactctagagaagtgctgtgccgctgcagatcctcatgaatgctatgccaaagtggtaggtttattgttggaaaaaaatgtagttctttgactgatgattccaataatgagaaagaaaaataatgcaagaatgtaaaatgatatacagtgcaatttagatcttttcttgagatggtttcaattctggaatcttaaacatgaaagaaaaagtagccttagaatgattaacaaaatttagactagttagaatagaaagatctgaatagagcaatctctaaaaaattttgatctttttttctctttttcacaatcctgagaacaaaaaaaaattaaatttaaatgttaattagaagatatttaacttagatgtaaagtgagttaacctgattccaggattaatcaagtactagaattagtatcttatggcaaattatagaacctatccctttagaatattttcaaatctttttgaggatgtttaggaatagttttacaagaaattaagttaggagaggaaatctgttctggaggatttttagggttcccactagcatatgtaatggtttctgaactattcagaatcagagaaaactcatttttcctgctttcaagaagctactgtatgccaggcaccatgcacaaacaatgaccaacgtaaaatctctcattttggagagcctggaatctaactggaaaggtgaactaataataataatatgtacaatcatagccatcatttattaaacttttattatatgcaaggcactgtttaatttcattagcttacctggtttacagagcagctctatgagatgagtgccatctttgcccctattttagggataaggattctgaaatgtggagatggtaagtaaaattgcacaactgaagaatgagttacatgacttggctcaaatactggtcattgaactccagagcctgaatattcttaaccacttacatgatgcaagctcaccaaataaatagttcgaatgtattgtgacagagcggcattgatattcatctattcatgtggctttgagtaggaagaagaaaggatatcattctgaccagaggggtgaaaaacaacctgcatctgatcctgaggcataatactattaacacaattcttttatgtttcagttcgatgaatttaaacctcttgtggaagagcctcagaatttaatcaaacaaaattgtgagctttttgagcagcttggagagtacaaattccagaatgcgtaagtaatttttattgactgattttttttatcaatttgtaattatttaagacttaatatatgagccacctagcatagaacttttaagaatgaaaatacattgcatatttctaatcactctttgtcaagaaagataggagaggagagataaaatagttgatggggtggagaggtctatatttgaatgtagtctaaaaattgttctcttaagattggaagtatgtaggctgggagggtaaataccaaatcttggtatatcagaactgagcatgtcccttgaaggttaagaaatagttaatgggcaaatagagcatggcaatattttgtagagcagcaagtagtaggccttgaatagatgtcgctcaaaaagtaatatgtaagctgaacacaaaaatgtaacaaatgaatttagatacatatttgaatattaaattcaggttgtttgggagatgcacctagtctttgatggttaaacctttccctccatagaagagacagagacagaatggcttgctggactaatgtcccaattcaatagagtcttatctatgaaggttaaaaacaagaagagacatattatacagtagatatttattgtgtggctcatacacatggtgctcttctgattatggattttagagataataacagtgaacaagacatagtttctttcctcgagtagattaaagtcatacattgacttttaatggtgactggcattcttaatacatgattattatatattaggtaccatgtcagattaattataatactttactacttttaatttaacccttgaactatccctattgagtcagatatatttccttccattttctacttgtatctttcaagtttagcatatgctgatacatatgaagctctctccaggttttattgaaagaagaaattaataaatttattaatgtcactgaattaggcaactcactttcccaagattatgcaagtggtacaggtggaactcaaagccaagtttaactagttgttcaggagaatgttttctaccctccactaacccactactctgcagatggagataatatgatgaatggaacatagcaacatcttagttgattccggccaagtgttctctgttttatctactatgttagacagtttcttgccttgctgaaaacacatgacttctttttttcaggctattagttcgttacaccaagaaagtaccccaagtgtcaactccaactcttgtagaggtctcaagaaacctaggaaaagtgggcagcaaatgttgtaaacatcctgaagcaaaaagaatgccctgtgcagaagactatgtgagtctttaaaaaaatataataaattaataatgaaaaaattttacctttagatattgataatgctagctttcataagcagaaggaagtaatgtgtgtgtgtgcatgtttgtgtgcatgtgtgtgtgcatgcacgtgtgtgtatgtgtgatattggcagtcaaggccccgaggatgataattttttttttttttttgagacggagtctcgctttgttgtccaggctggagtgcagtggtgccatctcggctcactgcaacctccgcctcccaggttcaagccattctcctgcctcagcctcccaagtagctgggactacaggtgcatgccaccatgcctggctaattttttgtatttttagtagaaaattttcagcttcacctcttttgaatttctgctctcctgcctgttctttagctatccgtggtcctgaaccagttatgtgtgttgcatgagaaaacgccagtaagtgacagagtcaccaaatgctgcacagaatccttggtgaacaggcgaccatgcttttcagctctggaagtcgatgaaacatacgttcccaaagagtttaatgctgaaacattcaccttccatgcagatatatgcacactttctgagaaggagagacaaatcaagaaacaaacgtgaggagtatttcattactgcatgtgtttgtagtcttgatagcaagaactgtcaattcaagctagcaactttttcctgaagtagtgattatatttcttagaggaaagtattggagtgttgcccttattatgctgataagagtacccagaataaaatgaataactttttaaagacaaaatcctctgttataatattgctaaaattattcagagtaatattgtggattaaagccacaatagaataacatgttaggccatattcagtagaaaaagatgaacaattaactgataaatttgtgcacatggcaaattagttaatgggaaccataggagaatttatttctagatgtaaataattattttaagtttgccctatggtggccccacacatgagacaaacccccaagatgtgacttttgagaatgagacttggataaaaaacatgtagaaatgcaagccctgaagctcaactccctattgctatcacaggggttataattgcataaaatttagctatagaaagttgctgtcatctcttgtgggctgtaatcatcgtctaggcttaagagtaatattgcaaaacctgtcatgcccacacaaatctctccctggcattgttgtctttgcagatgtcagtgaaagagaaccagcagctcccatgagtttggatagccttattttctatagcctccccactattagctttgaagggagcaaagtttaagaaccaaatataaagtttctcatctttatagatgagaaaaattttaaataaagtccaagataattaaatttttaaggatcatttttagctctttaatagcaataaaactcaatatgacataatatggcacttccaaaatctgaataatatataattgcaatgacatacttcttttcagagatttactgaaaagaaatttgttgacactacataacgtgatgagtggtttatactgattgtttcagttggtcttcccaccaactccatgaaagtggattttattatcctcatcatgcagatgagaatattgagacttatagcggtatgcctgagccccaaagtactcagagttgcctggctccaagatttataatcttaaatgatgggactaccatccttactctctccatttttctatacgtgagtaatgttttttctgttttttttttttctttttccattcaaactcagtgcacttgttgagctcgtgaaacacaagcccaaggcaacaaaagagcaactgaaagctgttatggatgatttcgcagcttttgtagagaagtgctgcaaggctgacgataaggagacctgctttgccgaggaggtactacagttctcttcattttaatatgtccagtattcatttttgcatgtttggttaggctagggcttagggatttatatatcaaaggaggctttgtacatgtgggacagggatcttattttacaaacaattgtcttacaaaatgaataaaacagcactttgtttttatctcctgctctattgtgccatactgttaaatgtttataatgcctgttctgtttccaaatttgtgatgcttatgaatattaataggaatatttgtaaggcctgaaatattttgatcatgaaatcaaaacattaatttatttaaacatttacttgaaatgtggtggtttgtgatttagttgattttataggctagtgggagaatttacattcaaatgtctaaatcacttaaaattgccctttatggcctgacagtaacttttttttattcatttggggacaactatgtccgtgagcttccgtccagagattatagtagtaaattgtaattaaaggatatgatgcacgtgaaatcactttgcaatcatcaatagcttcataaatgttaattttgtatcctaatagtaatgctaatattttcctaacatctgtcatgtctttgtgttcagggtaaaaaacttgttgctgcaagtcaagctgccttaggcttataacatcacatttaaaagcatctcaggtaactatattttgaattttttaaaaaagtaactataatagttattattaaaatagcaaagattgaccatttccaagagccatatagaccagcaccgaccactattctaaactatttatgtatgtaaatattagcttttaaaattctcaaaatagttgctgagttgggaaccactattatttctattttgtagatgagaaaatgaagataaacatcaaagcatagattaagtaattttccaaagggtcaaaattcaaaattgaaaccaaagtttcagtgttgcccattgtcctgtt

SEQ ID NO: 1107 - DNA, 6000 bp, Homo sapiens
atacagtgcaatttagatcttttcttgagatggtttcaattctggaatcttaaacatgaaagaaaaagtagccttagaatgattaacaaaatttagactagttagaatagaaagatctgaatagagcaatctctaaaaaattttgatctttttttctctttttcacaatcctgagaacaaaaaaaaattaaatttaaatgttaattagaagatatttaacttagatgtaaagtgagttaacctgattccaggattaatcaagtactagaattagtatcttatggcaaattatagaacctatccctttagaatattttcaaatctttttgaggatgtttaggaatagttttacaagaaattaagttaggagaggaaatctgttctggaggatttttagggttcccactagcatatgtaatggtttctgaactattcagaatcagagaaaactcatttttcctgctttcaagaagctactgtatgccaggcaccatgcacaaacaatgaccaacgtaaaatctctcattttggagagcctggaatctaactggaaaggtgaactaataataataatatgtacaatcatagccatcatttattaaacttttattatatgcaaggcactgtttaatttcattagcttacctggtttacagagcagctctatgagatgagtgccatctttgcccctattttagggataaggattctgaaatgtggagatggtaagtaaaattgcacaactgaagaatgagttacatgacttggctcaaatactggtcattgaactccagagcctgaatattcttaaccacttacatgatgcaagctcaccaaataaatagttcgaatgtattgtgacagagcggcattgatattcatctattcatgtggctttgagtaggaagaagaaaggatatcattctgaccagaggggtgaaaaacaacctgcatctgatcctgaggcataatactattaacacaattcttttatgtttcagttcgatgaatttaaacctcttgtggaagagcctcagaatttaatcaaacaaaattgtgagctttttgagcagcttggagagtacaaattccagaatgcgtaagtaatttttattgactgattttttttatcaatttgtaattatttaagacttaatatatgagccacctagcatagaacttttaagaatgaaaatacattgcatatttctaatcactctttgtcaagaaagataggagaggagagataaaatagttgatggggtggagaggtctatatttgaatgtagtctaaaaattgttctcttaagattggaagtatgtaggctgggagggtaaataccaaatcttggtatatcagaactgagcatgtcccttgaaggttaagaaatagttaatgggcaaatagagcatggcaatattttgtagagcagcaagtagtaggccttgaatagatgtcgctcaaaaagtaatatgtaagctgaacacaaaaatgtaacaaatgaatttagatacatatttgaatattaaattcaggttgtttgggagatgcacctagtctttgatggttaaacctttccctccatagaagagacagagacagaatggcttgctggactaatgtcccaattcaatagagtcttatctatgaaggttaaaaacaagaagagacatattatacagtagatatttattgtgtggctcatacacatggtgctcttctgattatggattttagagataataacagtgaacaagacatagtttctttcctcgagtagattaaagtcatacattgacttttaatggtgactggcattcttaatacatgattattatatattaggtaccatgtcagattaattataatactttactacttttaatttaacccttgaactatccctattgagtcagatatatttccttccattttctacttgtatctttcaagtttagcatatgctgatacatatgaagctctctccaggttttattgaaagaagaaattaataaatttattaatgtcactgaattaggcaactcactttcccaagattatgcaagtggtacaggtggaactcaaagccaagtttaactagttgttcaggagaatgttttctaccctccactaacccactactctgcagatggagataatatgatgaatggaacatagcaacatcttagttgattccggccaagtgttctctgttttatctactatgttagacagtttcttgccttgctgaaaacacatgacttctttttttcaggctattagttcgttacaccaagaaagtaccccaagtgtcaactccaactcttgtagaggtctcaagaaacctaggaaaagtgggcagcaaatgttgtaaacatcctgaagcaaaaagaatgccctgtgcagaagactatgtgagtctttaaaaaaatataataaattaataatgaaaaaattttacctttagatattgataatgctagctttcataagcagaaggaagtaatgtgtgtgtgtgcatgtttgtgtgcatgtgtgtgtgcatgcacgtgtgtgtatgtgtgatattggcagtcaaggccccgaggatgataattttttttttttttttgagacggagtctcgctttgttgtccaggctggagtgcagtggtgccatctcggctcactgcaacctccgcctcccaggttcaagccattctcctgcctcagcctcccaagtagctgggactacaggtgcatgccaccatgcctggctaattttttgtatttttagtagaaaattttcagcttcacctcttttgaatttctgctctcctgcctgttctttagctatccgtggtcctgaaccagttatgtgtgttgcatgagaaaacgccagtaagtgacagagtcaccaaatgctgcacagaatccttggtgaacaggcgaccatgcttttcagctctggaagtcgatgaaacatacgttcccaaagagtttaatgctgaaacattcaccttccatgcagatatatgcacactttctgagaaggagagacaaatcaagaaacaaacgtgaggagtatttcattactgcatgtgtttgtagtcttgatagcaagaactgtcaattcaagctagcaactttttcctgaagtagtgattatatttcttagaggaaagtattggagtgttgcccttattatgctgataagagtacccagaataaaatgaataactttttaaagacaaaatcctctgttataatattgctaaaattattcagagtaatattgtggattaaagccacaatagaataacatgttaggccatattcagtagaaaaagatgaacaattaactgataaatttgtgcacatggcaaattagttaatgggaaccataggagaatttatttctagatgtaaataattattttaagtttgccctatggtggccccacacatgagacaaacccccaagatgtgacttttgagaatgagacttggataaaaaacatgtagaaatgcaagccctgaagctcaactccctattgctatcacaggggttataattgcataaaatttagctatagaaagttgctgtcatctcttgtgggctgtaatcatcgtctaggcttaagagtaatattgcaaaacctgtcatgcccacacaaatctctccctggcattgttgtctttgcagatgtcagtgaaagagaaccagcagctcccatgagtttggatagccttattttctatagcctccccactattagctttgaagggagcaaagtttaagaaccaaatataaagtttctcatctttatagatgagaaaaattttaaataaagtccaagataattaaatttttaaggatcatttttagctctttaatagcaataaaactcaatatgacataatatggcacttccaaaatctgaataatatataattgcaatgacatacttcttttcagagatttactgaaaagaaatttgttgacactacataacgtgatgagtggtttatactgattgtttcagttggtcttcccaccaactccatgaaagtggattttattatcctcatcatgcagatgagaatattgagacttatagcggtatgcctgagccccaaagtactcagagttgcctggctccaagatttataatcttaaatgatgggactaccatccttactctctccatttttctatacgtgagtaatgttttttctgttttttttttttctttttccattcaaactcagtgcacttgttgagctcgtgaaacacaagcccaaggcaacaaaagagcaactgaaagctgttatggatgatttcgcagcttttgtagagaagtgctgcaaggctgacgataaggagacctgctttgccgaggaggtactacagttctcttcattttaatatgtccagtattcatttttgcatgtttggttaggctagggcttagggatttatatatcaaaggaggctttgtacatgtgggacagggatcttattttacaaacaattgtcttacaaaatgaataaaacagcactttgtttttatctcctgctctattgtgccatactgttaaatgtttataatgcctgttctgtttccaaatttgtgatgcttatgaatattaataggaatatttgtaaggcctgaaatattttgatcatgaaatcaaaacattaatttatttaaacatttacttgaaatgtggtggtttgtgatttagttgattttataggctagtgggagaatttacattcaaatgtctaaatcacttaaaattgccctttatggcctgacagtaacttttttttattcatttggggacaactatgtccgtgagcttccgtccagagattatagtagtaaattgtaattaaaggatatgatgcacgtgaaatcactttgcaatcatcaatagcttcataaatgttaattttgtatcctaatagtaatgctaatattttcctaacatctgtcatgtctttgtgttcagggtaaaaaacttgttgctgcaagtcaagctgccttaggcttataacatcacatttaaaagcatctcaggtaactatattttgaattttttaaaaaagtaactataatagttattattaaaatagcaaagattgaccatttccaagagccatatagaccagcaccgaccactattctaaactatttatgtatgtaaatattagcttttaaaattctcaaaatagttgctgagttgggaaccactattatttctattttgtagatgagaaaatgaagataaacatcaaagcatagattaagtaattttccaaagggtcaaaattcaaaattgaaaccaaagtttcagtgttgcccattgtcctgttctgacttatatgatgcggtacacagagccatccaagtaagtgatggctcagcagtggaatactctgggaattaggctgaaccacatgaaagagtgctttatagggcaaaaacagttgaatatcagtgatttcacatggttcaacctaatagttcaactcatcctttccattggagaatatgatggatctaccttctgtgaactttatagtgaagaatctgctattacatttccaatttgtcaacatgctgagctttaataggacttatcttcttatgacaacatttattggtgtgtccccttgcctagcccaacagaagaattcagcagccgtaagtctaggacaggcttaaattgttttcactggtgtaaattgcagaaagatgatctaagtaatttggcatttattttaataggtttgaaaaacacatgccattttacaaataagacttatatttgtccttttgtttttcagcctaccatgagaataagagaaagaaaatgaagatcaaaagcttattcatctgtttttctttttcgttggtgtaaagccaacaccctgtctaaaaaacataaatttctttaatcattttgcctcttttctctgtgcttcaattaataaaaaatggaaagaatct

SEQ ID NO: 1108 - DNA, 6000 bp, Homo sapiens
gaagaaaggatatcattctgaccagaggggtgaaaaacaacctgcatctgatcctgaggcataatactattaacacaattcttttatgtttcagttcgatgaatttaaacctcttgtggaagagcctcagaatttaatcaaacaaaattgtgagctttttgagcagcttggagagtacaaattccagaatgcgtaagtaatttttattgactgattttttttatcaatttgtaattatttaagacttaatatatgagccacctagcatagaacttttaagaatgaaaatacattgcatatttctaatcactctttgtcaagaaagataggagaggagagataaaatagttgatggggtggagaggtctatatttgaatgtagtctaaaaattgttctcttaagattggaagtatgtaggctgggagggtaaataccaaatcttggtatatcagaactgagcatgtcccttgaaggttaagaaatagttaatgggcaaatagagcatggcaatattttgtagagcagcaagtagtaggccttgaatagatgtcgctcaaaaagtaatatgtaagctgaacacaaaaatgtaacaaatgaatttagatacatatttgaatattaaattcaggttgtttgggagatgcacctagtctttgatggttaaacctttccctccatagaagagacagagacagaatggcttgctggactaatgtcccaattcaatagagtcttatctatgaaggttaaaaacaagaagagacatattatacagtagatatttattgtgtggctcatacacatggtgctcttctgattatggattttagagataataacagtgaacaagacatagtttctttcctcgagtagattaaagtcatacattgacttttaatggtgactggcattcttaatacatgattattatatattaggtaccatgtcagattaattataatactttactacttttaatttaacccttgaactatccctattgagtcagatatatttccttccattttctacttgtatctttcaagtttagcatatgctgatacatatgaagctctctccaggttttattgaaagaagaaattaataaatttattaatgtcactgaattaggcaactcactttcccaagattatgcaagtggtacaggtggaactcaaagccaagtttaactagttgttcaggagaatgttttctaccctccactaacccactactctgcagatggagataatatgatgaatggaacatagcaacatcttagttgattccggccaagtgttctctgttttatctactatgttagacagtttcttgccttgctgaaaacacatgacttctttttttcaggctattagttcgttacaccaagaaagtaccccaagtgtcaactccaactcttgtagaggtctcaagaaacctaggaaaagtgggcagcaaatgttgtaaacatcctgaagcaaaaagaatgccctgtgcagaagactatgtgagtctttaaaaaaatataataaattaataatgaaaaaattttacctttagatattgataatgctagctttcataagcagaaggaagtaatgtgtgtgtgtgcatgtttgtgtgcatgtgtgtgtgcatgcacgtgtgtgtatgtgtgatattggcagtcaaggccccgaggatgataattttttttttttttttgagacggagtctcgctttgttgtccaggctggagtgcagtggtgccatctcggctcactgcaacctccgcctcccaggttcaagccattctcctgcctcagcctcccaagtagctgggactacaggtgcatgccaccatgcctggctaattttttgtatttttagtagaaaattttcagcttcacctcttttgaatttctgctctcctgcctgttctttagctatccgtggtcctgaaccagttatgtgtgttgcatgagaaaacgccagtaagtgacagagtcaccaaatgctgcacagaatccttggtgaacaggcgaccatgcttttcagctctggaagtcgatgaaacatacgttcccaaagagtttaatgctgaaacattcaccttccatgcagatatatgcacactttctgagaaggagagacaaatcaagaaacaaacgtgaggagtatttcattactgcatgtgtttgtagtcttgatagcaagaactgtcaattcaagctagcaactttttcctgaagtagtgattatatttcttagaggaaagtattggagtgttgcccttattatgctgataagagtacccagaataaaatgaataactttttaaagacaaaatcctctgttataatattgctaaaattattcagagtaatattgtggattaaagccacaatagaataacatgttaggccatattcagtagaaaaagatgaacaattaactgataaatttgtgcacatggcaaattagttaatgggaaccataggagaatttatttctagatgtaaataattattttaagtttgccctatggtggccccacacatgagacaaacccccaagatgtgacttttgagaatgagacttggataaaaaacatgtagaaatgcaagccctgaagctcaactccctattgctatcacaggggttataattgcataaaatttagctatagaaagttgctgtcatctcttgtgggctgtaatcatcgtctaggcttaagagtaatattgcaaaacctgtcatgcccacacaaatctctccctggcattgttgtctttgcagatgtcagtgaaagagaaccagcagctcccatgagtttggatagccttattttctatagcctccccactattagctttgaagggagcaaagtttaagaaccaaatataaagtttctcatctttatagatgagaaaaattttaaataaagtccaagataattaaatttttaaggatcatttttagctctttaatagcaataaaactcaatatgacataatatggcacttccaaaatctgaataatatataattgcaatgacatacttcttttcagagatttactgaaaagaaatttgttgacactacataacgtgatgagtggtttatactgattgtttcagttggtcttcccaccaactccatgaaagtggattttattatcctcatcatgcagatgagaatattgagacttatagcggtatgcctgagccccaaagtactcagagttgcctggctccaagatttataatcttaaatgatgggactaccatccttactctctccatttttctatacgtgagtaatgttttttctgttttttttttttctttttccattcaaactcagtgcacttgttgagctcgtgaaacacaagcccaaggcaacaaaagagcaactgaaagctgttatggatgatttcgcagcttttgtagagaagtgctgcaaggctgacgataaggagacctgctttgccgaggaggtactacagttctcttcattttaatatgtccagtattcatttttgcatgtttggttaggctagggcttagggatttatatatcaaaggaggctttgtacatgtgggacagggatcttattttacaaacaattgtcttacaaaatgaataaaacagcactttgtttttatctcctgctctattgtgccatactgttaaatgtttataatgcctgttctgtttccaaatttgtgatgcttatgaatattaataggaatatttgtaaggcctgaaatattttgatcatgaaatcaaaacattaatttatttaaacatttacttgaaatgtggtggtttgtgatttagttgattttataggctagtgggagaatttacattcaaatgtctaaatcacttaaaattgccctttatggcctgacagtaacttttttttattcatttggggacaactatgtccgtgagcttccgtccagagattatagtagtaaattgtaattaaaggatatgatgcacgtgaaatcactttgcaatcatcaatagcttcataaatgttaattttgtatcctaatagtaatgctaatattttcctaacatctgtcatgtctttgtgttcagggtaaaaaacttgttgctgcaagtcaagctgccttaggcttataacatcacatttaaaagcatctcaggtaactatattttgaattttttaaaaaagtaactataatagttattattaaaatagcaaagattgaccatttccaagagccatatagaccagcaccgaccactattctaaactatttatgtatgtaaatattagcttttaaaattctcaaaatagttgctgagttgggaaccactattatttctattttgtagatgagaaaatgaagataaacatcaaagcatagattaagtaattttccaaagggtcaaaattcaaaattgaaaccaaagtttcagtgttgcccattgtcctgttctgacttatatgatgcggtacacagagccatccaagtaagtgatggctcagcagtggaatactctgggaattaggctgaaccacatgaaagagtgctttatagggcaaaaacagttgaatatcagtgatttcacatggttcaacctaatagttcaactcatcctttccattggagaatatgatggatctaccttctgtgaactttatagtgaagaatctgctattacatttccaatttgtcaacatgctgagctttaataggacttatcttcttatgacaacatttattggtgtgtccccttgcctagcccaacagaagaattcagcagccgtaagtctaggacaggcttaaattgttttcactggtgtaaattgcagaaagatgatctaagtaatttggcatttattttaataggtttgaaaaacacatgccattttacaaataagacttatatttgtccttttgtttttcagcctaccatgagaataagagaaagaaaatgaagatcaaaagcttattcatctgtttttctttttcgttggtgtaaagccaacaccctgtctaaaaaacataaatttctttaatcattttgcctcttttctctgtgcttcaattaataaaaaatggaaagaatctaatagagtggtacagcactgttatttttcaaagatgtgttgctatcctgaaaattctgtaggttctgtggaagttccagtgttctctcttattccacttcggtagaggatttctagtttcttgtgggctaattaaataaatcattaatactcttctaagttatggattataaacattcaaaataatattttgacattatgataattctgaataaaagaacaaaaaccatggtataggtaaggaatataaaacatggcttttaccttagaaaaaacaattctaaaattcatatggaatcaaaaaagagcctgcagaaccaaagtaagactaagcaaaaagaacaaattacctgatttcaaactacactataaggccatagtcaccgaaacagcaaggtactggtataaaaataggcacacagaccaatggaatagaacagaatagagaacccagaaataaatccacatacttacagctaactgattttagacaaagaaaacaaaaacataaggtggggaaaggacaactttttcaacaaatggtgctaggataattggcaagcacatgtaggagactgaagctagatcctcatctctcaccttatacaaacatcaactcaagatggattaggaacttaaatctaaggcctaaaactataaaaattctagaagataacattgggaaaaacccttctacatataggcttaggcaaggatttcatgaccaagaacccaaaacaaatacaatgaaaacaaagataaattgctgggacttcattaaactaaagagcttttgcatggcatggcaaaagaaacagtcagctgagtaaacagacaacccacagagtgagaaaaaaatcttcacaatctatacttctgacaaaggactaatatccagactctacaat

SEQ ID NO: 1109 - DNA, 6000 bp, Homo sapiens
tctggcttccagtgactcttgtgtttcactgataataagcacaaatgcaaatctctgtcatgttaaatttactactcagactttcttaacataaagagaacaacacatctttcgaccacgttttctcctaaattcttaggacatgatcacagcatttctacaatgtgacctattttaatgttacttacacccctgccttccacacacaaccaccaacagtaagaataggtgaggggcctaaggtgaaacaaaaagagtgttcacattcctccaagaaatgtttggcaggactttaaaaccaacccagggaagcataatgtaaccatgtcgatggaggcaagagaggacatccactggaagggtccactggtattgcagacccatggtcttcaaagcccttggaagagataggcatggtcaccctcaaagactgcctgacaattgatgtggaatctatagagaaatggagtgaccaccctgggtacctgtggcagagaatgcactgggtaaaggatacctgtcaccactgctgctacctttatgtattgtaggcaaagcctacttaggtggaaagagctgctgggtggcccacacatacagctcaagcccaaaggcaagtcaaaggccagtgccctaaacttattttgtgttcagtgtgaatgagccacccaaagtcacctgtcatgacttcacagaagatggtaatgcaaaaatggagctgacctacatgactttggagaataatgttttgactggaaatcgtatggctaaagacaaaaggaactgtatgtaaacactgcactctagttagtaaatttgattttcatggagaaatgggtttataactctgaaactcctttacatgcatcctgaggtggaacaaatgggtagatggaggctagatagtggaagagaagtttcttgctgtcatagaggcaaggaggaaggctagaataagtcctgtggttctggattagagtcagagacatcagtatgaactcatcattaaccagaaagatagctacatacgtacagaaataattacagttatgtttgtgtgtgtgtattcaaatgaagatatgaatattagtattcatacctacctttcttagctccattccctgaaatggtctagaagcagtgatatcccattagcaatgagaatacccagcactcagatctttgtaaaaccattctctaataaagagaaccaggccttccttaagaaatggccatttctagggctgggaaagggaaatataagatgagcctgaggcagcttgcaatgccagaaagaaaacaaagtatagagacctgtcaaaggcataggggagccaaccaaaaagaggccccaaagctgagatactttgagcaactaaataatgtggcattgaattataacccaaagtatataatatatatgagtttatactgacataaatgaacaattaaataacaagtctttcttatgaaaatataaataagacatgtagctactcccattttcagaagcttatccctctccctctctttcagtgtgggctggatttcatgatttgcttccaaaaatagagtatggaaagggaaaagtgataacttcacggtagagaaacctggcaaacaccaccttaaccaagtgatcaatcctaatatccccatgataaatcatgttgatatcataccatgtgccctccaatattatatgaaaacaacattttacacacacacacacacacacgtgcacgcacatcgatgtgcctgcaccattggtacattcgggtgtaccaatcttccacactgtgcaggaaaaaaacaaacaaacaaaaaagccagctagccagagtgatgagcttgccagaccactctctgaaactagagcagtgagtctggctctataggcttaactgttgagttcctctgggattctggtcgactccatgggaagtggggaagctggagctcaggttaccatatatgggggaatctttttccaaaagttttaagttcgtctttggtgcctgagactggtcagggtggcattgctattgatacagggtgcccagacccggtcctgtgtaggtccagttcagtgacagcgctttattgaacattttctaggtccgtctctggggcctttgaccagccagggcccaccatctccatttctctttttctgagcactctctgacttttgtgatgattgcaacaaatgtgaaaaaaaatatgttcgatacattcaacacggaccaaagtgggggctgcttagggacaggggagtggaatggtggggagcgcagaacattccagcaatagaaagaaactttttgtaactttgtactagaacctttcgtaagcaccacacttaaaatgaaactattaagcagtgttgttaagaacaagttgtggaatagcatgtacagtatgaaaccaatttgataaaaattttaaaaacacaaactaataaggataaaataagtatgtgaattaatagacaaagatctaagaggcctgtaaattcataaacaaaggtctgatagacttgtacatttatagacaaaggtatgatatgacttacctctgggaacaggaaaaagaggcccagaataatattttagtgttttacaagaaacattcaccctccaactcctccagctcatcagttcagtagaccttcatcacttcttactgtatgtttctccaggtgttctaattcctcttccaataaggcttctccaaacttcttacactctttgagtgctgttattctaaactgtcttaaatttcttctaagatcacttttttcccccaattctgtcaaccacacttatcatcatctctatctcctttgttcctcaaaatttcttatagtgtctgaatagtaaagaaaagccatgttttacattttggcatataataagtatttaataaatttaacacctacaggacaaatggccctgaaaatgctattgagtgatggtataacattgcatcatatgggtgttttgtaatattactagctattttattttttaaaattttttaatttccataggttattggggaagaggtcgtgtttagttacatgagtaaattctttagtggtgatctgtgagattttggtgcacccatcacccataacccatcacccgagcagtatacactgtaccatgtttgtagtcttttatgagtccccaaagtccattgtgtcattcttatgcctttgcatcctcatagcttagctcccacttataagtgagaacatataacgtttgcttttccattcctgagttacttcacttagaataatagtctccagtctcatccaggtcgctgcaaatgtcattaattcattcctttttatggctgagtagtattccattgatatatacatatatccatacacacaatgaaatactacatatatatatgtatatctatatatatgtgtatatatatcatcatgtatatcaatatatatgatgtatatcaatcaacgagtggataaagaaacagtgatatatactgtttctttatctactcgttgattgatgggcatttgggttggtcccacatttttgcaatcgcaaattgtgctgctataaacatgcgtgtgcaagtatcttttttgtataatgactttttttcctctggatagatacccagtagtgggattattgaatcaaatggtagttttatttcagttctttgaggaatcttcacactgttttccatagtaattgtaccagtttacattcccaccatcagtgtagaagtgtttcctgttcattgcatccatgccaacatctactatttttttatttttttaattatggccattcttgcagaggtaaggtggtatcacagtgtggttttgatttgcatttccatgattattagtgatgatgagcattttttcatgtttgttttcaatttgtatattttcttttgagaattgtctattcatgtccttagcccactttttgatgggattttttttttcttgttgatttgagttcattgtagagtctggatattagtcctttgtcagaagtatagattgtgaagatttttttctcactctgtgggttgtctgtttactcagctgactgtttcttttgccatgccatgcaaaagctctttagtttaatgaagtcccagcaatttatctttgttttcattgtatttgttttgggttcttggtcatgaaatccttgcctaagcctatatgtagaagggtttttcccaatgttatcttctagaatttttatagttttaggccttagatttaagttcctaatccatcttgagttgatgtttgtataaggtgagagatgaggatctagcttcagtctcctacatgtgcttgccaattatcctagcaccatttgttgaaaaagttgtcctttccccaccttatgtttttgttttctttgtctaaaatcagttagctgtaagtatgtggatttatttctgggttctctattctgttctattccattggtctgtgtgcctatttttataccagtaccttgctgtttcggtgactatggccttatagtgtagtttgaaatcaggtaatttgttctttttgcttagtcttactttggttctgcaggctcttttttgattccatatgaattttagaattgttttttctaaggtaaaagccatgttttatattccttacctataccatggtttttgttcttttattcagaattatcataatgtcaaaatattattttgaatgtttataatccataacttagaagagtattaatgatttatttaattagcccacaagaaactagaaatcctctaccgaagtggaataagagagaacactggaacttccacagaacctacagaattttcaggatagcaacacatctttgaaaaataacagtgctgtaccactctattagattctttccattttttattaattgaagcacagagaaaagaggcaaaatgattaaagaaatttatgttttttagacagggtgttggctttacaccaacgaaaaagaaaaacagatgaataagcttttgatcttcattttctttctcttattctcatggtaggctgaaaaacaaaaggacaaatataagtcttatttgtaaaatggcatgtgtttttcaaacctattaaaataaatgccaaattacttagatcatctttctgcaatttacaccagtgaaaacaatttaagcctgtcctagacttacggctgctgaattcttctgttgggctaggcaaggggacacaccaataaatgttgtcataagaagataagtcctattaaagctcagcatgttgacaaattggaaatgtaatagcagattcttcactataaagttcacagaaggtagatccatcatattctccaatggaaaggatgagttgaactattaggttgaaccatgtgaaatcactgatattcaactgtttttgccctataaagcactctttcatgtggttcagcctaattcccagagtattccactgctgagccatcacttacttggatggctctgtgtaccgcatcatataagtcagaacaggacaatgggcaacactgaaactttggtttcaattttgaattttgaccctttggaaaattacttaatctatgctttgatgtttatcttcattttctcatctacaaaatagaaataatagtggttcccaactcagcaactattttgagaattttaaaagctaatatttacatacataaatagtttagaatagtggtcggtgctggtctatatggctcttggaaatggtcaatctttgctattttaataataactattatagttacttttttaaaaaattcaaaatatagttacctgagatgcttttaaatgtgatgttataagcctaaggcagcttgacttgcagcaacaagttttttaccctgaacacaaagacatgacagatgttaggaaaatattagcattactattaggatacaaaattaacatttatgaagc

SEQ ID NO: 1110 - DNA, 6000 bp, Homo sapiens
acagaagaatgccagaccccagaggacctcatgttatgtaagaaatagcaatcacctgggcagtcctttttaggcacaggaagcatgcctgaagttctcaggtgtaattcactcaagcggaacactatctatattggaatctgaagacgtttaattcaggaggccgggagcggtggttgatgcctgtaatcccagcactttgggaggctgaggtgggccaatcactcaaggccaggagtttgagaccaccctggccaacatgataaaatttcatctctactaaaaaaaaaaaaaaaaaaaaattagctgggcatggtggtgcatgcctgtaatcccagctacttggaaggctgaggcacaagaatcgcttgaacccaggaggcagaggttgcagtgagccgagatcgtgccactgcacttcagcctgggtgacagagtgagacactgtctcaaaaataaataaatatgtttaatctggggctttatgaaggcaacagaaaataatcagcaagaataactcaatttatgtaagaactatatacatgtcataattgagctaaatttcttcactgaataaatatttttggcacataatctgcagagggattagcatatcatggaacttacactctatgaggaattcaaacattaaagaagaaatcaaattttaatatagaatattttaaattacaggtttaagaaacataaatgttatgctatgggataggggcattaatgtaaactatgccttgacaagaattgtcgaaacaaaaaaccttagccaagtgtaaccagaaaaatatctgactgagctgcttttgttgtctagttttactcccctttcttttgattttgttttctcttttgcactgaaattgtcaccttttcatatcaaccttatgatagattctctaccaaaaattactcaaacatcagattttaagcaagaattctcataaaccaatttcggagaatgattttctcccctcaaatatatctgcaaaatgactgtcactgaccgcttattgccacaaaatgtctttttctgaacaaacaaggtcctcctgcagctgctagactttctatttgtgcttttccaccttgttctatctccctctttggatcctctctgattacagcctcctctattgttccccaggttgttataggtctcgagtttatgctgctgtggttgatgttgagtgggaagggggactttctgtttggatccaatcccagaatacccatcccttcaactccaatgtggacacagggtctctaccatataccttctctacccagggtgctgccaagtttactgtttagccacacccccttaatctcattggttactcaagtttcaaatttcctagttgattttcatgaacaaatgggctccatgagggtaagaatggtgtcatttaagaaaaaaaagttagtaatttaagtctaccttaaaaaagtctatcatttaaagagcattagaatgtcctcagagttactaatactactttaatgaagaaataaatgctagattcttgagtacaggcagatattagatatcaatatatgagatatactctgaattcaagcatagtgcctatgcattgtattcataagcaaaaactataaggtcagaattcgtgtcatagatgcagggctgagtgggcaatcaccaacaatttattgagcacttactccataacagttctatgtgtctaaaggaaaacttttttttatttgttttaaattgaaactaatgtttaccaatggtacgaccactttgtcaggagctgacttttgttgtctaagctattgagcaatggaataaaagagtttatggtgtttttgtttttttttttttgtatttctgaaatgctctaatttcatgtctgaacttgaaaatagcaccctcttatcatccacctttgcttgctaccctgtgataaataatgccccttttcccagtctatatatgatgaatggtgctaggcttccgattagctttaattccaaacttctttatgacagattagtggtgttaccaaaatatcagagtcatgtctgaaccttgactcaagggaaaaaaataattacctgtggagctgaaaacactgaaatagttggttacactttactaagtaaaatataattagaaatgttcaaataaactggaagtgagtttaataaagttgtccaccaaagtagtgacattgaacacttactttttattatatgggaattttcatgtaattcaggaaaaagaccttaaggctctttatttgtttccatgtgtcctcttagtgtgtataatttaagatcacaaattactctttgcattctagtttgacaactaaactttttttactttccactcacaagatttatagggaatttgtgcattttgaccttttgattctaacaaccaatcattagccaatcaagaatggaaactttggaaatattacagatagagccactgtgatttaaatcatttaacatgttaattctgacagaaaatcctactcagaaaaaacaaccagcagcagcatgtttgagtgcaaacagcaagaaacatcccaaaacatgacctccccgatagtcagaatgacgcagcatccatttcctactttacagaattgcctcccattataaatcactttatcttctcaactccaaagcatcccagacacattctttacccgtgaattcacaagccttttctctgagagaggccttgggactaggaactttttgaatgagtgtagaagtcgggaaggagacaatagtgtcaacttgggattgcctaaggcaacaacagagcaaaacaagaacgctttggttctctgggtctctgtccctgattgcatagcgggtcattgttgggaaatatttcctcacctggcattccaagaaatggagagctccacagctgtatatagtcctgtcattaaatacaggagtgttctatcccgctggaattaagaaaattggtagaaccagattgtggtctgaaatcttttttcagaaatgctgccatcgtgtggcactgcggagctatgaccagaagagtcctgtaaagggtcgtatggttcatctcaagatggctgggctccagcataatctattcctataattaattctagcttcatattgaatcattcccgtgggcacagagtaaactacagtaaatcctgtggaaattttgttgtttttagaattttcagacttccctccactaaattgacaacatgacacgcttatgcgggtatgtttaaaggaaaaaaatagtttttagaagcagaaaaaagaagtctattttgcaactttataatctgtgtgctttctattttatagagatagtcgtcatcttacttattaaaatgggtgcttattacctacaaaccaatcatatcaattcatctggaatacatccaatttaagggagacatatttccccctaccaaatgttcatgaaacctatgaattagctatacactatcactgcaagacattatttaatctatatttatattaaaagtaatatttggcaaaaggaagctgacactttaggactaataaaaaccacaattacttttgcagcaacctaataataaataggaccatttatttttcatctcaattacacacaagtcttaacaataaaggtgtaaggtaaataaatagtgcaatctgcatttcacaactgagaaagcaaatgaagataagtaatctcaaggcaatattaaatattttaaaaggacccagagctctgctatccctgaattctgctctaatattcggactttccctgtaattttctttcattcagacaccttttaaatacctagtaaagtgttttttaatacagaaatttttaaaaatgtttttctttttaagtggcctactttacataccttgggagaaaaactagaaaaaaagatgattccaaaatcgaatctgttcctttagaaatgtgcaaaatttccttattgatgcatacaatttaaagatcttacgtctactctcattttaataacctgttcttttaaaggacattacaattcgtgactgcctgcccctcttaaaaatttcataatagttaacacacatatagtccttaagatacgcagagcatttgcatctaatatgtgctaagcattgctagtttaacatactaattcatttaaacccctcaaaaaccccatgacctaggtaatagtattgcatttcatggatgagggaacaaggataggtaggctgggcgatttgcccaaggttgcacaggtcagcagtgacacagcggaattcagaaccacggtctggctcctgaagcagccctctcaagcagtcatcctgctctcagtcagaaactgctttacttctgcaacatctagaataaattaccattcttctatttcatatagaattttatattttaatgtcactagtgccatttgtctaagtaacaagctactgcatactcgaaatcacaaagctaagcttgagtagtaaaggacagaggcaagttttctgaactccttgcaggcttgaacaatagccttctggctcttcaataagtacaatcatacaggcaagagtggttgcagatattacctttatgttacttaaaccgaaagaaacaaaaatccattctatttaattttacattaatgtttttccctactttctccctttttcatgggatccctaagtgctcttcctggatgctgaatgcccatcccgtaaatgaaaaagctagttaatgatattgtacataagtaatgttttaactgtagattgtgtgtgtgcgtttttgtttttttttgttttaaccacaaaaccagagggggaagtgtgggagcaggtgggctgggcagtggcagaaaacctcatgacacaatctctccgcctccctgtgttggtggaggatgtctgcagcagcatttaaattctgggagggcttggttgtcagcagcagcaggaggaggcagagcacagcatcgtcgggaccagactcgtctcaggccagttgcagccttctcagccaaacgccgaccaaggtacagcttcagtttgctactgggttgtgcattcagctgaatttcatggggaagtccaaattctaaggaaaaatatttttaattgtaatgctgttaaacagacttaaattttctagcctttttaataagcagattagatacattgcaggtctcctggaacaaaggtgtctagatattttgaatgccaatcaaatttaaaacttaaaaatacttccactgggtcctcaaaagaacggaaaccaccgatgctaatcagaaaatagtaaaattaaattcccctttggaataattatacctatataattttcagtgggtgactgtgcaggaatttaaaagaaaagggatcttttatgctaattaaaccaattacaatgctattttttaaatgatgtatctcacttttaaggggaagaaaaccctttctgaatatgccactgctaaatttagctgttaaaatattcaccaagatacctgtatgacactgtgtaggcttattattacaaatagaaaagctgttggctattttcaatgttttcctttgaatttcaaatttttagaacatcttacttaaataacaaatttcagagatagtttgatttcacctaagtagcacctacttgataattaagctaaaagtcacatttaaagtacatgttggaaaaatggataaagcaaatttttttcatttttttctgtgagttttttcttctctaaaaaatattcccatactagcttattaatataattaagttactgttgatctgtttgtaggtttagagagctagatatataaggtagtaatggtataatttctggaactctaaattttaaagttgaataaatacagacttgcaaaatttccctttcccttgcctaatagtgaaagatggataataggtggcaatataaatattaacttgaaagactataatactaa

SEQ ID NO: 1111 - DNA, 6000 bp, Homo sapiens
ctaaaaagaaaaggcatctctaagaagtagaaaagattctatagaaaatatattttatttgtgatcattttgtaatgtggtagtataaaaaggtatcactgttgtaacctatgaagatgtcagctattccttatgaaatattttgcaggaaaactcactaccatgagaattgcagtgatttgcttttgcctcctaggcatcacctgtgccataccagtgagtacagttgcatcttaaagaaaattcctgaaaataactgaattgtgtgcttccatgtgctaggaggacattcttgtaatctttcttcatcttttctgtttctaaggttaaacaggctgattctggaagttctgaggaaaagcaggtaagcatcttttatgtttttatatagttaaatcatttactcaattatggcgagaggtgcaagaaacgtatttgctgcgatattacttatcttctcagtcaaatccattggtttacaagtattgattgactgcctgctatgaatctaggccagtaccaagcacagtatagtttttaataaatataagtttataaaaccaacccagatattttaaatataataatatctaggcatgtatgatgagttatcgcatgtaagataagttatatgaagttgtgtgactttttttccattagtccacatactgatctaaaagcagaaaattccagcttttgctttgtttagtggattgctaagtttaaaattcacattggatattagtcagaactgtttgtatgaccataatattcacaatattgtctgagatattagctgagaagcccattgtgaaaagaaagtctatgtgtgctgtttgtatctattgtgattgtcagctgatgttagatcacattttctaaccaaacataagaccaaccaaactctttattataattatttgaccagcactaaagatgtacctacccctccacaacagatgaaactgtgccagccaaacaacaaatgggcattgtccccagaagcttggacaaaaaggcacacagagttcaattccagttgaacagaataaaggccaaaatagagctgccttgggggtcactgcaattagactgcttaatgaagacattaaaagaagtattctgtgttcgtttgtgtgtggaggggtgtgtgtgtctgtttttcaactgatttgaaaatacaggtgttgaatcctaataataaaccagaaaaattaacatctccagagaagatagaggtcatactatttgaggcaagaattagcgtctttttaataaacgaaaatatggcaaagatgcattttagaaggcacgtggagctataacaatttaagaaatacgtgaagagctcaaggctcagccttctagaatcccagaaacttaaagctagtaaaaaattggggaagtctctaaggatatatgcctgaaaatacacactggttatctgtgagtgttaggattactgggtggtttttagtctattcattttgcttacctttattttcttcatattagtttttaaaaattataaatgtaacttatacatccattctctctgagcctgtattacatgtgtcatgagaatagatagatagatatgaaaaagtgaagagaaaaactctgaactcatctggtctcactgtttttccgccttctttttttttttttttttttttttttgagacggagtctcgctccgtcgcccaggctggagtgcagtggtgtgatctcggctcactgcaagctccgcctcccaggttcaccccattctcctgagtagctgggactacaggcgcccgccaccacgcccggataattttttgtatttttagtagagacggggtttcaccgtgttagccaggatggtctccatctcctgacctcgtgatccaccctccttggcctcccaaagtgctgggattacaggcgtgagccactgcgcccggctgttttttcatcttcttaaagcaaggaaccccttctttcagcaaaacctttcggagaagcccaatactaagctcctctggttagagccagccatgagagaaactccaagtacttctgactggttctctctctactcatccaccccttaggtggctgcagaaggaactctgtgcaacccccagagttctcattctcagtgacagggaaatgtaatgattggccctggatgattcagcagatcagatgatacttactcagagcaatttccactcctttgcagtagcatattatcagtattttccagataaataacttggctaaagaaaaatccatttcatttacatctttggcaccttacagcaatagaacttttgtgcaatgattttaatattatatttctacattggctgataagatacatatggctattgagcactcaaaatgtgggctagtgcaactgaggaactgaatttttatcttctttttttttttttttttttttgagatggagtcttgctctgtcacccaggctggagtgcagtggcgcaatcttggctcactgcaagctctgcctcctgggttcacgccattctcttgcctcagcctccccagtagctgggggtacaggtgcctgccaccacgcccggctatttttttttatttttattttttttagtagaaacggggtttcactgtgttagccaggatgttctcgatctcctgacctcgtgatccgcctgcctcggcctcccaaagtgctgggattacaggggtgagccaccgtgcctagccatttcattttaattaacttaaatttaaatagctccatgtggttagaggatactgaattagcacagtcttagagagttccttcttgttccatggactggacacaatgaagattaacagtaattaaggtcacttctggtttagatgtgctttatctgagaggaaaattcagccagcaaacatacaaaaagaaagcacagtgtgaagttcggtgttaagagctagtttgcctgcgtttgaaccctgcctggctctgccatttcctaccacttaactgcactgtggctgagttttctgatctgtaaggtgggaataataatgatacctatctcataggggaatgaaaggatcaaatgagttcatatttgtaaagcaatttgaaagagtgcctagcccacagtaagtgctacataagagtttgttaaatgaatctgcaaaaaaaaaaaaattacaaaaaggtacctaagggtccgggtgactatatgcttccatcaagactagtgaagaatggttgttttttccattcatccctacatttctttttttaataatgataaacatgcaacttttttgtagctttacaacaaatacccagatgctgtggccacatggctaaaccctgacccatctcagaagcagaatctcctagccccacaggtatttttaaacttctcataattaaactacagtgatgaaagatagccacactcaggccatttgggctgctcagatgaatcctgcctgcctgctggcaaacatgtgcttaggacattgactgatctgccatgttggcttctctctgtgttaagccatccacagatgaggctgaaaaataaaaactgctttggattaaaaaggttaacttttgaataaaaaagctaggcatgtgtgatgcgcactaacacgtgccattccttcttcagaatgctgtgtcctctgaagaaaccaatgactttaaacaagaggtaagttctcattttcaatcagaggcccatcatgccttgaagagatgaaagaaggcattgcctggattctcttctgatgaaatttcattagcaagttttccagctaattggcagtctaaaacttgctcataaataaaacatgtatttactaaatatcagaaatactaggtttcctcggataagtttagcattacagaagatgtttattaatgcctgttatttgaaacattaatctgcttgcaatttatttaaggtattttgtagatatctaatatctaataagcatctaattaatgcatatcaaagctaagattttgcctttaggaaagttttctttcctaataaaatagtttatttgacaactattctttttattaggatcattcatatatttgctaagcaaagagtaaatttattttccttaagattcaatttgaatatactaagaatattaaagcaagttagataaattacccaatatatttgtcaatttgaaatttgatagacattagttgtttaattcaatgggcagttttgagctgcagtttatacacacatgcataacagagtcacctttcaattatccatgttaataggaaagtggttatagattttagtacacacattaaaatatggatactcttctcttttgataaatctcatttcaaataaaaaaaccagtctcataattatgtatctgtatctattacatcattgaatttagtaaataatgtttaatatgtataaggaaaaacaatgttattgacatgaagattatactcacatatttggcttgaaaatatctataaaaataatttctgttgcaaagtaagaaatgttcttcagaatgttattaatccctgtgttaaaagagaaattggaagatgctcactttagctcctaaaagccatggtatgtactgtgaatgcaaagattctgaaactaaataaaaagaaagatagtaaaagactaatgtgctataaaggctaagggaaaataaaaacccatatattaattttcccggccatcttaattttcagacccttccaagtaagtccaacgaaagccatgaccacatggatgatatggatgatgaagatgatgatgaccatgtggacagccaggactccattgactcgaacgactctgatgatgtagatgacactgatgattctcaccagtctgatgagtctcaccattctgatgaatctgatgaactggtcactgattttcccacggacctgccagcaaccgaagttttcactccagttgtccccacagtagacacatatgatggccgaggtgatagtgtggtttatggactgaggtcaaaatctaagaagtttcgcagacctgacatccaggtaaatcctttaacagacacacctgatggttctgactagcgctcaagtctaggaaaccacagtttgcatattcattcattcattcatccattcattcatccattcagcaagaattcattcatattctactttatgaccattgaatacaaatctttttctgcttggcggtttttgtaagtctacataatttctctctagatttgattctcaaacacaattctactttttgaaatcctggatcacttattttcagattaaaataaatggaaaacaccaattatttaaaaaaaataatggtcatgttttgaagttaaatacctaagaggaattgtagttgcaaattacactgaatccttagtcacagaatctggatttgacatagccttgccgtttactattctctttactttttaactaacaattcacttcctctttatgtaggtttcaatataatgaaacctacctcataggtttcattacatatgtaagtgatgtagttattaaactaaatgagatgacatatgtgaaaggccttggtaaagtactatacaaagtaacatgctagtattatttcagccagatttagacaatttttagtataagatgacctaaaagctagagagtggaaaaggattaccatattcccatccctagccgttcatataattattcttcatttgtgccgtgattcagtaccctgatgctacagacgaggacatcacctcacacatggaaagcgaggagttgaatggtgcatacaaggccatccccgttgcccaggacctgaacgcgccttctgattgggacagccgtgggaaggacagttatgaaacgagtcagctggatgaccagagtgctgaaacccacagccacaagcagtccagattatataagcggaaagccaatgatgagagcaatgagcattccgatgtgat

SEQ ID NO: 1112 - DNA, 6000 bp, Homo sapiens
atgcattttagaaggcacgtggagctataacaatttaagaaatacgtgaagagctcaaggctcagccttctagaatcccagaaacttaaagctagtaaaaaattggggaagtctctaaggatatatgcctgaaaatacacactggttatctgtgagtgttaggattactgggtggtttttagtctattcattttgcttacctttattttcttcatattagtttttaaaaattataaatgtaacttatacatccattctctctgagcctgtattacatgtgtcatgagaatagatagatagatatgaaaaagtgaagagaaaaactctgaactcatctggtctcactgtttttccgccttctttttttttttttttttttttttttgagacggagtctcgctccgtcgcccaggctggagtgcagtggtgtgatctcggctcactgcaagctccgcctcccaggttcaccccattctcctgagtagctgggactacaggcgcccgccaccacgcccggataattttttgtatttttagtagagacggggtttcaccgtgttagccaggatggtctccatctcctgacctcgtgatccaccctccttggcctcccaaagtgctgggattacaggcgtgagccactgcgcccggctgttttttcatcttcttaaagcaaggaaccccttctttcagcaaaacctttcggagaagcccaatactaagctcctctggttagagccagccatgagagaaactccaagtacttctgactggttctctctctactcatccaccccttaggtggctgcagaaggaactctgtgcaacccccagagttctcattctcagtgacagggaaatgtaatgattggccctggatgattcagcagatcagatgatacttactcagagcaatttccactcctttgcagtagcatattatcagtattttccagataaataacttggctaaagaaaaatccatttcatttacatctttggcaccttacagcaatagaacttttgtgcaatgattttaatattatatttctacattggctgataagatacatatggctattgagcactcaaaatgtgggctagtgcaactgaggaactgaatttttatcttctttttttttttttttttttttgagatggagtcttgctctgtcacccaggctggagtgcagtggcgcaatcttggctcactgcaagctctgcctcctgggttcacgccattctcttgcctcagcctccccagtagctgggggtacaggtgcctgccaccacgcccggctatttttttttatttttattttttttagtagaaacggggtttcactgtgttagccaggatgttctcgatctcctgacctcgtgatccgcctgcctcggcctcccaaagtgctgggattacaggggtgagccaccgtgcctagccatttcattttaattaacttaaatttaaatagctccatgtggttagaggatactgaattagcacagtcttagagagttccttcttgttccatggactggacacaatgaagattaacagtaattaaggtcacttctggtttagatgtgctttatctgagaggaaaattcagccagcaaacatacaaaaagaaagcacagtgtgaagttcggtgttaagagctagtttgcctgcgtttgaaccctgcctggctctgccatttcctaccacttaactgcactgtggctgagttttctgatctgtaaggtgggaataataatgatacctatctcataggggaatgaaaggatcaaatgagttcatatttgtaaagcaatttgaaagagtgcctagcccacagtaagtgctacataagagtttgttaaatgaatctgcaaaaaaaaaaaaattacaaaaaggtacctaagggtccgggtgactatatgcttccatcaagactagtgaagaatggttgttttttccattcatccctacatttctttttttaataatgataaacatgcaacttttttgtagctttacaacaaatacccagatgctgtggccacatggctaaaccctgacccatctcagaagcagaatctcctagccccacaggtatttttaaacttctcataattaaactacagtgatgaaagatagccacactcaggccatttgggctgctcagatgaatcctgcctgcctgctggcaaacatgtgcttaggacattgactgatctgccatgttggcttctctctgtgttaagccatccacagatgaggctgaaaaataaaaactgctttggattaaaaaggttaacttttgaataaaaaagctaggcatgtgtgatgcgcactaacacgtgccattccttcttcagaatgctgtgtcctctgaagaaaccaatgactttaaacaagaggtaagttctcattttcaatcagaggcccatcatgccttgaagagatgaaagaaggcattgcctggattctcttctgatgaaatttcattagcaagttttccagctaattggcagtctaaaacttgctcataaataaaacatgtatttactaaatatcagaaatactaggtttcctcggataagtttagcattacagaagatgtttattaatgcctgttatttgaaacattaatctgcttgcaatttatttaaggtattttgtagatatctaatatctaataagcatctaattaatgcatatcaaagctaagattttgcctttaggaaagttttctttcctaataaaatagtttatttgacaactattctttttattaggatcattcatatatttgctaagcaaagagtaaatttattttccttaagattcaatttgaatatactaagaatattaaagcaagttagataaattacccaatatatttgtcaatttgaaatttgatagacattagttgtttaattcaatgggcagttttgagctgcagtttatacacacatgcataacagagtcacctttcaattatccatgttaataggaaagtggttatagattttagtacacacattaaaatatggatactcttctcttttgataaatctcatttcaaataaaaaaaccagtctcataattatgtatctgtatctattacatcattgaatttagtaaataatgtttaatatgtataaggaaaaacaatgttattgacatgaagattatactcacatatttggcttgaaaatatctataaaaataatttctgttgcaaagtaagaaatgttcttcagaatgttattaatccctgtgttaaaagagaaattggaagatgctcactttagctcctaaaagccatggtatgtactgtgaatgcaaagattctgaaactaaataaaaagaaagatagtaaaagactaatgtgctataaaggctaagggaaaataaaaacccatatattaattttcccggccatcttaattttcagacccttccaagtaagtccaacgaaagccatgaccacatggatgatatggatgatgaagatgatgatgaccatgtggacagccaggactccattgactcgaacgactctgatgatgtagatgacactgatgattctcaccagtctgatgagtctcaccattctgatgaatctgatgaactggtcactgattttcccacggacctgccagcaaccgaagttttcactccagttgtccccacagtagacacatatgatggccgaggtgatagtgtggtttatggactgaggtcaaaatctaagaagtttcgcagacctgacatccaggtaaatcctttaacagacacacctgatggttctgactagcgctcaagtctaggaaaccacagtttgcatattcattcattcattcatccattcattcatccattcagcaagaattcattcatattctactttatgaccattgaatacaaatctttttctgcttggcggtttttgtaagtctacataatttctctctagatttgattctcaaacacaattctactttttgaaatcctggatcacttattttcagattaaaataaatggaaaacaccaattatttaaaaaaaataatggtcatgttttgaagttaaatacctaagaggaattgtagttgcaaattacactgaatccttagtcacagaatctggatttgacatagccttgccgtttactattctctttactttttaactaacaattcacttcctctttatgtaggtttcaatataatgaaacctacctcataggtttcattacatatgtaagtgatgtagttattaaactaaatgagatgacatatgtgaaaggccttggtaaagtactatacaaagtaacatgctagtattatttcagccagatttagacaatttttagtataagatgacctaaaagctagagagtggaaaaggattaccatattcccatccctagccgttcatataattattcttcatttgtgccgtgattcagtaccctgatgctacagacgaggacatcacctcacacatggaaagcgaggagttgaatggtgcatacaaggccatccccgttgcccaggacctgaacgcgccttctgattgggacagccgtgggaaggacagttatgaaacgagtcagctggatgaccagagtgctgaaacccacagccacaagcagtccagattatataagcggaaagccaatgatgagagcaatgagcattccgatgtgattgatagtcaggaactttccaaagtcagccgtgaattccacagccatgaatttcacagccatgaagatatgctggttgtagaccccaaaagtaaggaagaagataaacacctgaaatttcgtatttctcatgaattagatagtgcatcttctgaggtcaattaaaaggagaaaaaatacaatttctcactttgcatttagtcaaaagaaaaaatgctttatagcaaaatgaaagagaacatgaaatgcttctttctcagtttattggttgaatgtgtatctatttgagtctggaaataactaatgtgtttgataattagtttagtttgtggcttcatggaaactccctgtaaactaaaagcttcagggttatgtctatgttcattctatagaagaaatgcaaactatcactgtattttaatatttgttattctctcatgaatagaaatttatgtagaagcaaacaaaatacttttacccacttaaaaagagaatataacattttatgtcactataatcttttgttttttaagttagtgtatattttgttgtgattatctttttgtggtgtgaataaatcttttatcttgaatgtaataagaatttggtggtgtcaattgcttatttgttttcccacggttgtccagcaattaataaaacataaccttttttactgcctatataatgtttttaaaggtttattttggtttcaattgatacataataagtgtacatatttatggggtacggtgtgatgttttgttacatatatacattgtataattatcaaagggtaattatcatatccatcacctgaaacacttgtcatttatttgtgctgagaacattcaatcctcttttctagctattttgaagtatacaatacattattattgactatagccaagctactttgcaatagaatactagaatttattcctcctagctaactgtaactttgtacccattgactaacctcccctcatccaccttcccactctcccagccgctggtaatcactattctactctctacttctatgaggtcaacttttctagattccacatatgagtgagatcatgcagtactcttccttctgtgcttggcttatttaacttaacatcctctaggttcgcctatgttgtcaaaaataccaagagaaaacatgcacaaactatacatctaagaaggaattaaaatccagaatacataaggaactcaaacaacttaatatcaaaaaaaaaagaaaaaaaaagacaactcaaataatccaatttaaaatgggcacaaatctgaa

SEQ ID NO: 1113 - DNA, 6000 bp, Homo sapiens
agcatatatttcatagaatgttaatctatagcaaaattaatgaattaaatccagataaaagaatcctattatggtctggtaaaatatttatatttcacttagcaaagagaaaacaaaacatgaatattgtagttatgaacagaatatgcatgttagtaatgcttccaaatatgttattacttcataacttcatatttcttatgaggtacaagccattcaattagtttaacgttatattcagagaggctaaagatttactgaagaccatgctgtccatcaataatgaaaagaaaaattaaaaaaactttattttaacttctagttcccttctttgtacttgagcagctttccctccttaagaatacagacctagaacatatgcaatatcactatcaatattatgtgtaattaaaagttcattggatgtttactgtgttcaaggcattttaaggagtgacaagagttaaacatatagttgtaattcaaaatgacaacgaaattagtttacagttttctttttttgtaggtagtaagaaatcatctccccctattgaggaataccaatatagaaaaggcaaaactttaaatatgaatgaactgtttcataataacataagttcttcttgatttccattgtcacatccaaatttgaaggctatttctaacacagctgggttctacctttttccttctcactctttaccacacccaatctgtgaggcttcagacacaaactgctaattcaggagacaattgtgccttctgtaacagtttctgctaaattgtctcagctctgccacttaaaatagctaggtgatctcagcatatcaccaaaactcttggagctcagtttctctgtctataaaagttacataaaatgtaattgatctgcttgttatgactaaataacatagtacattagtcctttgccaaaggactaacaaattaccaaataaaagtttggaatcatgttaaacgtttataagaagtgcaactgtccagaaataattctctcacattggtctgttgtaatgagacctaaaatatctcattttatttacctctttgacttaaagcactaggtctcaaggaggtcatggttatactataaatatgtcatgtgaaataatatattaaataattgttgtaatactctattgagatactagttgtaaagaggcacaatggaaaacttatactattaacagtagtaaaaagaaacaacaaaaagcaataaaaaacaaaacacccattcatgcaacgacatgaacgaacctcacaaatattatactgagtaaaagaagtcagacaaatataaaacaaagtttatactacgtgattagatctttatgacattctagaatatgcacatgaaggtacaaggtaactgtctggaatgatgaaaatgtcctgtgtcttcaaaatagtgtgggttacactaatgcatggctttttcaaaactgatttaaagggacacaacatctgagcatttccctaggtgtaaattacactgcaattttaaagaatcatctaatgatattgtggttatttttaaacagtccttaaattttgtggatgcatactgaatgtttacagctgaaaagatatatataaagcttgaatttggtaaaaaaaaaaaaaaaagagggaggattggtagtgataaagtgagtggacttatggatgagacatgatcagccatgcattgaaaaaatgtaaaagttggatgatcttcacatgagagtcctttattctgtctacttttgcatatgtttgaatatttcccataacaaaaagttgaaaatagagtgatcacatgagttaatctcctaatttacaaaaaagaaaactggaaacagaaggagaacaaaacttgttcaaggtctcaaagccagacagcaaactagctcccaagtccaaccttcttgctctggtcctaagcaaacaaaaaatattaatatgagctactgcattaaggaaagtctgcttttccaaagggcagaccaatagttcaaggaagagtttaaataataaatatttgtgatcttactttcatgcttttctattttccactgaacacatatgcattatcttctatatgtcttttatgtataatcatttgcttcctgttccttgtggttttaaagttgttttgtatgtttaaatttgattttactcaaatttcagaacccaaattagcgcaagaatcagacaaagcataactttctataaatataaaaacaattaaaaaaaaaacatacagcaaaaacgagttgttgtttcccccctcctcttccagtgcttaactaatcttccgaatccaggcacagaaagcaaaggctttctgctagtgggaggagcttgcttctccattctggtgtgatccaggaacagctgtcttccagctctgaaagaggtgaaaatgtgttaagcgatgcaaaaattgtcttgaagttcgcgtgtgtatgtctgtgtgcatgtgcgtgtggtgggtggggggagagaaaagggggtgtcaattctgagggcaacgagaatcagaagtcagaaaggtgagtggtgtgtagcatctccctttcagaaggggctgaagaagaaattggatatgatggtccggtaggctaaatcacgctggatttgtctcccagataaagggaggtctgcaaagtaagtcccatttctagagcgaaaagccttaggaccgcttgttttagacggctggggaatatttattccttgttccactgatgggaaaatcagcgtctggcaggcgctgattggtggaaaggaaaatggtgatagtggcgtggaaagaggatttgctgagccttctcctgcctcctcaacctgtgactcttccttagtagtctccctttcaccctcaggaccctttccggctcttcctagattaagagcaaacgaaaaccttgaagatatttgaactaaagcgacccctaacgttgtaacctgtgaccgtgattaaatttcagcgatgcgagggcaaagcgctctcggcggtgcggtgtgagccacctcccggcgctgcctgtctcctccagcagctccccaagggataggctctgcccttggtggtcgaccctcaggccctcggctctcccagggcgactctgacgaggggtagggggtggtccccgggaggacccagaggaaaggcggggacaagaagggaggggaaggggaaagaggaagaggcatcatccctagcccaaccgctcccgatctccacaagagtgctcgtgaccctaaacttaacgtgaggcgcaaaagcgcccccactttcccgccttgcgcggccaggcaggcggctggagttgatggctcaccccgcgccccctgccccatccccatccgagatagggacgaggagcacgctgcagggaaagcagcgagcgccgggagaggggcgggcagaagcgctgacaaatcagcggtgggggcggagagccgaggagaaggagaaggaggaggactaggaggaggaggacggcgacgaccagaaggggcccaagagagggggcgagcgaccgagcgccgcgacgcggaagtgaggtgcgtgcgggctgcagcgcagaccccggcccggcccctccgagagcgtcctgggcgctccctcacgccttgccttcaagccttctgcctttccaccctcgtgagcggagaactgggagtggccattcgacgacaggttagcgggtttgcctcccactcccccagcctcgcgtcgccggctcacagcggcctcctctggggacagtcccccccgggtgccgcctccgcccttcctgtgcgctccttttccttcttctttcctattaaatattatttgggaattgtttaaattttttttttaaaaaaagagagaggcggggaggagtcggagttgtggagaagcagagggactcaggtaagtacctgtggatctaaacgggcgtctttggaaatcctggagaacgccggatgggagacgaatggtcgtgggcaccgggagggggtggtgctgccatgaggacccgctgggccaggtctctgggaggtgagtacttgtccctttggggagcctaaggaaagagacttgacctggctttcgtcctgcttctgatattcccttctccacaagggctgagagattaggctgcttctccgggatccgcttttccccgggaaacgcgaggatgctccatggagcgtgagcatccaacttttctctcacataaaatctgtctgcccgctctcttggtttttctctgtaaagtaagcaagctgcgtttggcaaataatgaaatggaagtgcaaggaggccaagtcaacaggtggtaacgggttaacaagtgctggcgcggggtccgctagggtggaggctgagaacgccccctcgggtggctggcgcggggttggagacggcccgcgagtgtgagcggcgcctgctcagggtagatagctgagggcgggggtggatgttggatggattagaaccatcacacttgggcctgctgtttgcctgagtttgaaccacaccccgagtgagcagttagttctgttgcctacgcctttccaccatcaacctgttagccttcttctgggattcatgttaaggatacccctgaccctaagcctccagcttccatgcttctaactcatactgttaccctttagaccccgggaatttaaaaaaggggttaatcttttcatgcaactccacttctgaaatgcagtaataacaactcagaggattcatcctaatccgtggttaggtggctagacttttactagccaagatggatgggagatgctaaatttttaatgccagagctaaaaatgtctgctttgtccaatggttaaatgagtgtacacttaaaagagtctcacactttggagggtttctcatgatttttcagtgttttttgtttatttttccccgaaagttctcattcaaagtgtattttatgttttccagtgtggtgtaaaggaattcattagccatggatgtattcatgaaaggactttcaaaggccaaggagggagttgtggctgctgctgagaaaaccaaacagggtgtggcagaagcagcaggaaagacaaaagagggtgttctctatgtaggtaggtaaaccccaaatgtcagtttggtgcttgttcatgagtgatgggttaggataatcaatactctaaatgctggtagttctctctcttgattcatttttgcatcattgcttgtcaaaaaggtggactgagtcagaggtatgtgtaggtaggtgaatgtgaacgtgtgtatttgagctaatagtaaaaaatgcgactgtttgcttttccagatttttaattttgccctaatatttatgactttttaaaaatgaatgtttctgtacctacataattctatttcagagaacagttttaaaaactcatagtcttttaaaaaataatcaagaatattcttaagaatcaaaatcattgatggatctgtgatttcttttaccatcatgaaaaatgtttgtcaattttaatccattctgatttttaaaatatgactttgatatgcccctgtgatgtgtataaagagacctatttgtggccctaaaatggaaagaacagattagtctttgatagagttacttcatgtgatcatttggtctctgtgaacactgaggacagagaaaagtgcttgagggctgctactaatctctcagaaacatttgtatagttcatccatcaaatgacacacatactaaaagaataaagaaattgatgcttattacctacttgttcctaaagttccaccttggggtatacacccaaactctgactctcttttctgtaacttgaactgtattcaattgagtgttattttacaaaccactttgaattccttggaaaagaatagacacacactctcatccacaggcatagacacacacactcaacacagacacattgcccattcttcctctcttctttctcctctgagctttttcacattct

SEQ ID NO: 1114 - DNA, 6000 bp, Homo sapiens
aagtagcagatgtgtaagatgaaaaagtgtacagatctaatgtatgaggactgtaggtgataaaattgtactatatttgagattcatgataaataagtggattttagctgcccttgccacaaaaacaacaaaaaaggtaactatgagagattatgaatatattaatttgcttcaatatagtaattttttagtgtctaatgtatctgatagcatcatgttgcataccctaaatatacacaattaaatttatttttaaaaaagaatgccactaggccgggtgcaatggctcacgcctgtaatcccagcattttgggaggccgaggtcggggatgatgagatcaggagttcgagaccatcctggctaacatggtgaaaccccatctctactaaaaatacaaaaattagccgggcatggtggtgcatgcctgtaatttcagctactcaggaggctgagtcaggagaataacttgaacccaggaggcggaggttgcagtgagccgagatcacaccactgcacttcagcctggagtgaaatgacagattgagaccctatctcagaaaaaaagaaaaaaaaaagaatgccactaaaccacaccattagaacttataattaattattttttataaatatcttatgcaacatattttatatttttgtagtgcaaccccaaagagataggtatataacttaaaaaaacgagataaatgagagtcctcataaggttaccatgtatcaaaccaatcagttgttctttgaggtcataattatttactaataatctgtaattgatggttagcctttaatttatgagtaatctgtaattgataacgtacacctacaaaataggtgccaagtggttatgtgactagcaaggtataaatgctgtagggacaccagagctgatggcttccctgagcggaggtgtcccacacacaccctatcttgtcttcccaacctcaaaagagcacagagtggagaagaaggtcagaagtaatacctgagagttttgagaactcagttatccctgttgtgcatgttatgttgactttgtcagcttagtgaggtgaagcacattttgacttgagaatttgctatcaatttcactgatggccactgctgcttattgagcagagtggcattggaagacactcaaagatcatcattttcttgtatttattgcatttatattactgagcattatataaagataattaaatctttctgcttttggatttagatctaattaatttctgagtcatttgaagaaatttttgtctattaaattgaagtatgttgattgaaaattggtgtacgcagataacaaaaatggagggaacaaaacccataaaaataacactgatcattaaggtagttcttcaatgagttaaaaagtagttgttaaaagtatattcttataaaggaatgagattacttttcttatgaggcttctaccaaacatcttcagccataagtgaaattataaaatggtctttggtcgcctccaatctttcaaactagttatgtaatgaaggataaaagaataaatggaaaacgtgttggcaaagtaattattccgttggagagtttatttgataataataaccatggttcctatatataaaagtgtgctcaattattcatatgtcctgtcttattatgacattcccacaaaaactgcaaggtagttgcagttttctaaatcatattttttactaatcagggaagtgatgctcagagatgttaagtacgcttccccaagaccctaaaggtgataagtgatgtagtctcaactaaaactttggtttgtgtgattagtgcatgttctttccactctatcagtagtcagcaagctacaacatacaagacaattccagcccaccacctgttttgataaatgaagttttattgggacacagccacactagttattgtttatgactaccttcacacttcaacagcagaattgagacatagatttttttttcttttttttagacagggtatcactctgccacccaggctggagtgcagtggctcgatctcagctcactgcaacctctgcagtgagctgtatggctcaagccatcctcctacctcagcctcctgggtagctggcaatacacatgcatgctaccatacccggctaatttttgcgttgtttgtagacacagggtttcaccatgtggcccaggctggtctcaaacccctgggctcaagtgatccaccagcctcgggctctcaaagtgctgggattaaagacctgagccacggcacctggccaagacatagatctcatggcttaaaatacgtgctatctgattccttacccaaaattttgccaatccctggactatactattgtgtcttcacatggtcattttttatcttaaattctgtgtgtaagttcaactctcaattagaactcagaatgtaaccaataaaaaatttatagaatgtgctatgtgttaaatgccatgagagacattgaaaatgatttcaatgaacagttaaaaggtaactaagtcaaagaaacttgtgcttgcagaacttggaaatctgaggacaaacggaaagatattgataaactgcatgtcactgattcagtattccaaattccatctaaaaaggtataattcacacttcataaaatatttaaaattaactcatcaattttttcctcttgtaacaccctatttcaatgactttctgaaaatatgttttaaggtagaaaaaaagtaatttaattgaagatttgtgggaagattaagtcaacataagaaaagtctaaataatgaggcagtggcacatgcctataatcctggctactcaggaggctgaggtgggggcatgacttgagcccaggaattcaaggatgcagtgagctatgatagcatcactgcagtccagcctgggcgacagagcaaggccctgactctaaaaactgaaaataaaaaactgaaaaaaaaatgtgttgtgaactttgatgagatgcattcatataaatcatcccaagtataaaatttcccccactgatctatgttgaagagatagtgtagctttctttcactttgcagacatagacggagcacatgtttcagctaggcaactcaatgtggtcatcctccacctgactgttcatcctgtgactcttactgctatagttgccaccagagaatgtgaaaaagctcagaggagaaagaagagaggaagaatgggcaatgtgtctgtgttgagtgtgtgtgtctatgcctgtggatgagagtgtgtgtctattcttttccaaggaattcaaagtggtttgtaaaataacactcaattgaatacagttcaagttacagaaaagagagtcagagtttgggtgtataccccaaggtggaactttaggaacaagtaggtaataagcatcaatttctttattcttttagtatgtgtgtcatttgatggatgaactatacaaatgtttctgagagattagtagcagccctcaagcacttttctctgtcctcagtgttcacagagaccaaatgatcacatgaagtaactctatcaaagactaatctgttctttccattttagggccacaaataggtctctttatacacatcacaggggcatatcaaagtcatattttaaaaatcagaatggattaaaattgacaaacatttttcatgatggtaaaagaaatcacagatccatcaatgattttgattcttaagaatattcttgattattttttaaaagactatgagtttttaaaactgttctctgaaatagaattatgtaggtacagaaacattcatttttaaaaagtcataaatattagggcaaaattaaaaatctggaaaagcaaacagtcgcattttttactattagctcaaatacacacgttcacattcacctacctacacatacctctgactcagtccacctttttgacaagcaatgatgcaaaaatgaatcaagagagagaactaccagcatttagagtattgattatcctaacccatcactcatgaacaagcaccaaactgacatttggggtttacctacctacatagagaacaccctcttttgtctttcctgctgcttctgccacaccctgtttggttttctcagcagcagccacaactccctccttggcctttgaaagtcctttcatgaatacatccatggctaatgaattcctttacaccacactggaaaacataaaatacactttgaatgagaactttcggggaaaaataaacaaaaaacactgaaaaatcatgagaaaccctccaaagtgtgagactcttttaagtgtacactcatttaaccattggacaaagcagacatttttagctctggcattaaaaatttagcatctcccatccatcttggctagtaaaagtctagccacctaaccacggattaggatgaatcctctgagttgttattactgcatttcagaagtggagttgcatgaaaagattaaccccttttttaaattcccggggtctaaagggtaacagtatgagttagaagcatggaagctggaggcttagggtcaggggtatccttaacatgaatcccagaagaaggctaacaggttgatggtggaaaggcgtaggcaacagaactaactgctcactcggggtgtggttcaaactcaggcaaacagcaggcccaagtgtgatggttctaatccatccaacatccacccccgccctcagctatctaccctgagcaggcgccgctcacactcgcgggccgtctccaaccccgcgccagccacccgagggggcgttctcagcctccaccctagcggaccccgcgccagcacttgttaacccgttaccacctgttgacttggcctccttgcacttccatttcattatttgccaaacgcagcttgcttactttacagagaaaaaccaagagagcgggcagacagattttatgtgagagaaaagttggatgctcacgctccatggagcatcctcgcgtttcccggggaaaagcggatcccggagaagcagcctaatctctcagcccttgtggagaagggaatatcagaagcaggacgaaagccaggtcaagtctctttccttaggctccccaaagggacaagtactcacctcccagagacctggcccagcgggtcctcatggcagcaccaccccctcccggtgcccacgaccattcgtctcccatccggcgttctccaggatttccaaagacgcccgtttagatccacaggtacttacctgagtccctctgcttctccacaactccgactcctccccgcctctctctttttttaaaaaaaaaatttaaacaattcccaaataatatttaataggaaagaagaaggaaaaggagcgcacaggaagggcggaggcggcacccgggggggactgtccccagaggaggccgctgtgagccggcgacgcgaggctgggggagtgggaggcaaacccgctaacctgtcgtcgaatggccactcccagttctccgctcacgagggtggaaaggcagaaggcttgaaggcaaggcgtgagggagcgcccaggacgctctcggaggggccgggccggggtctgcgctgcagcccgcacgcacctcacttccgcgtcgcggcgctcggtcgctcgccccctctcttgggccccttctggtcgtcgccgtcctcctcctcctagtcctcctccttctccttctcctcggctctccgcccccaccgctgatttgtcagcgcttctgcccgcccctctcccggcgctcgctgctttccctgcagcgtgctcctcgtccctatctcggatggggatggggcagggggcgcggggtgagccatcaactccagccgcctgcctggccgcgcaaggcgggaaagtgggggcgcttttgcgcctcacgttaagtttagggtcacgagcactcttgtggagatcgggagcggttgggctagggatgatgcctcttcctctttccccttcccctcccttcttgtccccgcc

SEQ ID NO: 1115 - DNA, 6000 bp, Homo sapiens
agatttttaattaatgatccctatcaatgctccttgagctttcccactctatctctccacaacttccatccctggttggaaattttttgcttacccatactaagtgagagttattgatgggaaggcatcagatatctcacgtgtgttgctggtgggatgggagactgtggaggatgggaacaggtggaaatctactgcaatggaaaaaaaaaaaaagcatgtcctaggacacccaaaacatggaggctagataataacaatagctacttgtactgagagcttccactctgcctggctctttgctatgagccacattattcattccttacaacaatcaaacaagacaagtaaaatatcatgcccattttttaatgagaaaactagagattagagaggttatagatacttgctctgagtcactagtaatgagtagtagagctttaataagtccctgaatttaggttgtatctagtacatttactcttagaagtctatcatgctcaccagagttgcagagttgcgtgtatttcttgggctcattaatgtgtttttttctttctaaaactaaagtcatttgaacttgttagattttgaaatatttaaatatcttttctatctggctttaacatctttaatcttggaatcttgcatgccttcatattcttaggaccacgaaaccacaggaatatttaaaatgatatctagtggaaacaatatgaagttggccatggggtcaaattagagaatctgaatactatgcttctccttgattgctcttcccatttcttcagagtaaccctattcccccatctcatgctcaccccctttccaaaatcatacataatgatctcccaacagtatgcattaggctttctctactctacccactatgaaattacacaagaagcctatcgcaatctcactacctcgtctctctcacaggtttacagaaggtgagaggaaggtgcagatagagaataagaagcaggtggctccagcatcaacattacatcaccccttgtgttcacaacaaatacggaatattatccaaagataataaacgttgtattttcttaacttaaacacattaaatcagtcctctctttaatcaattgttaatgggcagcatctttattttcatgccattctactctgctgtctttgctatagcacaagtttaccacataccatacctaaaaattcagttgttctatgggggtaaacaaagtctaggttaagcatatatttcatagaatgttaatctatagcaaaattaatgaattaaatccagataaaagaatcctattatggtctggtaaaatatttatatttcacttagcaaagagaaaacaaaacatgaatattgtagttatgaacagaatatgcatgttagtaatgcttccaaatatgttattacttcataacttcatatttcttatgaggtacaagccattcaattagtttaacgttatattcagagaggctaaagatttactgaagaccatgctgtccatcaataatgaaaagaaaaattaaaaaaactttattttaacttctagttcccttctttgtacttgagcagctttccctccttaagaatacagacctagaacatatgcaatatcactatcaatattatgtgtaattaaaagttcattggatgtttactgtgttcaaggcattttaaggagtgacaagagttaaacatatagttgtaattcaaaatgacaacgaaattagtttacagttttctttttttgtaggtagtaagaaatcatctccccctattgaggaataccaatatagaaaaggcaaaactttaaatatgaatgaactgtttcataataacataagttcttcttgatttccattgtcacatccaaatttgaaggctatttctaacacagctgggttctacctttttccttctcactctttaccacacccaatctgtgaggcttcagacacaaactgctaattcaggagacaattgtgccttctgtaacagtttctgctaaattgtctcagctctgccacttaaaatagctaggtgatctcagcatatcaccaaaactcttggagctcagtttctctgtctataaaagttacataaaatgtaattgatctgcttgttatgactaaataacatagtacattagtcctttgccaaaggactaacaaattaccaaataaaagtttggaatcatgttaaacgtttataagaagtgcaactgtccagaaataattctctcacattggtctgttgtaatgagacctaaaatatctcattttatttacctctttgacttaaagcactaggtctcaaggaggtcatggttatactataaatatgtcatgtgaaataatatattaaataattgttgtaatactctattgagatactagttgtaaagaggcacaatggaaaacttatactattaacagtagtaaaaagaaacaacaaaaagcaataaaaaacaaaacacccattcatgcaacgacatgaacgaacctcacaaatattatactgagtaaaagaagtcagacaaatataaaacaaagtttatactacgtgattagatctttatgacattctagaatatgcacatgaaggtacaaggtaactgtctggaatgatgaaaatgtcctgtgtcttcaaaatagtgtgggttacactaatgcatggctttttcaaaactgatttaaagggacacaacatctgagcatttccctaggtgtaaattacactgcaattttaaagaatcatctaatgatattgtggttatttttaaacagtccttaaattttgtggatgcatactgaatgtttacagctgaaaagatatatataaagcttgaatttggtaaaaaaaaaaaaaaaagagggaggattggtagtgataaagtgagtggacttatggatgagacatgatcagccatgcattgaaaaaatgtaaaagttggatgatcttcacatgagagtcctttattctgtctacttttgcatatgtttgaatatttcccataacaaaaagttgaaaatagagtgatcacatgagttaatctcctaatttacaaaaaagaaaactggaaacagaaggagaacaaaacttgttcaaggtctcaaagccagacagcaaactagctcccaagtccaaccttcttgctctggtcctaagcaaacaaaaaatattaatatgagctactgcattaaggaaagtctgcttttccaaagggcagaccaatagttcaaggaagagtttaaataataaatatttgtgatcttactttcatgcttttctattttccactgaacacatatgcattatcttctatatgtcttttatgtataatcatttgcttcctgttccttgtggttttaaagttgttttgtatgtttaaatttgattttactcaaatttcagaacccaaattagcgcaagaatcagacaaagcataactttctataaatataaaaacaattaaaaaaaaaacatacagcaaaaacgagttgttgtttcccccctcctcttccagtgcttaactaatcttccgaatccaggcacagaaagcaaaggctttctgctagtgggaggagcttgcttctccattctggtgtgatccaggaacagctgtcttccagctctgaaagaggtgaaaatgtgttaagcgatgcaaaaattgtcttgaagttcgcgtgtgtatgtctgtgtgcatgtgcgtgtggtgggtggggggagagaaaagggggtgtcaattctgagggcaacgagaatcagaagtcagaaaggtgagtggtgtgtagcatctccctttcagaaggggctgaagaagaaattggatatgatggtccggtaggctaaatcacgctggatttgtctcccagataaagggaggtctgcaaagtaagtcccatttctagagcgaaaagccttaggaccgcttgttttagacggctggggaatatttattccttgttccactgatgggaaaatcagcgtctggcaggcgctgattggtggaaaggaaaatggtgatagtggcgtggaaagaggatttgctgagccttctcctgcctcctcaacctgtgactcttccttagtagtctccctttcaccctcaggaccctttccggctcttcctagattaagagcaaacgaaaaccttgaagatatttgaactaaagcgacccctaacgttgtaacctgtgaccgtgattaaatttcagcgatgcgagggcaaagcgctctcggcggtgcggtgtgagccacctcccggcgctgcctgtctcctccagcagctccccaagggataggctctgcccttggtggtcgaccctcaggccctcggctctcccagggcgactctgacgaggggtagggggtggtccccgggaggacccagaggaaaggcggggacaagaagggaggggaaggggaaagaggaagaggcatcatccctagcccaaccgctcccgatctccacaagagtgctcgtgaccctaaacttaacgtgaggcgcaaaagcgcccccactttcccgccttgcgcggccaggcaggcggctggagttgatggctcaccccgcgccccctgccccatccccatccgagatagggacgaggagcacgctgcagggaaagcagcgagcgccgggagaggggcgggcagaagcgctgacaaatcagcggtgggggcggagagccgaggagaaggagaaggaggaggactaggaggaggaggacggcgacgaccagaaggggcccaagagagggggcgagcgaccgagcgccgcgacgcggaagtgaggtgcgtgcgggctgcagcgcagaccccggcccggcccctccgagagcgtcctgggcgctccctcacgccttgccttcaagccttctgcctttccaccctcgtgagcggagaactgggagtggccattcgacgacaggttagcgggtttgcctcccactcccccagcctcgcgtcgccggctcacagcggcctcctctggggacagtcccccccgggtgccgcctccgcccttcctgtgcgctccttttccttcttctttcctattaaatattatttgggaattgtttaaattttttttttaaaaaaagagagaggcggggaggagtcggagttgtggagaagcagagggactcaggtaagtacctgtggatctaaacgggcgtctttggaaatcctggagaacgccggatgggagacgaatggtcgtgggcaccgggagggggtggtgctgccatgaggacccgctgggccaggtctctgggaggtgagtacttgtccctttggggagcctaaggaaagagacttgacctggctttcgtcctgcttctgatattcccttctccacaagggctgagagattaggctgcttctccgggatccgcttttccccgggaaacgcgaggatgctccatggagcgtgagcatccaacttttctctcacataaaatctgtctgcccgctctcttggtttttctctgtaaagtaagcaagctgcgtttggcaaataatgaaatggaagtgcaaggaggccaagtcaacaggtggtaacgggttaacaagtgctggcgcggggtccgctagggtggaggctgagaacgccccctcgggtggctggcgcggggttggagacggcccgcgagtgtgagcggcgcctgctcagggtagatagctgagggcgggggtggatgttggatggattagaaccatcacacttgggcctgctgtttgcctgagtttgaaccacaccccgagtgagcagttagttctgttgcctacgcctttccaccatcaacctgttagccttcttctgggattcatgttaaggatacccctgaccctaagcctccagcttccatgcttctaactcatactgttaccctttagaccccgggaatttaaaaaaggggttaatcttttcatgcaactccacttctgaaatgcagtaataacaactcagaggattcatcctaatc

SEQ ID NO: 1116 - DNA, 6000 bp, Homo sapiens
gcacatacaactttaacttcaatattttaatgacgaaatttaaggataatttaaatagaaatggactcagaaaagaatcagtaagacttagtgaaggatcattgtctattatagagaagttgatttaagattaacttattagtaatatttaacatatataaagaattattagactgggtatatagacaagcgttttattcttggaagacaaaaagaagaaaaattgaattcaaccgatgtatacgaaaataaaaagtaacagtaaattaaaaatagataattaaataaatatatgatacagtataacgttttatagccaagatgatgttacaaatccatatttattgacatggatatgtttttatactaaagtgtttatcaaatagccattaagagataacttctttgaataatttgctttctaaatttcttaactacataaatttccagctttatatggaacaccaagttttcaaaccattagtgatgtgctttttatatggtgttaaaaagtttctttctttcttttttctttttcccccaagatggagtcttgctctgtcgcccaggctggagcgcagtagtgcgatctcggctcagtgcaacaaccacctcctgggtacaagcaattctcctgcctcagccccccaagtagctgggattacaggcacctgccaccacgtccagctgatttttgtatttttagtagagacggggttttaccatcttggccaggctggtctctaactcctgacctcaggtaatctgcccacctcagcctcccaaagtgctgagattacaggcgtgagccaccatgcccgacctaaaaagtttcttaaacgtcactttatactctcaaattatctagaaaggaaaacgtattagattcctggatattttggatattgtaaggaacatacttatttgctgtatatactctgtttgtaacagtattgtaacttcagttcaaaacaatacacaaaacattacaagttcccgtgatattttaaaaattcatttattttcttcctttctgaatacaaatgctgttcagtctgttgattcttcactaatctgaaatattagggactgatttctgaattggatattcattctgaagcctttcagagccactggcacaaagggtctgtcaaacttggaacaccatttgttgtatcattttatttttttctcttggcaaatccacataattcatacaggactatgccagtgtcttttgaaagaaacaaggtttaagaaagtaaaaatgttaataaagatagtgaatgttaattctgtcattgttactgtatttcttcaagctgtggctgcaaactgctttgagtgatgttattgtaactcgcacattagggagagaaagagatgtttggtagatttttaattaatgatccctatcaatgctccttgagctttcccactctatctctccacaacttccatccctggttggaaattttttgcttacccatactaagtgagagttattgatgggaaggcatcagatatctcacgtgtgttgctggtgggatgggagactgtggaggatgggaacaggtggaaatctactgcaatggaaaaaaaaaaaaagcatgtcctaggacacccaaaacatggaggctagataataacaatagctacttgtactgagagcttccactctgcctggctctttgctatgagccacattattcattccttacaacaatcaaacaagacaagtaaaatatcatgcccattttttaatgagaaaactagagattagagaggttatagatacttgctctgagtcactagtaatgagtagtagagctttaataagtccctgaatttaggttgtatctagtacatttactcttagaagtctatcatgctcaccagagttgcagagttgcgtgtatttcttgggctcattaatgtgtttttttctttctaaaactaaagtcatttgaacttgttagattttgaaatatttaaatatcttttctatctggctttaacatctttaatcttggaatcttgcatgccttcatattcttaggaccacgaaaccacaggaatatttaaaatgatatctagtggaaacaatatgaagttggccatggggtcaaattagagaatctgaatactatgcttctccttgattgctcttcccatttcttcagagtaaccctattcccccatctcatgctcaccccctttccaaaatcatacataatgatctcccaacagtatgcattaggctttctctactctacccactatgaaattacacaagaagcctatcgcaatctcactacctcgtctctctcacaggtttacagaaggtgagaggaaggtgcagatagagaataagaagcaggtggctccagcatcaacattacatcaccccttgtgttcacaacaaatacggaatattatccaaagataataaacgttgtattttcttaacttaaacacattaaatcagtcctctctttaatcaattgttaatgggcagcatctttattttcatgccattctactctgctgtctttgctatagcacaagtttaccacataccatacctaaaaattcagttgttctatgggggtaaacaaagtctaggttaagcatatatttcatagaatgttaatctatagcaaaattaatgaattaaatccagataaaagaatcctattatggtctggtaaaatatttatatttcacttagcaaagagaaaacaaaacatgaatattgtagttatgaacagaatatgcatgttagtaatgcttccaaatatgttattacttcataacttcatatttcttatgaggtacaagccattcaattagtttaacgttatattcagagaggctaaagatttactgaagaccatgctgtccatcaataatgaaaagaaaaattaaaaaaactttattttaacttctagttcccttctttgtacttgagcagctttccctccttaagaatacagacctagaacatatgcaatatcactatcaatattatgtgtaattaaaagttcattggatgtttactgtgttcaaggcattttaaggagtgacaagagttaaacatatagttgtaattcaaaatgacaacgaaattagtttacagttttctttttttgtaggtagtaagaaatcatctccccctattgaggaataccaatatagaaaaggcaaaactttaaatatgaatgaactgtttcataataacataagttcttcttgatttccattgtcacatccaaatttgaaggctatttctaacacagctgggttctacctttttccttctcactctttaccacacccaatctgtgaggcttcagacacaaactgctaattcaggagacaattgtgccttctgtaacagtttctgctaaattgtctcagctctgccacttaaaatagctaggtgatctcagcatatcaccaaaactcttggagctcagtttctctgtctataaaagttacataaaatgtaattgatctgcttgttatgactaaataacatagtacattagtcctttgccaaaggactaacaaattaccaaataaaagtttggaatcatgttaaacgtttataagaagtgcaactgtccagaaataattctctcacattggtctgttgtaatgagacctaaaatatctcattttatttacctctttgacttaaagcactaggtctcaaggaggtcatggttatactataaatatgtcatgtgaaataatatattaaataattgttgtaatactctattgagatactagttgtaaagaggcacaatggaaaacttatactattaacagtagtaaaaagaaacaacaaaaagcaataaaaaacaaaacacccattcatgcaacgacatgaacgaacctcacaaatattatactgagtaaaagaagtcagacaaatataaaacaaagtttatactacgtgattagatctttatgacattctagaatatgcacatgaaggtacaaggtaactgtctggaatgatgaaaatgtcctgtgtcttcaaaatagtgtgggttacactaatgcatggctttttcaaaactgatttaaagggacacaacatctgagcatttccctaggtgtaaattacactgcaattttaaagaatcatctaatgatattgtggttatttttaaacagtccttaaattttgtggatgcatactgaatgtttacagctgaaaagatatatataaagcttgaatttggtaaaaaaaaaaaaaaaagagggaggattggtagtgataaagtgagtggacttatggatgagacatgatcagccatgcattgaaaaaatgtaaaagttggatgatcttcacatgagagtcctttattctgtctacttttgcatatgtttgaatatttcccataacaaaaagttgaaaatagagtgatcacatgagttaatctcctaatttacaaaaaagaaaactggaaacagaaggagaacaaaacttgttcaaggtctcaaagccagacagcaaactagctcccaagtccaaccttcttgctctggtcctaagcaaacaaaaaatattaatatgagctactgcattaaggaaagtctgcttttccaaagggcagaccaatagttcaaggaagagtttaaataataaatatttgtgatcttactttcatgcttttctattttccactgaacacatatgcattatcttctatatgtcttttatgtataatcatttgcttcctgttccttgtggttttaaagttgttttgtatgtttaaatttgattttactcaaatttcagaacccaaattagcgcaagaatcagacaaagcataactttctataaatataaaaacaattaaaaaaaaaacatacagcaaaaacgagttgttgtttcccccctcctcttccagtgcttaactaatcttccgaatccaggcacagaaagcaaaggctttctgctagtgggaggagcttgcttctccattctggtgtgatccaggaacagctgtcttccagctctgaaagaggtgaaaatgtgttaagcgatgcaaaaattgtcttgaagttcgcgtgtgtatgtctgtgtgcatgtgcgtgtggtgggtggggggagagaaaagggggtgtcaattctgagggcaacgagaatcagaagtcagaaaggtgagtggtgtgtagcatctccctttcagaaggggctgaagaagaaattggatatgatggtccggtaggctaaatcacgctggatttgtctcccagataaagggaggtctgcaaagtaagtcccatttctagagcgaaaagccttaggaccgcttgttttagacggctggggaatatttattccttgttccactgatgggaaaatcagcgtctggcaggcgctgattggtggaaaggaaaatggtgatagtggcgtggaaagaggatttgctgagccttctcctgcctcctcaacctgtgactcttccttagtagtctccctttcaccctcaggaccctttccggctcttcctagattaagagcaaacgaaaaccttgaagatatttgaactaaagcgacccctaacgttgtaacctgtgaccgtgattaaatttcagcgatgcgagggcaaagcgctctcggcggtgcggtgtgagccacctcccggcgctgcctgtctcctccagcagctccccaagggataggctctgcccttggtggtcgaccctcaggccctcggctctcccagggcgactctgacgaggggtagggggtggtccccgggaggacccagaggaaaggcggggacaagaagggaggggaaggggaaagaggaagaggcatcatccctagcccaaccgctcccgatctccacaagagtgctcgtgaccctaaacttaacgtgaggcgcaaaagcgcccccactttcccgccttgcgcggccaggcaggcggctggagttgatggctcaccccgcgccccctgccccatccccatcc

SEQ ID NO: 1117 - DNA, 6000 bp, Homo sapiens
cctacatccattctctttggcatctttttttttttttgtattaatcattttctattgtatccttttggagaaccccttatccccattttcaatccaagtttccagttggcaaatattggcacatgaccaggccttgccattcagtatatgccaaacatctggccatggtaattgcctcagttgtgagtatgtggcccaagataggccagggccataattctgtatttattttttgccatttggaaacgagtgtgctttgtgttgagattgacaatgataaagacaatgtaaacctggagctgctgggaatcccaggatggagatcataagtctgtgaatgaaaccaaaacagaggagagcataaccaagatattgagggtggggggaagtactaagtcccatgagtgatatttaaattcatgggtctaagacatcatccctcaaatcagactgtcgctagtaaatactaactgtgtgtgaccttgggcaaagttacataaccactctgtttcctcatttatgaaacggagataataatggcactttcattcagttatgatgattaaatgagatagcacatgtaaagagcttagaaagtgcctgacacacagtgagtgatagtaaatggtatctattattaaatagatatttcttatccatagtttttgagttatgcacagtgataaattatctttttgcttaagctggttcgagttgggtttctttcacttgcaaccaaatgggtcttatctaatagaattaataaaaagcagaaagccctagagagttttggtttatgacaagttaaatctctttctctgggctaaggcagggaaggaggattgaatcaactgaatctagaccatctggctctccttcgttgatgtctatcagtaacattatgtgaggtctctgaactcccaacttgtaggaaaggagttttcctcatcaccatcctatttattcactaaaatcctctttctcctatgttgccagttaatgcagttaataatatccctggtatgaagatttatttttaaacctacacaaaaaatataaaaagtgaggaatcaaacatataaggagagagatacaatgaaagaaaatatttccataattaaaatatatgatcaattgtttttgatttaagctttaaactggaaactttttcagtactagttccgagtaaatgatattattatgaagcagcctacatgctaaatagcatacttttcttggtgtagatttctggagggatatgcaggggatttgcatgcttaattcccattagcacctgtcactgggatttattatcctagagttaattctccactcactgcagccaagaaaaagaaagcccttgtatatggatttaaatgaagcttttcatttttcaagatgagatgaatttcctgtctgttccttaaacacctgcagtattccaaccctaaaaagtcaaattccaataaatttttggtgaaaatttggcaaaacttgattttattcaacaactagaaaagcctactcataatttgataacttgagaggctgaagaggagaggaagaaggtttaatgaaggacttagctcaattttaaatccattggttctgattcaatccattcaatattcagtaagtatttattgatcacctattatgtacaaggtattgttccaggttctgggtatagagcactgaatgtattagaaaaaaatttctcccctgagaagcatacattttattgcagactgcatatatatatacatgtatacacacacacacacacaaatatatatatacacatatatgtacatatataaagtaagtgttatatgcaaaatcaaagctggcaaatgatattttggatgatagattgttgctattttaggtaacttgatcagtgaatgcctccctaagcagtgtcatttgaacccagatctcgatgactttagtaaacctattctcaggagcctataaaacactattatttctctcatgaggaaaaaatgtgatgatcaacaaaagtagtcaggatgttaattcacaagacaagttccatctgtacttgtagagagcaggaaacttgcctgctgtgtaaagctgatgtattgctggtgtttttcctgtcctttgtgtggtgctctcactctcttcccccttttccacctcattactctataccacttctcaaaccattctcctgccatctttaggctgaatttcagtatttaactacatttcctcttttaatctcgtattctttattttaaggaactaattgcatgtggtatctgtcactgagtacctcaataccccaaacaggagtaggcgacaatttcaaccttctttagctgtcctagactttgaggagtcttccccattgagcttttttggcaggaaatcagtcaatattgattgagtaccaactatatatcaggctcagtttaggagctgtggttgaaataatgaacaaaggcaaaatctctgtcttaaaagagttaaattctaatttaagaagacaggcaataaaattgtaaataaataacttttggatgtcgttgatgtgatggtgagtatgtgtggagatttcttagtacttaagctgttgtccttcttagtaaaattgtacatataaatataaagtataataataatcccttgtgaagtcattctcaaaatacttgacaagttattagtggcctcgatacaccataaaatatggtagctgctggccacatgtgactatttaaattaaaattaaataaaaatttccaattcacactagccacattgcatgcaagtagccacatgtatctcataactacgacctcagaaagtacagatatgaacatgttcttcattgcagaaatttctgctgaacagcactggtgtagatagcatgaggctaatgggaatttttcatcaatggtaagaacagcagtttacaattttggcgtcaggcattttacatatgtttaacttacataatcctcaaataaccctatgagatagttcctgttactagacccatcttacaaattagggaagagaggcacctagctttaatgttcaatatcagtcaagtaataagaaatgctaagaactgaaggcagacagtctggtgccagcacccaccctgttgtcaaatatcttgatgtcttggtatggagaagatgaagagagtgaagaagggttttgtgtggtggacagagtctccacagaaataagaagtggccagttttgtcaatgtctttggcaaatactaccttttcggatctccctgattcatccgagataggtcttattgcctagatggggctgtgcaggcagaatcatagaatgttagaacttaagagaactttgaaactatcaaaatatttcacaaatgaagaaactgagacattcacaggttacctgacttacccagggtaacagagtagttatgaccacagccaaaattagacctcatgtttcctgcgtgtgtgtgtgcatgcgtgtttacacatggcccccttggcaccaagagcataaaattccctgatgtattattagtttaaagacatgctaatcttgggaagtgattttctttttcccaaaatgttgtctgtgtctgtgtgttgaccttttaataaattcactttccttttgtctagtcttattttacccacccaatcttgcatccctccatcatgaccacagggattcacaacccagctacgtagacaattatttcctgtagaaaggtaaacaaattcatagcagctcgagttcttacacacactattagaaatttgaaaaacatgttataggctccaccatcactttgagtatctacaaattttgctttgcattttttttttctaagagagtttctctcggtatcgcatcaccacccttgtcagccaccaacatgcacgcaaagaaagcactgttgcagaatgagtttccgtcgagcttttagtttctgttccactgcaaaggggtcatacgcgctcagaacataaagcagtctgactggcgctgacaaccccaggacagcagccggctggggcagtgcaaaagcttcatgccttcttccccaaccaagaaggacttcagttcgagcccgcaccggcttcgtcaaccgcgagacccgaagtcgtagaccgagtccagtcctagggaattcggctgaggctttgccggcgcggcgaagaaggtggcaggcggcaggctgagctccactggacacagcctagtggcccggggcgcgcccgctgcactcccggcgtccaggtctggcgcaccgcgggaggcaggcgcgctgccactctccgcagccgcttcgtcccctggtctgtctcgcctcggcttcagcgggcaaacccacagctggtctcctgggcgctgatctccctgcaatccttgcttacataaggcgggcgggcgtgctcccgcccccggttaccccccagaggagttgtgctgcgccctctacgcctccttggcgagcgccttcgcgcacccgtgcgccctactctaggatgtgaacctccttggccacccagcagcgacagccgggacatctctccgccggcgtgagaacactgagattggagaccagagcgcctgacggtgcccaagcttcctccctccgttccctcctcctccaactccccccacttcaacccccacccccacccccacccccggtgtctgtgtgtgttcctcacaggcgaggggacccggagagcagtccagacttcggcgtgcggcggagctgcggctgctcctgctgctggggggagcggcggaggtggccgccttgcgcctccctggacttcccaagtgggggcagagcagtcgctcgcgggagacgtcagttagaaggcattgggaaagagggaccttcaaactcctcctcggcgtctcctctcctcccccttttggcccctgcctttggagaaagtggagtgtggcgcttggttgtcgttatttcttcggactgcttcgcggtgcacggattcagcttctgcccagtggggctttcagctgtttgcgcgtctctctgtccccctcccctccccccggcacacctctgtctacgatgaggaaaggtctgcgggcgacagcggcccgctgcggactgggactgggatacttgctgcaaatgctcgtgctacctgccctggccctgctcagcgccagcggcactggctccgccgcccaaggtaagggggtccgccaagctccgcggccacctcccttagcttcttccttccctccttcctctcctcctccccagttctcttgacttcctcaatttgcctcgttgctttcaactggaaaccactctaaattccactttcccaactagtcaagaagctttgattataataataataattattattattattatgtttaatctatcttctgagatgggcacgaatggaccagggacgaacggggtgtggacacgcagccgatccgtctccatacgtgtgggagcctggagtgtcttgtgccctttcagctccgcacgcgcacgttgttgcatattgcacacacggaggtttggaaagactctcggtgcgggtggctgtgtgacataccgtagatgcaccccgaagcgcatgatgcgcagaggctccccgcgctgtgccaagactggggtagcaggatcttcactgagtctctgagcacactagaccccgaagggcgctcagctaaggaaatgtgtccattactgtcaaggactcaaaagcacccgtccccctcgcctgctgcttcaggtgctgtggaaatacacagctcacccgaatccgcgtacccggctggaggcaggcccgggatgtgcatgcctctgcactcatacataccccgcttcatgcctgcttcccaccaggggatgtagaaatgaaaatcccggagctctgggggaaccggctgcttgttcaaaccaaatccgaaactccccggggtagtcgaccagtttataactctgacattttaatttaa

SEQ ID NO: 1118 - DNA, 6000 bp, Homo sapiens
ggaaacgttaaatgtcttgctcatagtcacacagctggaggtgctggaagcagtattaggaaacattggtaatcactatgttaactgacagaatgggcatacaccattaacagctcttagcctgtgcctccccagagccagatgaaacttgcattaaatctaagtaaaatgctgttgcaacgcaaacttagcttcaagaacatacaacttccagccaaatcactgctcccacgttcttctgtgtagaaattttagaaccccccacccaccactcacattagaatcctagcttcacctatgtttactatcttcggatgtctgaatccagaaagtactatacctgtgtccgcttttatacttaagaaagtgaattataattccatggttctacttctgtcttcctgtagggcttaaactgcctggttacattccgtttctaacaaatagcattcagcctaggatgcaatatgagtgcacaataattgcttaagaactttacttctaataccatactctatccatagaagccattgtttctaatttgtgaggaaatgtgaacaggtttgtttttaactgccacaaatataaaagtcaaactaaaaaaatatgtaggctaaaacttcaaggcaatagcactggctcaatctcaacccccacaattttccccattatcttcctaaagtggttgcagcctgtaattttaatgtttcttctgagagtgactccctctgctgcttctgcaaagccatgacctaaatcagaaaagtgttaaacgcagttaaggcctaatagagcacacttgctgttggcactaattggagaacctagcatacattagagaacagttatgtttaagtctcaacaataattctaaataagctaacagggtttacttagcagagctcatgccttgttcatgtccttagggggggttgcttaaaatagacccatacaagttctgactaggacaaccagctccaaactacaataggaggtgttcgaggaccctgtcttatttaactctttaccctcagtatccagaatacaggagtccagggagtcaataaatgtcagttataatctaatgattcctaattctttgcaagtgtttgaaaagtttattctttgaagattttaagcattctctaagctagaatacacaaaattatttttctaaacagaagtaaactagcctacttttccttattgcatattcctaatgtgaattcataaactttctgtactcctacaatgaaaaagtatacgatagaattgtaatgaactttagttgtcttcactgttgactgtctatttgtaccacaccaatatgcaaacatgcataaaggaatttttactcttttgtaggaagacatatgttatttaaaaaaaaaaactatgaattaagataatagggaattatcccaatctaattagagacttcagtaattttttgtcctgagtttggtggtgttaacactcataacactagttggagctagataagcagcatatcaatgctgtgtagcccagataaaatgcatttataaaccaggagggtcctaattcagaagcacactgatctcacacacacgcgcgcgcgcgcacacacacacacacacacacactgccttttactagtaaaatctttcattcttggaagtcacaaacactacaaattccctggagctaggagttcccagcaatcctgaatgaaacaattagggcatagccagaaaggagaaagttgttgcctacagcctagagaatttcccaaggacctattgaaaatgactgctgcctaaaccacagttacaaaactcagtacactcacaaataatgcctattctatgttttatcttaaatatctgttgtttccttgattatctctgaagatatatatacatacttctaatttttgcagtacttcagcaacagaataaaaacctcatccacattgtaaagtgcttaaagtaactttcccatgttaattgctcttggactttcattcataagaaatagttcatttggatctttaagtcatcaccacaaggaaatcataccttgagggtatgggctagtgttctagtccaaggaaaggagaaagaagaagaataagaaggaaaaggaggtctgactatcagaccatttataaaatgtgtgattctgcaaggaaagtgttaacggtggctcaagataaacaggctgggttactgtactgcagtgatgaaggtagtagctgatagtggagtttggtgctttatccttcctttgataactaacagacaacacaggaagagctgctatccctggaacatggaggataacaaagataaaagcggtggaatagtgcattttacagaccatgagattcaaacaaaaattttactaatcaaaaactgaaggaactaaataaacgaaatggacaagaactgcagtgaaatgcatacacccaacggagtacattttctttttccacttaagatgagaatcagtccccaatctttaacttgcctacgctacaaaaagtgcaagagaaaaagtctatcctaagcatcttttctttttaatctcttctcccttcttctttcaatattaatccatttacaatctgctgtttgattatctttattgatcctttttctacccagtctttttaatttggttattgtaagctcttagcaggaatcctatctcttgtttggcatctttggggactttaacttgtctttttcccaaacagttctctcaccgtgccccgtccccctctcccgccacccacccccatggctcagtcctttgtatgcccagtaacagcaggcgaattccacagggagtcgcgcggttgattccacgactattcataaggttgttcacttaagcttccaaacacccccctctaagcacccttggctagcgccctgagaacttcttatcaattttaggaaatccacaagctatgattctcggtggagattcctttttaaatagacagacagatgaactctggaggtgtgcataagaaaaccagagcagaacctcagggatgggaggcatctggcgagaaaggaaggaaggatttatgagcagggccacttagcagggcagcaggaaaatttacttccgaagaagctatcgctaattcacaaagccttgctaatcacttacctctccacccagaccgcactcctatgctaggcgctctcctccgcttccaacacccccatccccacccccagcgcctctctaagatcagagggaatgctgtccggaaaccctagggtgtctgaacatcacctggggagttggggctatcgtaaagcctccctttactctccaaatttggaaggaagagtaaccgagagtgaagggagaatccctgaattgcctctgaatgctgcataagcttccttcattctctcctcttccaggaaaagctgagctgcctcgcctgagccggctatcaccactgaagtgggctaagagacccaagtaggagctgggcttggccagaagttttggggcccaggtgacctgaaagagaccccggaggggacagccttggctctttcttctgcgctcccttccagtcagctttcccggctttgaaggctgggagctgctgctaacacttcaaactaggcggacaagaagggagccgggcgatcagctccggagcctcccctcctcccttacccatccccaactcccggccacactcttcccaacccggcttcgcccagggccccggtcacttatgttaaagttcacaggcgttaaattaaaatgtcagagttataaactggtcgactaccccggggagtttcggatttggtttgaacaagcagccggttcccccagagctccgggattttcatttctacatcccctggtgggaagcaggcatgaagcggggtatgtatgagtgcagaggcatgcacatcccgggcctgcctccagccgggtacgcggattcgggtgagctgtgtatttccacagcacctgaagcagcaggcgagggggacgggtgcttttgagtccttgacagtaatggacacatttccttagctgagcgcccttcggggtctagtgtgctcagagactcagtgaagatcctgctaccccagtcttggcacagcgcggggagcctctgcgcatcatgcgcttcggggtgcatctacggtatgtcacacagccacccgcaccgagagtctttccaaacctccgtgtgtgcaatatgcaacaacgtgcgcgtgcggagctgaaagggcacaagacactccaggctcccacacgtatggagacggatcggctgcgtgtccacaccccgttcgtccctggtccattcgtgcccatctcagaagatagattaaacataataataataataattattattattataatcaaagcttcttgactagttgggaaagtggaatttagagtggtttccagttgaaagcaacgaggcaaattgaggaagtcaagagaactggggaggaggagaggaaggagggaaggaagaagctaagggaggtggccgcggagcttggcggacccccttaccttgggcggcggagccagtgccgctggcgctgagcagggccagggcaggtagcacgagcatttgcagcaagtatcccagtcccagtccgcagcgggccgctgtcgcccgcagacctttcctcatcgtagacagaggtgtgccggggggaggggagggggacagagagacgcgcaaacagctgaaagccccactgggcagaagctgaatccgtgcaccgcgaagcagtccgaagaaataacgacaaccaagcgccacactccactttctccaaaggcaggggccaaaagggggaggagaggagacgccgaggaggagtttgaaggtccctctttcccaatgccttctaactgacgtctcccgcgagcgactgctctgcccccacttgggaagtccagggaggcgcaaggcggccacctccgccgctccccccagcagcaggagcagccgcagctccgccgcacgccgaagtctggactgctctccgggtcccctcgcctgtgaggaacacacacagacaccgggggtgggggtgggggtgggggttgaagtggggggagttggaggaggagggaacggagggaggaagcttgggcaccgtcaggcgctctggtctccaatctcagtgttctcacgccggcggagagatgtcccggctgtcgctgctgggtggccaaggaggttcacatcctagagtagggcgcacgggtgcgcgaaggcgctcgccaaggaggcgtagagggcgcagcacaactcctctggggggtaaccgggggcgggagcacgcccgcccgccttatgtaagcaaggattgcagggagatcagcgcccaggagaccagctgtgggtttgcccgctgaagccgaggcgagacagaccaggggacgaagcggctgcggagagtggcagcgcgcctgcctcccgcggtgcgccagacctggacgccgggagtgcagcgggcgcgccccgggccactaggctgtgtccagtggagctcagcctgccgcctgccaccttcttcgccgcgccggcaaagcctcagccgaattccctaggactggactcggtctacgacttcgggtctcgcggttgacgaagccggtgcgggctcgaactgaagtccttcttggttggggaagaaggcatgaagcttttgcactgccccagccggctgctgtcctggggttgtcagcgccagtcagactgctttatgttctgagcgcgtatgacccctttgcagtggaacagaaactaaaagctcgacggaaactcattctgcaacagtgctttctttgcgtgcatgttggtggctgacaagggtggtgatgcgataccgagagaaactctcttagaaaaaaaaaatgcaaagcaaaatttgtagatactcaaagtgatggtggagcctataacatgtttttcaaatttctaatagtgtgtgt

SEQ ID NO: 1119 - DNA, 6000 bp, Homo sapiens
tggtttagtgtatttcagctgatgattatagcctaatcctccccctcttcttggggcctctcttctctgtactcttcctcctcatatctcacacaggcagatttgttcctgcctcctcacctacattacgagctccgcacagtctcctttcttctggctccggctccctcattaatctttctgttattaacgctattaactcgttaaactatctctccacctttccaaacttccattaactctggcactccataagtgttagtcaaataaatgaagaatcacactaactcctctttccttccctctcactccaaactcttggtgagattcttttgcacttatgccctcgtttccccatttcccactcacttgtcagtctcctcattcttggttttcctcattatattgaaacacatctgaaaaagtcatgtaagaccacagccactgcgtatcagtgctatttgagagttaataaagttcccttttcctccaagacagcgagcagagtgaacagaagaaagactggtttctgcccttggctgcacagccatgccccgaggccgggcttaggattttataattcacaaagtcaactgtctcttcccctctccatcctttaggaactgtctgcagtatctgacactgttgagagctctcataccctttaaactctctcttctctggctttctgagctttcctcccacttttgatggcactgcaggagtttttaagcatctctctctcataccaaccccagaaataaagtcattcctcgaattcctgtacttagccccttgtctcctaactctttgaccactaatgttttagaaacactctcctgacaactatcgcatctttgcagttgtttccatttccaacgccatgtctctctgagcagcagccttgagttttcaattgcatatttattagtcatttccatatggacatctcactaaatctgtcatactaaacatgtctaaaatatgtatgtttacatgttacatgtatgtttggtatgtgggaatgcattacattcccacagattttttcccagttacagtgttactattctaatcactcagactagaacactcagagctatctatgagtcttcctctcactcaaactgcatatataatctataaacaggtcctgttgacctcatcttctaaaaatctcttacatgctcctttttatatcattggataatagtttagtgtggtggttaatatcatgcacactggagccaaatctgttaggttcaaatcctgactctccttctatttactaattatgaaaccttaggaaaattattcaacttttcatctgtaaatatggggattataatggtgatccactttatatgactgacaaccaaataagtgaatacgtgtatagcaggtattaaccatatgcttagccgacctatttcaacctcctaaccaaccagaagaactgtagttccctgctctcttgcatctaagtggggccatggaatgtgggcagaagtgttgtgtcacctttactcagaggcaattaaaaagaagacatacttttcctatgttctcattgccaatgaacacactacacagatctcaacctcagaattctctccacactggtatttccaaaatagcttcatgagaagggaaatttgtgtagtttcaatgatttagtgatgctatggtttgggtatttgtctcctctaaacctcatgttgaaatgtgaccccaattttggaggtggggcctaatgggagatgtttcggtcatggaggtggatccctcacaaatagattgatgctattccctgcaaggaggagaggatgagtgagttctcactgcattagttcctatgagagctggttgctaaaaagtttggcatctctcccctctctctcgccatacgatctctctgcacacaccacccgcctttgccttccattgagtggaagcagcctgaggccctcaccagacgcatatgctggtgccatgcttcttgtacagtctgaagactgtgagcctaataaacctcttttcattataagctacctagtcttgtgtattctgccatagcaacacaaatgaactaagacaagtgacaaacacaaaataacttgtcttttagacaatattgatgtctgaaattccacattgaggcatttttttcctcttcgtagcctgataatggcaaataccttctgacaccttaggatggatgaatttgtaagagatattcctggaagcaggtttgtacagtgtagagaaaatgttgggtaacaaagcaggaatggaggagggttaatcagcaagccaaaaagcttttatagttttgcctgctgtgctgcatggaattacatccccccaaaacatatgttcaagtcctaaccacaggtacctgtgaacatgagtttatttggaactaggatctttgcaaatgttatcaagttaagatgaggtaatactggattggggtgggctctaaatccaatgactggtgtcttcataaaagaaaggtgagggagagttgaatatagcgacacaaaggaaacacggggaaggagaccatgtgacaatgtaggcacagaatggagtgttgcagccaagccaagaatggcaaggattgctggagctaccagaagctaggaggaggcaaaggattcttccctagagccttcagagggatcatggccttaatggcaccttgagttcagaattttaggctccaggactgtgacagaataaattcccgttgtaagctgttcagtcggtggtaaatttttacagcagccccaggaaaatatgcctgctcaacaccctaccctgaattttaagttcattttatggaatcattttgagtttggagtttgatttaatccttttcagtaattaacgctcttcattttttactcccaaatatgtcacactggctctactcttataacaattgtatttatctatcttttggtaatggggctgccaccccttgcagaatgaaaagtagagtgtgtatgctcacacctccctccctccctccctctctccctccctctctctttctttctttctcagagtatcgctctgtctcgcccaggctggagtgcagtggcgcaatcttggctcactgcaacctctgcctccagggttcaagcgattctcctgcctcagcctctggagtagctgggattacaggcgcccgccaccacgcccggctaatttttttgtattgttagtagagatggggtttcaccatattggtcaggctggtctcaaactcctgacctcaggggatccacccgccttggcctcccaaagtgctgggattacaggtgtgagccaccgcacccggctcacagaatttcttaaaaagtcattgtgttcagtctttatggatcctctaaattccagctgctcagcctcccggagctaaatgagatcacttaaaggtcgactgttggggcctccaaggtcgcctcggagactcacctcataggcaatcaaatggatcgctgggtttttgtgtgtgtgggttttttttgtttattttttttttccagaaaaacactccaccaagaaggtttttataacctactggaggaggaggatggagagtgggcacgaaaggactaggatgaacatgccataagcaatctaaatgccactgcaatattgcctggtgaggacctgattactgatgttttaaagctaagctttcagttgtcactccacccagtagtgaaacaatgagctctaaaatatatatttcggctcaagctttcttatgtggggaggtaatccacccgaaggtatccccagcctgtacctaatacagtgcccagcactaaagcagctcagatgccagtgaatggtggccactgggaggcctgtcagtgggtgccagtagcggtctcttcagagaaaaagaaaactcccctctgccagatcagtattttatgagctgtgaaccaaaaccattgctaccaccatcactataattctatccacagtaattatcataaaggcctaacaatgccttgtagatgaacattctgagtaactgctctataaccaggagatttaagaccgcaccaaaaaccagtagagggttatactttactgggcacaagtcgtttatgataacgaaattgtagtttaatctgtgaagagatgtgaatgtaactgagacacgcttaaatggaatatacagatgagctttatttttatatctggcatgcttggatccatgccgaccctccagctgctcgggcctgcccttaggggctatggaccgcatgactctatcagcggcactgccaccgccgccgcctccgtgctgcctgcgttccccgaccattgattgggcccggcaggcgcttcctgggggcttccctaccggctccagcccttgggattcgggagcgccctgctaggaagccagagccccgcaggggccgcggcgtccaggccgcctaacgcgcgcccctcgcccggcgccccgaagcggccccgaggggcgggagccgaggcgagcggcaaggccgggccgggggcgcacagcgcccctagaagtgcgggcttcccccacccccggcagcgaccctacctcccgcccccgctgcgtgcgcgcgtgtgtccgtctgtctgtatgctctctcgacgtcagtgggaatttccagccaggaagtgagagagtgagcgagacagaaagagagagaagtgcaccagcgagccggggcaggaagaggaggtttcgccaccggagcggcccggcgacgcgctgacagcttcccctgcccttcccgtcggtcgggccgccagccgccgcagccctcggcctgcacgcagccaccggccccgctcccggagcccagcgccgccgaggccgcagccgcccggccagtaaggcggcgccgccgcccggccaccgcgcgccctgcgcttccctccgcccgcgctgcggccatggcgcggcgctgactggcctggcccggccccgccgcgctcccgctcgccccgacccgcactcgggcccgcccgggctccggcctgccgccgcctcttccttctccagccggcaggcccgcgccgcttaggagggagagcccacccgcgccaggaggccgaacgcggactcgccacccgggtaagccaaactcgggcgagtgggggcccggcaggggacgcgtggcccaagtcctgccgcccagccctccgcaccccctccagccccactcggacttcctcattcctgcgctaaccgctgggctagaccgtgggaggaggttgacagtagctgagaggcacatgggattagcgacagcggggaaagacacatccggacctcgcaggggctagtcggccgaagggccgcggccgcccggcggtcatttctcttcacgtccctccgcggggcgggaacgcgaaccgaaggggaactcttacaaacttttaaaatccccaaccccagccccacctgggggatggtgagaaggttggagtgcgctgcggcgcggaggagagagggaaggtggttggtgcagtgcagaaccagatttcacctaagggcgttccatgaaatgaaagcagaagtgcttgtcagtcctcttggctgggaaagccctccccagctccccagaattgaataggagagtctattcatccctctcctacttctaaaagaaacctggctcgctctctgtctctctctctctcccccctccccccctccgtgcgcgcgcgcgcgcgcacacacacacacacacacacacacacacacacacgatatagtcacctgctataggacttgattctgatcctccggggcctggcatttgagagagaaaataaattacctacctggatacttagagcactttttagacttgattatgtaaaactcttggacagtgccaccatgcattatgcatgaccgctgaaacaaaaataatgtaaaaacaaggcctatcctaaatgcaagtttttctatggtccttaaaaaca

SEQ ID NO: 1120 - DNA, 6000 bp, Homo sapiens
attgtttcttttttggaggtattagtatttgatattacagtttcaatggagtgtacagaaattctaacttcaccaaaaaattacatttttcaattttacaagcaccttttatcattccaattactttataatcttgctctggtgcctctaaaactttgaaactaaaaggcattttttttctagttcataaatgcctctttcagaatgaaatgttccccttttggaaggcgccagatactttttaataaattatttgttctagtaaacttcaagtggtctttagataagatttccataatatctaagacacaaggactattttgtgctcctttctttccagaaggcaaagcaaaataatgtaatttttgttccttatagaagatggctgtccatttaaaaaaaaattttgcaacaacttcatatcattcattcatttaacagttaatgattgcttactatgtaccaacaagtacaatgctaagcatcagatatttctttcgtcagtattgattagatattatttatttttagttaaactagagtatttgattctctcaaacagctttttctttatttcattttttataattttggctattttaaagaataaattcttttctaaagcttaagcagtcaaaatttgtcacagtttaaactaataggatccatagatgaactcaagtctgttgatatctactgaaggcatgggtcaaaataaaagctattttaaggtttctggattaatggtgaaagatgaatgaaaaataataaggcaatttgtaatggataattaaaccaaatatatcattattctaatttcaaaaacaggcaataaattaaagcagatgaaatttgtattactgataattaattctgtttgttactacagaaaatatgacacaataaaaattgttttctttttaaaatgtaaaatgcactatttttattattagtactctaaattaaacaaatattttcatccataatctatcttctgagatttctataatctttaacaaatcacatcttatgtgactcttattctgtacagaactgtcaggctttaaattatttgaggtgtagcaatgcaatttgcacaacttattttctaaactgttggctgatcttcaaggccaggtcaacaacctccggaaatgtaaaagacagtatattaatttgcacccaggaacaacccctaatacagcagagaccaaaggtatgaagcaatttcatcatcattaaaagaatgttactacttttttctctttttttcttctaaaagtgaggcactggatactaattaatgaaatactacaaagataaaaggcttggttatgttaccagaactattaactgtccaaattatgtggtttcaaatattaatcttttttgattaaaaaaattcacagtcaaggagccaaactgacttgcaggactatgccaaaacgttcaaacctttctccctgaggctgagtaccttcagttcttccaaactgtctgtctccaaagtagtgacaaaattcaaagagagatcatatgctcttgatggtttattgctgacctctaagaacactacaagtgagttcagtatttatgggaggtgcaagagtgcaaatgagaactaattcccaaaaagcagagtaaattgctccagtatggtctactgtttaccaagacgtagtcatcaattaatgctgattagacacaaatgtagatgtaggagcagaacatcttaacatatcctctagcactaacttctatttttccttctccttctcttctaatataacaatcccactactgtagacaattcaccttgtaaacagaaaaccaacagaccaaccgaataaaacaaacttcctactaaaagtaagaaaattaatgagaaattttgcatagacatccattcctgttaatgtgatttctgatcaatctgtggaccagaagagcataatctgagaatttactctattggttatacaacagtactgtgcatttccagatacacttcctactgcagtcaattctatactcagaatagcacatctactaagacccgaagatgcaaaagatgacattttgagtacttcatcaaaaatccatacagcaactcagatacaattattttactgtttgaaaatatcgactacttttcttacttctcccaagttcaaaccaattgaaggttatgaagtaaccacttccccccagaagccagaactttcacctcttctgaacagagaaatacctctcataaattaggtaaaaataaggtcttgctgatggaatgatagtccaacattcatgtagctgccaattccctatctagacctcgtatctaccacaatgagcaatccctgaaagtcaaggtagtaacttacttaatcaattatctgcaagtctaaaagtgtagttaaaacaacctgcataaatattagtttctcaaactacttcaatttgtttccaggaacagtaacaacagaaatgtaaggaatataatcactaaatctaaaattctgcctatttcagattaattgtgctttaatcaactcaatcaacacagatcttgtttaagaggtagagtaaaaaggaagtgcaaagatcaaagcaatgcttacaaaggggaaggactatttttgtatgtatacccccagtatttactatctgggtttgaaaaacacgggcatttactcagcacaagtgagtgccaatgcctaacataagaatgaaatttcagcaaaaagataatagattttcacatcaccaccaacccctaaaaggattatactaccttctttaaaaagtctcaaagagtttagaagtggtttgcttttcactgcaagcagcttttcggttccagtattaaatgtacatataacgtgtgttcctttgtgttcaagtttgtccagtaggctgcagcccaggaagacattttatctaaacaagcaggggagggcatttaggaattgcaggtgtatcaatatggatgaataatctcagattccaagtctccattaatcgtacatgttctttccattttagcaattcaattaaatcatgaatgtaaaattctacaggaaacaaatctttttatttcctgtcttcccaagtttataaactcaaaaaagtacattgcttcaaatttaaatacatacatttaaatacataattcctatagtgcctcaaacagtaaaaggattcatctctagaaagcacaatattaaaatcagaaaaacaacatactttagttttaagtttcccttttaaagttttaacaaacacgaatgcagtttaaactgcttgacaatattcagttgtgggattctgctagaaaaaaattattgaatatcttgaccctaacctttactatttactaaaagatcaccagtatgtagaatattttgatgccagagctattaaatgttttagtaataccataagcattttttcagattatgagctttataaaaaaatctttgagttaaatatggttatttcataaactgtaatgctgaaaacctctacttaacaaagtccatgaacatgtcaatcttgataattaaatcctgtatcattaagtcccatttgagtttcaggataaaccagcaagtcagggcaaacattccctggtgtctgtttttaaggaccatagaaaaacttgcatttaggataggccttgtttttacattatttttgtttcagcggtcatgcataatgcatggtggcactgtccaagagttttacataatcaagtctaaaaagtgctctaagtatccaggtaggtaatttattttctctctcaaatgccaggccccggaggatcagaatcaagtcctatagcaggtgactatatcgtgtgtgtgtgtgtgtgtgtgtgtgtgtgtgtgtgcgcgcgcgcgcgcgcacggagggggggaggggggagagagagagagacagagagcgagccaggtttcttttagaagtaggagagggatgaatagactctcctattcaattctggggagctggggagggctttcccagccaagaggactgacaagcacttctgctttcatttcatggaacgcccttaggtgaaatctggttctgcactgcaccaaccaccttccctctctcctccgcgccgcagcgcactccaaccttctcaccatcccccaggtggggctggggttggggattttaaaagtttgtaagagttccccttcggttcgcgttcccgccccgcggagggacgtgaagagaaatgaccgccgggcggccgcggcccttcggccgactagcccctgcgaggtccggatgtgtctttccccgctgtcgctaatcccatgtgcctctcagctactgtcaacctcctcccacggtctagcccagcggttagcgcaggaatgaggaagtccgagtggggctggagggggtgcggagggctgggcggcaggacttgggccacgcgtcccctgccgggcccccactcgcccgagtttggcttacccgggtggcgagtccgcgttcggcctcctggcgcgggtgggctctccctcctaagcggcgcgggcctgccggctggagaaggaagaggcggcggcaggccggagcccgggcgggcccgagtgcgggtcggggcgagcgggagcgcggcggggccgggccaggccagtcagcgccgcgccatggccgcagcgcgggcggagggaagcgcagggcgcgcggtggccgggcggcggcgccgccttactggccgggcggctgcggcctcggcggcgctgggctccgggagcggggccggtggctgcgtgcaggccgagggctgcggcggctggcggcccgaccgacgggaagggcaggggaagctgtcagcgcgtcgccgggccgctccggtggcgaaacctcctcttcctgccccggctcgctggtgcacttctctctctttctgtctcgctcactctctcacttcctggctggaaattcccactgacgtcgagagagcatacagacagacggacacacgcgcgcacgcagcgggggcgggaggtagggtcgctgccgggggtgggggaagcccgcacttctaggggcgctgtgcgcccccggcccggccttgccgctcgcctcggctcccgcccctcggggccgcttcggggcgccgggcgaggggcgcgcgttaggcggcctggacgccgcggcccctgcggggctctggcttcctagcagggcgctcccgaatcccaagggctggagccggtagggaagcccccaggaagcgcctgccgggcccaatcaatggtcggggaacgcaggcagcacggaggcggcggcggtggcagtgccgctgatagagtcatgcggtccatagcccctaagggcaggcccgagcagctggagggtcggcatggatccaagcatgccagatataaaaataaagctcatctgtatattccatttaagcgtgtctcagttacattcacatctcttcacagattaaactacaatttcgttatcataaacgacttgtgcccagtaaagtataaccctctactggtttttggtgcggtcttaaatctcctggttatagagcagttactcagaatgttcatctacaaggcattgttaggcctttatgataattactgtggatagaattatagtgatggtggtagcaatggttttggttcacagctcataaaatactgatctggcagaggggagttttctttttctctgaagagaccgctactggcacccactgacaggcctcccagtggccaccattcactggcatctgagctgctttagtgctgggcactgtattaggtacaggctggggataccttcgggtggattacctccccacataagaaagcttgagccgaaatatatattttagagctcattgtttcactactgggtggagtgacaactgaaagcttagctttaaaacatcagtaatcaggtcctcaccaggcaatattgcagtggcatttagattgcttatggcatgtt

SEQ ID NO: 1121 - DNA, 6000 bp, Homo sapiens
cttatgccctcgtttccccatttcccactcacttgtcagtctcctcattcttggttttcctcattatattgaaacacatctgaaaaagtcatgtaagaccacagccactgcgtatcagtgctatttgagagttaataaagttcccttttcctccaagacagcgagcagagtgaacagaagaaagactggtttctgcccttggctgcacagccatgccccgaggccgggcttaggattttataattcacaaagtcaactgtctcttcccctctccatcctttaggaactgtctgcagtatctgacactgttgagagctctcataccctttaaactctctcttctctggctttctgagctttcctcccacttttgatggcactgcaggagtttttaagcatctctctctcataccaaccccagaaataaagtcattcctcgaattcctgtacttagccccttgtctcctaactctttgaccactaatgttttagaaacactctcctgacaactatcgcatctttgcagttgtttccatttccaacgccatgtctctctgagcagcagccttgagttttcaattgcatatttattagtcatttccatatggacatctcactaaatctgtcatactaaacatgtctaaaatatgtatgtttacatgttacatgtatgtttggtatgtgggaatgcattacattcccacagattttttcccagttacagtgttactattctaatcactcagactagaacactcagagctatctatgagtcttcctctcactcaaactgcatatataatctataaacaggtcctgttgacctcatcttctaaaaatctcttacatgctcctttttatatcattggataatagtttagtgtggtggttaatatcatgcacactggagccaaatctgttaggttcaaatcctgactctccttctatttactaattatgaaaccttaggaaaattattcaacttttcatctgtaaatatggggattataatggtgatccactttatatgactgacaaccaaataagtgaatacgtgtatagcaggtattaaccatatgcttagccgacctatttcaacctcctaaccaaccagaagaactgtagttccctgctctcttgcatctaagtggggccatggaatgtgggcagaagtgttgtgtcacctttactcagaggcaattaaaaagaagacatacttttcctatgttctcattgccaatgaacacactacacagatctcaacctcagaattctctccacactggtatttccaaaatagcttcatgagaagggaaatttgtgtagtttcaatgatttagtgatgctatggtttgggtatttgtctcctctaaacctcatgttgaaatgtgaccccaattttggaggtggggcctaatgggagatgtttcggtcatggaggtggatccctcacaaatagattgatgctattccctgcaaggaggagaggatgagtgagttctcactgcattagttcctatgagagctggttgctaaaaagtttggcatctctcccctctctctcgccatacgatctctctgcacacaccacccgcctttgccttccattgagtggaagcagcctgaggccctcaccagacgcatatgctggtgccatgcttcttgtacagtctgaagactgtgagcctaataaacctcttttcattataagctacctagtcttgtgtattctgccatagcaacacaaatgaactaagacaagtgacaaacacaaaataacttgtcttttagacaatattgatgtctgaaattccacattgaggcatttttttcctcttcgtagcctgataatggcaaataccttctgacaccttaggatggatgaatttgtaagagatattcctggaagcaggtttgtacagtgtagagaaaatgttgggtaacaaagcaggaatggaggagggttaatcagcaagccaaaaagcttttatagttttgcctgctgtgctgcatggaattacatccccccaaaacatatgttcaagtcctaaccacaggtacctgtgaacatgagtttatttggaactaggatctttgcaaatgttatcaagttaagatgaggtaatactggattggggtgggctctaaatccaatgactggtgtcttcataaaagaaaggtgagggagagttgaatatagcgacacaaaggaaacacggggaaggagaccatgtgacaatgtaggcacagaatggagtgttgcagccaagccaagaatggcaaggattgctggagctaccagaagctaggaggaggcaaaggattcttccctagagccttcagagggatcatggccttaatggcaccttgagttcagaattttaggctccaggactgtgacagaataaattcccgttgtaagctgttcagtcggtggtaaatttttacagcagccccaggaaaatatgcctgctcaacaccctaccctgaattttaagttcattttatggaatcattttgagtttggagtttgatttaatccttttcagtaattaacgctcttcattttttactcccaaatatgtcacactggctctactcttataacaattgtatttatctatcttttggtaatggggctgccaccccttgcagaatgaaaagtagagtgtgtatgctcacacctccctccctccctccctctctccctccctctctctttctttctttctcagagtatcgctctgtctcgcccaggctggagtgcagtggcgcaatcttggctcactgcaacctctgcctccagggttcaagcgattctcctgcctcagcctctggagtagctgggattacaggcgcccgccaccacgcccggctaatttttttgtattgttagtagagatggggtttcaccatattggtcaggctggtctcaaactcctgacctcaggggatccacccgccttggcctcccaaagtgctgggattacaggtgtgagccaccgcacccggctcacagaatttcttaaaaagtcattgtgttcagtctttatggatcctctaaattccagctgctcagcctcccggagctaaatgagatcacttaaaggtcgactgttggggcctccaaggtcgcctcggagactcacctcataggcaatcaaatggatcgctgggtttttgtgtgtgtgggttttttttgtttattttttttttccagaaaaacactccaccaagaaggtttttataacctactggaggaggaggatggagagtgggcacgaaaggactaggatgaacatgccataagcaatctaaatgccactgcaatattgcctggtgaggacctgattactgatgttttaaagctaagctttcagttgtcactccacccagtagtgaaacaatgagctctaaaatatatatttcggctcaagctttcttatgtggggaggtaatccacccgaaggtatccccagcctgtacctaatacagtgcccagcactaaagcagctcagatgccagtgaatggtggccactgggaggcctgtcagtgggtgccagtagcggtctcttcagagaaaaagaaaactcccctctgccagatcagtattttatgagctgtgaaccaaaaccattgctaccaccatcactataattctatccacagtaattatcataaaggcctaacaatgccttgtagatgaacattctgagtaactgctctataaccaggagatttaagaccgcaccaaaaaccagtagagggttatactttactgggcacaagtcgtttatgataacgaaattgtagtttaatctgtgaagagatgtgaatgtaactgagacacgcttaaatggaatatacagatgagctttatttttatatctggcatgcttggatccatgccgaccctccagctgctcgggcctgcccttaggggctatggaccgcatgactctatcagcggcactgccaccgccgccgcctccgtgctgcctgcgttccccgaccattgattgggcccggcaggcgcttcctgggggcttccctaccggctccagcccttgggattcgggagcgccctgctaggaagccagagccccgcaggggccgcggcgtccaggccgcctaacgcgcgcccctcgcccggcgccccgaagcggccccgaggggcgggagccgaggcgagcggcaaggccgggccgggggcgcacagcgcccctagaagtgcgggcttcccccacccccggcagcgaccctacctcccgcccccgctgcgtgcgcgcgtgtgtccgtctgtctgtatgctctctcgacgtcagtgggaatttccagccaggaagtgagagagtgagcgagacagaaagagagagaagtgcaccagcgagccggggcaggaagaggaggtttcgccaccggagcggcccggcgacgcgctgacagcttcccctgcccttcccgtcggtcgggccgccagccgccgcagccctcggcctgcacgcagccaccggccccgctcccggagcccagcgccgccgaggccgcagccgcccggccagtaaggcggcgccgccgcccggccaccgcgcgccctgcgcttccctccgcccgcgctgcggccatggcgcggcgctgactggcctggcccggccccgccgcgctcccgctcgccccgacccgcactcgggcccgcccgggctccggcctgccgccgcctcttccttctccagccggcaggcccgcgccgcttaggagggagagcccacccgcgccaggaggccgaacgcggactcgccacccgggtaagccaaactcgggcgagtgggggcccggcaggggacgcgtggcccaagtcctgccgcccagccctccgcaccccctccagccccactcggacttcctcattcctgcgctaaccgctgggctagaccgtgggaggaggttgacagtagctgagaggcacatgggattagcgacagcggggaaagacacatccggacctcgcaggggctagtcggccgaagggccgcggccgcccggcggtcatttctcttcacgtccctccgcggggcgggaacgcgaaccgaaggggaactcttacaaacttttaaaatccccaaccccagccccacctgggggatggtgagaaggttggagtgcgctgcggcgcggaggagagagggaaggtggttggtgcagtgcagaaccagatttcacctaagggcgttccatgaaatgaaagcagaagtgcttgtcagtcctcttggctgggaaagccctccccagctccccagaattgaataggagagtctattcatccctctcctacttctaaaagaaacctggctcgctctctgtctctctctctctcccccctccccccctccgtgcgcgcgcgcgcgcgcacacacacacacacacacacacacacacacacacgatatagtcacctgctataggacttgattctgatcctccggggcctggcatttgagagagaaaataaattacctacctggatacttagagcactttttagacttgattatgtaaaactcttggacagtgccaccatgcattatgcatgaccgctgaaacaaaaataatgtaaaaacaaggcctatcctaaatgcaagtttttctatggtccttaaaaacagacaccagggaatgtttgccctgacttgctggtttatcctgaaactcaaatgggacttaatgatacaggatttaattatcaagattgacatgttcatggactttgttaagtagaggttttcagcattacagtttatgaaataaccatatttaactcaaagatttttttataaagctcataatctgaaaaaatgcttatggtattactaaaacatttaatagctctggcatcaaaatattctacatactggtgatcttttagtaaatagtaaaggttagggtcaagatattcaataatttttttctagcagaatcccacaactgaatattgtcaagca

SEQ ID NO: 1122 - DNA, 6000 bp, Homo sapiens
ccaatattcattgagctcttcacatggcaggcagtattctgagtccttcacagtcacttaacccaatcatcacaaccaccatacaagggaaatatggaaattccatgtctttgttgcaggataagttactaagacagtgatttctgaaatattttatgcatacaatgaacagtaaatggtttgagtaaaaacccttctttgatttcgtactctaatgacatcaagacttgaaccacaggcacatgtagaagttaccaaattagattttttctctcccaaataatagtatgagatgagttccttatacttatttcttaagtattcattatacttattttaatatattagaagtggtgccttaacacattttaatttttttcccactctaaggttgcttacttttaaaattacaaggtccagaggaattacaaaagataaagccaccgtttcatcaaatctgaaagcattgtcaaagtaaattttttacaatagccaaccacccaaggaggagctaaattaaatccaacattgagcaccccatggcaccttgttggcacactgtttggctgctatttttggggtaggacaacatgctctccccaggaaacaccattatctagagaccctcatcattctgtgaatttctgcatggttctgtccctgaattagctctacctatgaaagccagatttgaaaaatccaggagaagccaggtgtcgtggctcatgcccgtaatcccaacattctgggaggccaaggtgggcagataccaggtcgggagtttgataccagcctgaccaacatggagaaaccccatctctactaaaaatacaaaattagccaggcatggtagtgcacgcctgtaatcctagctacttgggaggccaaggcaggagaatcgcttgaacccgggcggcagaggttgcggtgagctgagatcatgccattgcactccagcctgggcaacaacagctaaactgtctcaaaaaaaaaaaaaaaaaatccaggagttacctccagtttactttggcccaagtttcatatacaaagaacatttaaaataagttactgcaagtcctacaaagtaacttgcactggggaaaggactacacatgaaacaggaacatatatgccaccccctatgggatacctcagagggatttcgagtttggttccagaccaccaataaaagagtcacacaaattttctggtttcccagtgcatatgaaagtttttcatactaaagtgtagtctgttaagtgtgcaataacatgtctaaaaaaataatgtatataccttaattttaaaatattgctaaaagatgctagggatcatctgagccttcagcgagttataaatgttggtgtggggtattgttgagggctgctgactgattagggtggtagttgctgaaggctgggatgactggcaatctcttaaaataaggcaataaggaagtttgcttcatttttttgtttgttttgagatggagtctcgttctgtcactcaggctggagtgcagtggcatgatcttggctcactgcaacctctgcctcctggttcaagtgattcttgtgcctcagcctcctgagtagctgggattacaggtgcctgccaccgtgcccggctaatttttgttatttttagtagagacagggttttgccatgttggccagtctgggctcgaactcctggcctcccaaagtcctgggattacaggcatgagccactgcacctggccatccattgattgttccattcactaaagatttccctgtagcatgtgatgctgtttggtagcattttatccacagaccttctttcaaaattggggtcaatccccccaaaccctgccactgctttgtcaactaataccctgaatcctttgttgtcatttaaacacaattcacagcatattcaccaggagtagattctatctcaataaaccactttctttgctcatccgtaaaaagcatctcctcatctatcaaagttttatcatgagatggcaacaatgcagccacattttcaggccccacttccaattctatttgtcttgctacttctgccacatctacagtgacttccctcactgaagtcttgaacccctcaacatcagtgatgaggattggaattaacttctttcaaactcctgttaatgtggagatatatgcatatacctatgtataatgtatgtgtgtgtgtatatgtgtgtgtgtatatatatatatatatatatatatatatatatatatataaaatggataggtatgttgtcctgcctgtaaaataccacccagtgtgccaattgaaatatatataatttttaaatatttatatatgtattttatatatattatatatatatatatatatatatatatatattttttttttttttttttttttttttttaaagagtgtcttactctgtcacccagactggagtgcagtggcacagtcagctgactgcagcctcaaacttgggctcaaataatcctgccatcttagtgtcctgagttgctgggaatacaggcatgtgccaccactcttggctaattaaaaaaaaaaaaaaattgtagagacagggtcttgcattgttgcctaggctggtctcaaaactcctggcctcaagcaatccaccttggcctcccaaagtgctgggtttacaggcatgagccactgtggctgatacatgtacttttaatttttcgtttttctttttttccccctctagtctctagttacataccgtaagtggatattttgacctcccatgaatcacaaatgttcttaatggcatctcgaatgatgaatcctttccagaagattttcaatttactttgctcagaactatcagaggaatcatgatgacagctatagccttatgaaatgtattttgtaaataagacttgaaagtcaaaatttctccttgatccctgggcttcagaatggatgttgtgttagcaagcacgataacagcatcagtctctgtacatctctatcagaactcttggatgaccaggtgtattgtcaatgaggagtaatattttgaaaggaacctttcttctgagcactagagctcaacagtgggctttaaatattctctaagccatgctgtaaatagatgtgctgtcactaactagcctttgttggtccatttatagatcatatttagcataattcttaagggcactaggattttcagaatggtaaaggaatgttggctttaaagtcatcagttgtattagcccctaacaagagcatcagcctgttctttgaagctttgaagacaggcattgacttctctctagctatgaaagtcttagatggaatcttcttccaatagaaggccgtttcatatacatttaagatctgttgttttggctgggcacggtggctcacacctgtaatcccagcactttgggagaccgaggcgggcagattgctcaaggtcaggagttcaagaccagcctggccaaacatggtgaaactctgtctctactaaaaatacaaaattaacctggacatggtggcacatcctgtaatcccagttacttgggaggctgaggcagaagaatcgtttgaacccaggaggcagaggttgcaaaagatcgcaccactgtactccagccttggtgacaaagcaagactgtctcaaaaacaaaagattgttgtttagtgtagctgcctttatcaatgattttagctagatctggataacctgatgcagcttctacgttagcacctgctgcttcaccttgcacttttatgtcatgaagatagtttctttccttaaacctcaggaaccatcctctctgctagcttccagcttttcttttgcaattccctcacctctctcagcctccatagaattgaagagttagggccttgctctggattaggctttggcttaagggaatgttgtggctgtttttatcttctatccagaccaactagaactttctccatatcagcaataaggctgtttagctttattgtcttttgtgtgtttactggagtagcatttttaatttccttcaaaattttttcctttgcattcatgacttggcttttctcctttgcactcacaacttggctaactggagcaagaagcctagctttctgcctaccaacattacttcctcactaacttaatcatgtttgcttttgatttaaagtgacaggctcttcctttcatttggacacttagaggcctttgtaggattattagttggcctaatttcaaaattgtgtttccaggaatagggaggccccaggagggggagagagaagggaaagttcggtggaacagtccaaacacatacagggcttatggattaatttccccttcctttatgagcgcggttcatggtgccccaaaacaattgcaataatattaaagattactgatcacagatcacaacagcagacataataacaatgaaaaattttgaaatattgcgagagtaccaaaatgtgacacagagacacaaagcgagccaatgttgaaatacaggcagtatctgctaagcggtataaaacaatctatgcctgtacctctagaaagtacaggcatagcaaagtaaggaatagcaaatgtttggggcagctgggattaaatgagtccgagctcacacaagtgatgtgaaattgcctcgggctaggcggtctgtgtgtccccccgggtggcaactggcatgtccccagggcacggttagtcccagcgggcctggaggcgaagaccgcgtacctctccctgcccccgcgctcttggtccccgcgggctccggagcgactgggaggagctttaactctgggaaggaccagcccgatccacgggagcccgggcggcgcgcaatcagaaccaactggccccacgctcgggggcagggggcggggccgccgaggaagggccgagggcggggccgggcccgggagcctgtggcttcaggaagaggagggcaaggtgtctggctgcgcgtttggctgcaatgagctcggcctcggggctccgcagggggcacccggcaggtaggcagggggcgtcgactgggcaccgagcaggtctgcgtcttgctccggctggaggggaaacgagggttagtggaccgggcgcgcggaccggagtggggccgcgggttccttcggctttgcagggcggcctggagaagttgcactcttggattgaagcgctcagggcgggtggggacggtttcgcgcttcagtctaagaaacactcggggacctggctgccgcctcctggcggtcccgagtagcgacgccggcgccggggcgtgcccctgccgcctttgtcctccggggcgatgagcgctttcggggcgccccggctgtttaaaccttaaaaggctgtccccacgcgggcctggcgttcccccacacctggccgtttgaaatgttgggggttggatcttttgtttgctcacttcgaaaagtgaaaaggaggggttgttccgccgagtcataatgaaaacataacaggcccgcggggtgcccgggccaagaccctgggtcctcccgggcttcagctggaggcggccagttcctggcggccagcacaccccggtatctctcttcttcatccaggaaacctgctgctgtctgtcggtttgagccaaaaccacaataacttttttctgcaaagtaatcaactgctaagagcgtacgttctgtcacttattactggtaaagtttagaaacttcaagcctggccagagtgaaacaaacaaaaaggtcgaaacgcctgcagttggccggccgtggtggctcacgccttgtaatcccaacactttgggaggccgaggcgggcggatcaccagaggtcgggagttctcgaccagcctaactaacacggtgaaaccccgtctctactaaaaatacaaaaaaattagccaggcctgggcgcaagctactggggaggctgagacaagagaatcgtttgaaccctggaggtggaggttgcagtgagccgagatcgcc

SEQ ID NO: 1123 - DNA, 6000 bp, Homo sapiens
gaatggggagccactagaataaagctacattccagtatcactgctgggatgtagagatgatggtggaaaaagacttgacagagcccactgaggaaggcagccccacctctaatctcaccctgggactttaagacatgaatgagttgagggcagataggtgacttgaattaaattccaggtgacggttttacagttgttggcaccagcagatggggatcagagggcccacgtgtggagagaagggtagagggtgggggtctaggctagttgtatgttgataggggccatcgatggtagactctggatgaggcagaataggcgggaagaagggggaatggcaccaggaagcatcaggttggcccccaagagttggacctgccgtctctgagagactggctggcaataggtcctgctgcagtggagcagtgggtccagaggaggttatttttgcttttaatatgaaggtgggtccttaatcatcagaacaggaactgagaatgatggttagtgtttctgaaagaaaaaagagccatgggggaatggaatcaaccctttttcacaatttgttaggcagtttcacaaattaacttatttgaaactagcctccactctagataaggaagccaaggatcagagaaatcacataatttgtccaagtcacatccctggtatgcaggcagagtagggatttgaactcaactgtctctgtcttcagagagtgtgctttttccagatcttgcctggaagacatgatgttcctcctttccctttgtatctagcccctactttactcctcagccactctctcgtttcttctgcttcatgcaattcattctcctgccatcttttcttcttctttaacttgccataatttgcaatagatatatttattaaacaaaatcaatttttaaagtagactggttgaaaatgttataattttctaaaaaacaagattccaattcctctaaaactaaagaagagttgttttgtacttatttataaaaagcctgtaactcattttcttttctttatgtgtcattataatcaagggaaacagtagggccatgaatatatgatcaaaatattagagttgagagatgtagaaactgaaacacaaagaagctcagcgacttatttagaataaattggctagttcctgaatgatccaaataattgagagaaatagggaaaatcctgagttaacaaataaatacagtttcaaaagtgtgtttgtaaattagttctctggcatttggtatatttctctaataaaaagaaaattgatgtgacctgagtgtctcatagaaaacagctgaaactcattatttatatctaagaatagtataaaaaactccccacaattattatgtagtacttataatgaacacaacacaaagacaatacactgagaaagaaggactttaatttttaaatgtgtaagaagagaaaatttaattagaaagatgaaagacttaactggcgaatccggcagagattctaaagatgacatttggacactgataaaggccattgggggatgaatgacagacacttgtttttaagagtgtgaaagctgtccttatcaaaatggagtcaattgtgttaaaaaacgagacaaatccctgacaaatggctggggaaggccatgaagggagggttctaatacataaatgcctgataacaagaactattgaaaaatactgcaaaaaccacaactttggacaaaggccattgcaaccacacacacacacacacacacacacacacacacacacagagagagagagagagagagagagagagagagagaaaatgagaacttctgcggagacatctgcccagcaactgcctgtacaacattagactggtgccactctagttattgattactgtagccaaggataattatctcaaaaacaatgatgtaatcttccttcttccttgaaaaacctttgccttcctttacctccctgaatacgcaaaatagtttaatatggcacacatattcccattgcaatgcccattcccaaataaacatcattttcttttagaaagtctccctctctgtttgttattaggctgacaagaggtagtgaaagagatttcctgagtgcctatcatttatatcactcagtagttaagaacatcagttgttcaaaatccatcaattaaatacacaattcaaagcagaatctttatgtggcaatctctctttattctaaataagtcgctgagcttctttgtgttttagtttctacatctctcaactctaatattgtaccttccactccagccattttagacagttcaaatcacacagacacaaagagatactttccttctcttggttttgcagttcacttaaccagaccaccctttctccccttcatagtttgataaaatatcctctctcaaaagcctaatccaaatgctatgtcaaccatctgacaaaatattagctccttcctctgaaactaattgcattttgattgcattctaggcatttctttcctgatttatagtctctcattgtagtgttcatatacatgctttatctataatattaaggtgcaaactcttaggtatggcctttccacaggtgctcagtgtatagttgtcaaatacaattaaattgtatcaatttaggtttctgttcaaggcttctcagaaatggcttcatatcacctttgcaaaataagtgttcccttcatttccattccctagcctttattttctttataccacgcatcacacaggacatattagatacttgtttattgtttgtttcctccaccagaatgtatgacctatgagggcaaggcctttgtttcacttgccgtgtttaccccagcacctagatctgtgcctggtccagagtaggagttgaataaactgatattactggaagtgaaagaaatgctacctggagtatttcaagactctgagtccaataactcatcgattttgtcagtatttagctgcaggacatagagcaagtcactaacccatgatgagtctcatgtccctgtaaaatcaatgattgttaaatacaggatctctgaggtcctgtttaactccattaatgtgagagtagaaagtgagagaagcaaactgagttcaagtggatatgggtgagaaaaaagaatgctctaggcaagactacaggtcctgcttttggtgcagggcagagagaaagtagaaaagctggagcaacggagacagatgctcagaaaagggctgccttcagatatattaatacctgtaaagaaaacccgggggaggtgctgacttggggagagcctgaggctgagtagacagctgggctggtggagaggaggctcccagaggaaaggcaacccgccagtggggtgggggtgatggggttggcaagctccacaaattttgcaattttgcctcctttcccagagaacaaccactctgttgtgactttgtcagggctggaataggcatgtggttcacacgtgaaagcgaatgagaagttctatacaaagaaccacatttgctgtccatttaatttattcttcctcattctcaaagaagactagatcctcatctcttacccttaacctccacgttgagaagcactttgcccttcccattctagcatatgtctagaacactgcatctagtgtcgcaaacttgtcctcttgccccctctgccctggcaccttccctccccacaccagtaagtctgagaaggtccctgtgtcttctacttttccttttccagcatatggagacaaaagtgattatatcccggatgctaatccgccatgttgacctttaataaccccagtcccatgaatacctcctgattcctaggattttttttttaaactgtccttagcataagaacatgtcaaccttgatgctattgcccacattgtaggctatgaagcatacggcattctcacctgttccggagggctgcctttaattgtcttgcacagagcagtatactctttccttacggtatataaggccagggtctggggagtaacagtgcagaaatttatctgcttgccgccgcccaaggccacgcttctgtctaccacatcctccaatagcacccctattacctacagactggatttgtctgtctcgttctttggtttcttgactccttcgcgtttgggggctgctttgcatataaagccctttcacagaacacagcaccatgctagtacaatacgctgtagattctccctccctccccctctctctcatatactcatatattttatgttgaaccaatatgaggcattgctcaaatttaagtcatattaaagttctaggctagttttgaaaacagaaactgattggaagcagaggttttcaaatagcccacatacgctactagaaggctgtacatttaagagagggccatctaggaagcaataataggcattaaaacaacaacaaaacaacaaaacaaaacagaaacaaaaacaacttgggaaacggccctcctttcacgttttttctatcccatcgacaaaggcgcgctgtccttagctgcgatgattttgtctcgcctccaaaaagacgcccacgcactatgttgagcacccaagtgaggctacggttcctgcggtcacagagggcagggaggctcaagcacctccaaaaccccgagccctggacagctccccaggcccttcccgcggcgcgaggacaagaggtctccggggccctcgggggagcggcgcctcctcctggttccagcagctctgcggccgctccccacccaggcccgcgagaccagcgggacagtccgcgccgcgggagaccaactgggacgagccgcgacccacgcaggcgcgctgaggccggggcaggggcgggcccggctggcgcggccggcctgcggttggggccctggcgggggtgggacgggccaagccgggcagggccggggtggggccgctggcgtttccgttgcttggatcagtctaggtgcagctgccggatccttcagcgtctgcatctcggcgtcgccccgcgtaccgtcgcccggctctccgccgctctcccggggtttcggggcacttgggtcccacagtctgggtgagtggtcgcagcccggggagggggctccttctggagaggagagcgtggtcgcggggcactggattcgcgcggacgctcggccgagagctgtcccggtagctgcgagagggcgggtcggccccgtggcggggccctccgggctgtctgagcgccgccgggtccccgcggacctgcgcttggggagggcacgagttgcaaatggcgcgctaagcccgaggtttcttctcttttgcagtcctgcttcaccttcccctgacctgagtagtcgccatggcacaggtaaggccgtgcgccccccactgcgctggatttacccacaactttgtatgctgcgacgagggacttttaggatttgtctgagagccaaaaagtttaggaggaaagggaacctgctttggggacatcgcttccacttttcttgttccccctttgcttccctgcccccgtttctgtgtcccggttcttcccgctgagcgccctccggaaccagcaccgacgccgccaagctgccttcgcgcgcaacagctggtgacgtggccggatttgtgtgcgctcccttttcatgagtgaatgtgtaaaagtgggccttccccaaaatccagagagtagctcaaattagaaccggagcaagaacagctcatcgtggtcatgtgaggcgaacgcattccccccccaccccgccccccgacttcctttattttttttccgcaaagttttctgtattttaatactgtgattgagcattggctttttccagttgctcagcccagttttactaaaactgtaggacgtaggctctgattttttttttaatccaaaagattaaacacaagcgctgtttttcttaagcaatgaactcgtggaacgagttctcaattgaatttgccttgggactgtttcagaaattga

SEQ ID NO: 1124 - DNA, 6000 bp, Homo sapiens
atcctaagccaaaagaacaaagctagaggcatcacactacctgacttcaaactatactacaaggctacagtaaccaaaacagcatggtactggtaccaaagcagagatatagaccaatggaacaaaacagtgccctcagaaataatactgcatatctacaaccatctgatctttgacaaacctgacaaaaacaagcaatggggaaaggattccctatttaataaatggtgctgggaaaactggctagccatatgtagaaagctgaaattggatcccttccttacaccttgtacaaaaattaattcaagatggattacagacttaaatgttagacctaaaaccataaaaaccctagaagaaaacctaggcaataccattcaggacataggcatgggcaagaacttcatgtctagaacaccaaaagtaatggcaacaaaagccaaaattgacaaatgggtctaattaaactaaagagcttctgcacagcaaaagaaactaccatcagagtgaagaggcaacctacagaatgggagaaaatttttgcaatctgacaaaagggctaatttttgcatctgacaaagggctaatatccagaatctacaatgaactcaaacaaatttacaagaaaaaaacaaatttacaagaaaaaaacaaaatttacaagaaaaaaacaaatttacaagaaaaaaacaaacaaccccatcaaaaagtgggcaaaggataagaacagtcacttctcaaaagaagacatttatgcagccaaaagacacatgaaaaaattctcatcatcactggccatcagagaaatgcaaatcaaaaccacaatgagataccatctcacaccagttagaatggcgatcattaaaaagtcaagaaacaacaggtgctggagaggatgtggagaaataggaacacttttacactgttagtgggactgtaaactagttcaacattgtggaagtcagtatggcgattcctcagggatctagaactagaaataccatttgacccagccatcccattactgggtatatacccaaaggattataaatcatgctgctataaagacacttgcacacatatgtttattgtggtactattcacaatagcaaagacttggaaccaacccaaatgtccaacaatgatagactagattaagaaaatgtggcacatatacactatggaatactttgcagccataaaaaaggatgagttcatgtcctttgtagggacatggatgaagctggaaaccatcattctcagcaaactatcgcaaggataaaaaaccaaacaccgcatgttctcactcataggtggtaactgaacaatgagaacacatggtcacaggaaggggaacatcacgcactggggcctgttgtggggtggggggagtggggagggatagcattaggagacatacctaatgttaaatgacgatttaatgggtgcagcacaccaacatggcacatgtatacatatgtaacaaacccacacgttgtgcacatgtactctaaaacttaaagtataattaaaataaataaataaagtaaaaaagaaatcctaaggatactcaaattgttgtttaggtgaagatggatgatgccttccttgaatcatcagctaccaccgacagagtgaagtgagatggaatagtgggcacaatctcattcatcctactctatgtagcctaatgggtccagaatttattatcactattttacactggaaaaaagatgagattatgaggggtcagggaggctttgagtttttgctctaacttcaccactaattaagaatgtgatcttgggtaagccactttaacctctgtaaatgtcaaatttcttatcagtaaaatgtgactatacaagacaataaatttgaaaatactttgcaaaattgaaagtaccatggaaataattcttcaatcccaaaaggttatgaacattattaaaatttgccacatggaagagcacacaccacagagacataactgtgatcataaacagatttacaaaagtggtgtttcattatggagggccatagggctgataaagacaaatgcatcaccaagctatgtccgagctcattcagatttttacaggaaacacagagcttctagctgaattatctctggatggtgtggaaattgtccaacacgttcctaatttcaaagaaacagaactgaatcttgaaaacccaagaggcctttacagaaactgacaagagatgaattaatataggtatcaagctacagaccaaattaaagttttacaaaactttgaaagagggtcagaaagaagaaacttatgggaagcagagtcctggaaagtcagctttgatggagtgacaatatgtgcaacacagtgagcaatctcttaggtaggcagcttcagggatgggggttgccctttgaaaggacttgggccactcttgagtctaagaggctaagtcacaaacaatgctaagcaactaaaaatagcttcttgtttaatagtaaaattctgcatagtaaaaggagaagcagggggtatgacacacgtggtagttagcagtctactagtgactttactgccacaaccagaaaagccagctgatgtgtcagacgtgagaaagcgaaagtatgtcacagcgaatgtagcttttccacacgtatttcaagaaagaaatgaaaaagccaacttctataatggtgcctactgtgcattaacagagataaactaggggtctaagaactcagttttctacagggtcccagaagtatagccatatattgccccattctctaatggaaatagccagagaaatagaaatatcaagactggagaacatcaaatacctcattggaaaagcccccacataggaaaatgtgtgggcttgaattcttccattctggaagggtaaaggcctgagtgatgatgctgggattagacactgaaactctttagagaagcaaaacaagtataataaagctgtactttattatattaaataaataacacacagactaccaaatagcctgccccttataacagcgttaatgtgattttgatctgaaatgtatagagacattttgcattttttcgtataaaaagttcatgagatttggccctaatctgaccttttcttcatttttttttctacttgagggactataatctttatttttaaatttgttttatattctccgaacattacctaacgcatagaaaactcttattgaaccatttttctctgttctttgtaaaatattacatttgactgttccttagactgctttaatcattcctgcctatgcaccctcctcaaaatccagtttaaattaattgttccttattcaagattccttatatccacctcccttggggcagcaatcacctatcacccaggactacacttgtgtatgtacatatcttccctattacaaatcaggttctttgaaaaaatacaaatggtaagagagtggatttttggagtcagaacattctcttttcaaatccttcttctgccccttactggcaataagggctgagtgacctagagcaaattacttaacttctctgagcctcagttttctaatctgcaaaataggagccatcacttcacaagtctgtaagacttatattagactaagtgcctgcctgtacactgttctcttttctctctttctatatacctgaaggcattataggtgctagatgtctgtttaaagaccagacaatattgtcttaaaaaaacaaacaaaaacacagacaataccatctttaaaaaaaaaaaaaaagtccaggtaagaaataaataaggccatagaatggaagctttacaaggactctctctgagacaggatctcctcaagtgtccccaggttaaattagaagtatatatccgtacaattgttcagccagtttgtgcactgtactgaggatgaatgaacacctatcctaaatatcctagtcttctgactaaaaacaagatcatatttcataacgattattgttacattcatagtgtcccaggtgatttagaggataaataaaaatccattaaagaggtaaagacataaaaacgagaaacatggactggtttacacataacacatacaaagtctattataaaactagcatcagtatccttgaatgcaaacctttttctgagtatttaacaatcgcaccctttaaaaaatgtacaatagacattaagagacttaaacagatatataatcattttaaattaaaatagcgttaaacagtacctcaagctcaataagcattttaagtattctaatcttagtatttctctagctgacatgtaagaagcaatctatcttattgtatgcaattagctcattgtgtggataaaaaggtaaaaccattctgaaacaggaaaccaatacacttcctgttttatcaacaaatctaaacatttattcttttcatctgtttactcttgctcttgtccaccacaatatgctattcacatgttcagtgtagttttatgacaaagaaaattttctgagttacttttgtatccccacccccttaaagaaaggaggaaaaactgtttcatacagaaggcgttaattgcatgaattagagctatcacctaagtgtgggctaatgtaacaaagagggatttcacctacatccattcagtcagtctttgggggtttaaagaaattccaaagagtcatcagaagaggaaaaatgaaggtaatgttttttcagacaggtaaagtctttgaaaatatgtgtaatatgtaaaacattttgacacccccataatatttttccagaattaacagtataaattgcatctcttgttcaagagttccctatcactctctttaatcactactcacagtaacctcaactcctgccacaatgtacaggatgcaactcctgtcttgcattgcactaagtcttgcacttgtcacaaacagtgcacctacttcaagttctacaaagaaaacacagctacaactggagcatttactgctggatttacagatgattttgaatggaattaatgtaagtatatttcctttcttactaaaattattacatttagtaatctagctggagatcatttcttaataacaatgcattatactttcttagaattacaagaatcccaaactcaccaggatgctcacatttaagttttacatgcccaagaaggtaagtacaatattttatgttcaatttctgttttaataaaattcaaagtaatatgaaaatttgcacagatgggactaatagcagctcatctgaggtaaagagtaactttaatttgtttttttgaaaacccaagtttgataatgaagcctctattaaaacagttttacctatatttttaatatatatttgtgtgttggtgggggtgggaagaaaacataaaaataatattctcactttatcgataagacaattctaaacaaaaatgttcatttatggtttcatttaaaaatgtaaaactctaaaatatttgattatgtcattttagtatgtaaaataccaaaatctatttccaaggagcccacttttaaaaatcttttcttgttttaggaaaggtttctaagtgagaggcagcataacactaatagcacagagtctggggccagatatctgaagtgaaatctcagctctgccatgtcctagctttcatgatctttggcaaattacctactctgtttgtgattcagtttcatgtctacttaaatgaataactgtatatacttaatatggctttgtgagaattagtaagtaaatgtaaagcactcagaaccgtgtctggcataaggtaaataccatacaagcattagctattattagtagtattaaagataaaattttcactgagaaatacaaagtaaaattttggactttatctttttaccaatagaacttgagatttataatgctatatgacttattttccaagattaaaagcttcattaggttgtttttggattcagatagagcataagcataatcatccaagctc

SEQ ID NO: 1125 - DNA, 6000 bp, Homo sapiens
atatagaccaatggaacagaacagagccctcagaaataataccacacatctacaaccatctgatctttgacaaacctgacaaaaacaaaaaatggggaaaggattccctatttaataaatggtgctgggaaaactagctagccatatgtagaaagctgaaaccggatcccttccttacacctcatacaaaaattaattgacgatggattaaagacttaaatgttagacctaaaaccataaaaaccctagaagaaaacctaggcaataccattcaggacataggcatgggcaaggacttcatgtctaaaacaccaaaagcaatggcaaccaaaaccaaaattgacaaatgggatctaattaaactaaagagcttctgcacagcaaaagaaactaccatcagagtgaacaggcaacctacagaatgggagaaaattttcacaacctactcatctgacaaagggctaatatccagaatctacaatgaactcaaacaaatttacaagaaaaaaaacaaacaaccccatcaaaaagtgggcgaagggtatgaacagacatttctcaaaagaagacatttatgcagccaaaaaacacatgaaaaaatgctcatcatcactggccatcagagaaatgcaaatcaaaaccacaatgagataccgtctcacaccagttagaatggcgatcattaaaaagtcaggaaaccacaggtgctggagaggatgtagagaaataggaatacttttacactgttggtgggactgcaaactagttcaaccattgtggaagtcggtgtcgcgattcctcagggatctagaactagaaataccatttgactcagccatcccattactgggtatatacccaaaggattataaatcatgctgctataaagacacatgcacacatatgtttattgtggcattattcacaatggcaaagacttggaaccaacccaaatgtccaataatgatagactagattaagaaaatgtggcactgtagccttgtagtatagtttgaagtcaggtagtgtgatgcctccagctttgttcttttggcttaggattgacttggcgatgcgggctcttttttggttccatatgaactttaaagtagttttttccaattctgtgaagaaagtcattggtagcttgatggggatggcattgaatctgtaaattaccttgggcagtatggccattttcacgatattgattcttcctacccatgagcatggaatgttcttccatttgtttgtatcctcttttatttccttgagcagtggtttgtagttctccttgaagaggtccttcacatcccttgtaagttggattcctaggtattttattctctttgaagcaattgtgagtgggagttcactcatgatttggctctctgtttgtctgttgttggtgtataagaatgcttgtaaccaaaacagcatggtactggtaccaaaacagagatatagatcaatggaacagaacagagccctcagaaataacaccgcatatctacaactatctgatctttgacaaacccgagaaaaacaagcaatggggaaaggattccctatttaataaatggtgctgggaaaactggctagacatatgtagaaagccgaaactggatcccttccttacaccttataaaaaatcaagtcaagatggattaaagacttaaacgttagacctaaaaccataaaaatcctagaagaaaacctaggcattaccattcaggacataggcatgggcaagggcttcatgtctaaaacaccaaaagcaatggcaaccaaagccaaaattgacaaatgggatctaattaaactaaagagcttctgcacagcaaaagaaactaccatcagagtgaacaggcaacctacaaaatgggagaaaattttcacaacctactcatctgacaaagggctaatatccagaatctacaatgaactcaaacaaatttacaagaaaaaaacaaccccatcaaaaagtgggcgaaggacatgaacagacacttctcaaaagaagacatttatgcagccaaaaaacacatgaaaaaatgctcaccatcactggccatcagagaaatgcaaatcaaaaccacaatgagataccatctcacaccaattagaatggcaatcattaaaaagtcaggaaacaacaggtgctggagaggatgtggagaaattgggaacacttttacactgttgatgggactgtaaactagttcaaacattgtggaggtcagtgtagcgattcctcagggatctagaactagaaataccatttgacccagccatcccattactgggtatatacccaaaggacaataaatcatgctgctataaagacacatgcacatgtatgtttattgcggcattattcacaatagcaaagacttggaaccaacccaaatgtccaacaatgatagactggattaagaaaatgtggcacatatacaccatggaatactatgcagccataaaaaatcatgagttcatgtcctttgtagggacatggatgaagctggaagccatcattctcagcaaactatcgcaaggacaaaaaaccaaacaccgcatgttctcactcataggtgggaattgaacaatgagaacacatggacacaggaaggggaacatcacacaccggggacaggaagggggaagggggagggatagcattaggagatatacctaatgctaaatgacatgttaatgggtgcagcacaccaacatggcacatgtatgcatatgtaacaaacctgcacgttgtgcacatgtaccctaaaacttaaagtataataacaaaaaacagtcataccaaagaactctttccaataagcagtttctaaaatcaacagttccatggctgtttagtctgagaatccaagaaagcagagattcctcagtactactaaaaaatataaccaaatttccttcctctattgcctttggtttgtatgtaggtgtatctgataaggccacgtagatgcacacaggttgagagacctagggacctagatggagaaggtcccactttctccatgaaaccagaatcttaatcttaggatataattaacctttagctagccacaagaaagaagaaaaccaaagagaataagaaatagagatggacaatctttcctgagaaacaggatttgtttaatgtatctgccagttacatgcaagtgaattagtggaaaagggaagaggcaaaaggtatgcataagaagttttaatgtacagtgaccctgcttataataaatgcagcttaatcaatttctctggttctgacaaaacatatcagcattctcttctcttggggaaagacataaatggaagtgggcaaacaggcagcagggaaacaaggaggagagagttcctctactgcactgcctacacttagtatagcactttgaaaaggcaaaaggattacatatagaattatctcaccttctactatgtaaaagtttgtgtaataatggagatcctcctgaaatagaagttagtttacaggtcaatttgccaaatcggctgtgcactttgcctttctaaatcttttaatctataattttaaaaattacattagatgatagttataagttctctttaagatttaagattctgtgattttactattgtagtgtctatccagacttcattaccaagttcattgttggtatgggacagggatgacggcttatgcaccctgcacatggctagtgttctacaattagtccattttttaaacgctggttgagatgtgggaaagtatgtatcacttgcttcaattcaaggagttggaaggaatatacatatatacacttgcatataatatttttggaattagaaacaagaaagtaatactggttgcttctgagcaaggtgacggaggtatcaggagttttgggtggatggggaaatttgttttcagtatcagttgtcctttgtatttatattctactctcccccttgctctttctcctccagccaccccggccttcttgctcttcctccaacatttcaaaaaccctcccaattcaaggtctttgcacttgtcattctggtgcctggatcactctccctccagatactcccacagtaaactcccttacttcgttcaatgaggccaaaatgccacgttaataatgagacttccttgaccacactgtatgcaatgacttcccccacagactccccattaccccttagctaacaacccctatacccttaacatttagtagcatctgacatattaaatatttggctgtttgtttcgtgtttgactgccttttggaacactgcctgtgctaacaatcaacaaatacttgttgaattaagaaacttactgcttgaggtttttaaaaagtaatcacgaaattactttttcaacaaaaacaaccagttagggaataaacatttgataaattaacttttagacctatagtattataggataaagtccaaacttcgtttctcaacacatggactttcctcatctgccacgtattggccacagtcaagtagccggttcccttttctcgtgcataaagtggagttattcataattacttcacagaattaagattcaatgcagatgaaagcgcttttgtaactaaggcactataagttaccgtaagcacagggtttcttccgcgcttggagcctaggaatagtacaaggtgtcaacccgcgctaaggacctgaggttcaaggagggaaaagtctccagcgcagcgctaggaggcgctactccggcgcggggcggggctcctggccgccgttgccagggaaaccgtctgggcgtccctagtatctgagccctcgcgcctgggccactcagctcgacctctctccagcgttagcaataggtggagcgcgggccaatcggaagaggccggaggggcggggcgggcagtggccctgggaaggcgggtccgcggcctcgctccctgacttccgggtcgcggtgcttgaagggagtgttccgtcgtttccgttgccggctgtttgcagtggggaaaccgaggcagctcctgctccccctagttcttccgctcctgtgaggtggctgctgtttcttttcctcttgccccggatgcctcggtgcggctgcactgagagcgcgcgggctcgcgagccccgcggggttctgcgggaacccgggggcgcctgggccggcgggtctttgtgcgagccctgccctcccattcgcgggcggcgcgcgaggggggtcggcgcagagacgcccagagccctggggtgctcaggcgccgctacgcgtgcatcccctctgctcggcagttctgcgcttttgtcctaatgagcgcggactagatggcttgattttcaagataatgatcaacccagctgtgctatgcgctctttctgcactgacctgcgggtacttcgaacttcgacagtccctcctcaggccctagtccagaggtgacgtgtctgtgggaatgtttaaggcaggaaggagacgagcaattttgtttttaagtatctccctctcactagtatctccctgactttttcatttagaagctgaagaattttcttatggcataagatatagttgtatcgagtgtgtacttagcaaaacaaaaacttgttagtatttctgcccttgacctattgaatggaaaatcaagaatgagctaaggtgttatatactcagtgttcaacttgtatacttaagtttgtagtgtttttatttgctggcatcacctgactgggacagttgtaacgaattatccacatgggataagaagagtgtattctataaaaacaactctgatgttttggtatatattttaattgttgattagttggagtcctcttgatcttgaactgttgagccccagttctcaaagaatgggaagttaggaaactaagatatgaaatacaattatttagcaaaaagtgcaaaccattctgttactctttcaagccattgaatagtttgagtacattgtttgaattttagttttgaaaaag

SEQ ID NO: 1126 - DNA, 6000 bp, Homo sapiens
atgtgttgaagaccctaccagatgctttcttcccctttgagaagaagcaggaaaagaaaactttctctaaagggcaacttgactcttttcacacactgaagactttggaagctggtggcaacaacttcatttgctcctgtgaattcctctccttcactcaggagcagcaagcactggccaaagttcttatcggttggccagcaaactacctgtgtgactctccatcccacgtgtgtggccaacaggttcaggacgtctgccttttggtgtcggagtgccacagggtggcactggtgtctggcatgtgctgtgccctgttcctgctgatcctgcccatgggggttctgtgccactgtttccacagcccgtggtacatgaaaatgatgtgggcctggctctaggccaaaaggaagcacaggaaagcttgcagcagggacatctgctatgacgcatttgtttcttatagtgagcaggatgcctactgggtggagaaccttatggtccaggagctggagaacttcaatcccctcttcaagttgtgtcttcataagtgggacttcattcctggcaagtggatcattgacaatatcattgactccattgaaaagagacacaaaactgtctttgtgctttctgaaaactttgtgaagagtgagtggtgcaagaaggaactggacttctcccatttccgtctttttgatgagaacagtgatgctgccattctcattcttctggagcccattaagaagccatttgccttagtcaatctgggctgctatagcaaaaatgccaatagactgggtagtttatagataagagaaattcatttctcacagatctagaggctgggaagtccaagatcaaggtgttggcagatttggtatctggtgaggaactcttccaggctcaaagatagctgtcttctcactgtgttcttggtggtggaaggggtgagggaactctctgaagtttcttttggaagggaactaatcccattcatgaagcttctgcccccatgacctaatcactcatcaaagggcccacctccagtacctcacattgggggttaggatttcaacagatgaatttcaggaggacacaggccttcagtctatggctaggatcattccccagcatttctgttaagctgcagaagataattaacacctagacctgcctggagtggccactaatgaagctcagcgggaagggttttagttaaagaaaactcctagtttttagttcgaccattgtggaagacagtggtgattcctcaaggatctagaactagaaataccatttgacccagccatcccattactgggtatatacccaaaggattataaatcatgctactataaagacacatgcacacgtatgtttattgcggtactattcacaataacaaagacttggaaccaacccaaacgtccatcaatgatagactggattaagaaaatgtggcacatatacaccatggaatactatgcagccataaaaaaggatgagttcatgtcctttgtagggacatggatgaagctggaaaccatcattatgagcaaactatcacaaggacaaaaaaccaaacactgcatgttctcactcataggtgggaattgaacaattcccacctggacacagggtggggaacatcacacaccagggcctaacgtggggtggggggctgggggaggggtagcattaggagaaatacctaatgtgaatgacgagttaatgggtgcagcacaccaacatggcacatgtatacatatgtaactaacctgcacgttgtgcacatgtaccctagaacttaaagtataataataataaataaaacatatcaaaaaaaagaaaaatgagcttgggagtcatcatgcctcctgctcccttcccctgcccccagcccccagccccacttctggctgggacctttgaagagtgcagttccctcttccccataattcattctgtccatctactcattccaacacactttttgatctgatttctatggctcagctccaaggtgcttgcctcagtcccctggcccgcaggagcccacaaaaaaaaaaaaaaaaaaaaactcctagtttttaaaagggaaatatatacaacatgaaatattctgttttcagaacttggttctatgttaacttagaagtttactactattattttgcataggcaatatttttgaaatgtcttaaaaaattacggacatacggacatctgtgcagagtaaaaaaattttgaagaatgtatgttcatgtataaagatctgtaaaataatgcaggatttatggcatattttcattaagtggttttcggtggatgagtttcttattatttcatctgacaattacaatatactttatgtgaaaaagacatagactgtgtgttttgttttgttttttcgaaacagagtctcactcttatctcccagcctcaacacactggactcaaacgatcctccaacctcagcctcctgagtagctggggttacagctacaaaccatcatgcctggctaatttttgaatttttgtagagatgggggtctccctgttttgcccaggctggtctcaaactcctggactcaagatcctcctgtcttgggctcccaaagtgccgggattacaggtgtgaaccaccacgctggccttgtgttttcggataactttcagataacagcttaggatttcagttagatgctcaaaactatgaatatatacaatgaaagttaccctttccccaaatattagtacatttcatatgccgtgttgattttctaactttaatcaacatttttcttttttttggtagagagttataggaggtcttatatctagatacagaaggagacttggagtctaacctgggatttgccacatgttaactgtgagccatgcgactctgggcaagttccctaatcactttaaccaaaggaatagtaatatcagaattatttattgcatgtgttattgtaagattcagatgaaattctagatgtgaaggtgcttcaaaaatgtcaagaactaggccgggtgctgtggctcacacctgtaatcccagcactttgggaggcctaggctggtggatcacttggtgccaggagttcaagaccagcctggtcaacatagcaaaaccctgtctctaccaaaaatacaaaaattagccaggcgtggtggcacgcacctgtaatcccacctacttgggaggctgaggcagagaattgcttgaatctgggaggtggagactgcagtgagatgagattgcaccactgcactccagcctgggtgacaaaacgagactccatctcagaaaaaaaaaaaaaaaaaaagaaaatgtcaagaactgaacaagtataaggactgtgtctgaattggacgtgctaatagctttgtggacagtgtacaactaccttcaatatatgcagaggacactgatttgtggctaaataaatgatttctatctgactttgccagacaattctaattgactttgggattatagagcaatagcatcaaaatccaccttaggcagttcaactagggaagagaaatagagaaaaaacaagtttttagtttcaggagaaataatttgaaggaagttttcttttgtcagaaatcacaaggtagagagctggagatttggaattaataagaaagcattttcagccagctggacaacctgatggtcaggataaagaaaaatagtaagatagtgacctgtatacaaaaacctctcaatttcatatttaggtctattgattaagtttccctgatgttccaaccatcagagaggattagggatgtggaacagggtaggagaaacagccctggatttaaggtaaaattctggtttcaaatctcagttctgtcatatgttatacaattcacatgacattttcttgtgtaagggaggaacaaggatgcttgctctgcttcatatctcactttgtgaaaatcaaatgtaattatgaacataaaaggtagattattaacattaaggcagttgaattttaaaagcttgttttcttcccttatacatattcctaaccgtggagacagctaggttctgtggcaatgaagaaaattgatcaatgactgtttttggtattactttgggaagtagggatggaataggggcaagggaagggcttagcttcaaactgtagacagaagtgggaagcccaaatctttgcatggtgagaagtgggatggaatgtaggtgctagagatggtgcaccagtagggactgtcactggattggggaaaaaaatccggggctgtccttatctgctcccttaggcaaaatcgttctgtgttagtctggagggtgaacctattttaatgcaggagggcatagacttttgggtggaagcggaccctggagatgtactggcaggtgaatagagtgtggaaaagtggggaaaggagaagcacgattcatgagcctgagttcgggcttccatggatggaaaagcatcaggagtggaatttaaagacggtgtgtttcaggtgatgtgaggtcctggatgcccgaagcttcaagaaaatactggttgggcacttagctttccctgtggttgccaatcccacgcaggccgcctctagcgtctcgattcgcttttctctgacctggaacctccgccaagcccccagctctcttcttcgacccagccttgcacggggcagctgtcggggcaggacccgcctctggcctgtcgcagcctagctcacggtcaagggcgggagcctgctgggaagcacggccgcgggggctcgctcggggccacctgcctggaactcagcgcgaggtccagagttccctccggctgcgcagcggcgcacgtgccccgtggaaggggcggttcccgcaccccagaaggagggggcgcccggccgcgcggactttcccttttgcttacttcctagtcccgggcaggccggctcggaggcagcgagaaagcgcagccaggcggctgctcggcgttctctcaggtgactgctcggagttctcccaggtacgtcgtgcgctccccactcgtgtggtctctctgcaccccttcctggggtcgggtcgggcaggggcggaggggagccgcagcccggtcacgggctctggggaacccgggctcccgttcggctgcacctgggcccctagctcctgtccgggcggggatagcgggaagcgcaccaggcccccgggacgccggtgcttctttgcacggcccagcgcgggaatgtggacaccagcgaagccggctcaggtcggccctcgggagaagcaggggctacacggaaagggagcccgagggtcctgcagagcccgaggtcgggaccccgcgcgtgcagtgccaatgggctgcggctgggctgagcgcccttccaaccttgcaggccccgggggggttgccgcggagagcttccgctggggctccgggcctctggccgccacctccctcgggaggccgaggggggcggtggccccggcccggccctcccgcttccctcacggcctggccctcccgcttccctgattcccggtagggtcgctctccccgcctcctggcccctcttggctcggatgacaaagattgggtaaaggctttcaacgagctagcgtctggcagggggtgtgtcctcgctcactggttactgctaggacggagcttggattttggtcaccgtggctcagaggtgggaaaggttccgtgctctgggtctgtccaggaccctggctccctaacccaagtctgacctctgctccctggcaggcttcgccccacctctgcgttccttcattcttaggatgtgtgagttaggtctctgattagaaaacaacttacagcgtttaagcaaagtcgagtccttcaagtaagaatgctttgaagtgccctttacaacttcttcaacttctataaatatgaacttgtgtttagaacttaaatgcaagccaggaaagtctttttcctgtttgaaagagagagaaagagagag

SEQ ID NO: 1127 - DNA, 6000 bp, Homo sapiens
gaaaaccaccaaaagcagtttgcttttatctatcaggatctatagcacacattcaagctattgccttaggttcagatcaattttcttgctctttgccacaagattggcagagatttttgagtgtcttaacatgtcatagaacatcacactagtccactatattgatgatatcctgctgagtcgacctcatgaacaggaagaagcaagttccttagatactttagaaagatgcaggtgagctagtggtagagaaaaacctcactccaggtaccaagcaatatgtcattcagcatccaatcaggaaaacagaactaattccaggtattcaacagcaagaattttaacagctgatccttgaacaacattaagattagggggaccgacgtcctgcatggtagaaaacccaactgtagactccccaaagacataactattaatagcctactgttggaagtcttaccaataacataaacatcaattaacacatattttgtgtgatatatattatgtactgtattcttacaataaagtaagctagagaaaagaaaatgttattaagaaaatcataaagaagcgaaaatatattaactattcattaagtggaagtggatcgtcagaaaggtcttcatccttgtcttcacactgagtaggctgaggagacggaggaagaggagggattggtcctgctgtcttggggttggcagaggtggaagaaaatccacatattagtgggcccgtgcagttccaaatcctgtggttcaaacctgcatcggctttataaggaactggtggtgttgaagaaccgaaaaactaaaatgggaccatcaaattaacacagagctagacacttcaggaagcaattaccacccccagggaagaagttgaagttataagaacgtaagagttggaggcttaagagcctcaagacttagacttgaggatggggcgtacacagctggtgctaatacttcaggagctcacatgagctgtccgagagtaaaattgggtctcagacttccaaggagggccacttcttggtggttgctaaaacctcggagagaatatgatgaaacttgcaccaggagtgctaaacaaacaaaccaaccaaccaaccatactggagactggaaccaattgccccggccaggtgaagctttgttgccatggttacacaggggcttgaacagcaagcagagaaatagcaaatccctgctccccacctcctggccactctctcactccccatattggcagaatttaccatccacccagcaaaggagaaaatgccgcagcgttccaactccggcatcacagaactgagaacagagaagggagtgtttctaacagggatgtatttgcttaacaattggcacactgattacaggaagatttccaactctttagcaaaactgtttacaattaagccccaatctagctgggcgtggtggctcatgcctgtaattgctgcactttggaaggccaaggctggaggattgattcctcaagcccacaagttcaagacccgtctttataaaaaatttaaaaactgaccaatcattgtggtttgcacctgtagtcccagctacttgggaggctgagatgagaggctggggtgggaggttcacttgagtccaggaggtcaaggctgcagtgagccctgagcacgccaccgcactccagcctgcgcaacagcatgactctgtctcaaaaacaaaaacaaataaaccctaacctatagatctaacctacctctctagccattatcatctaaacctttggttgacaatgtctctttggttgataatgcctaaacactttctctaaccctaatgggttctgttctttcctaaaactcatttaaaaaacccctcatatttctatgcaattgctcccattagtcactctgtgtgagattgccccttcatcatccaaataaatttccaagatcacctttgaagcaatcatctatgcttactgagcactacgtgctgcacattgttttaggctctttatagatttcacttatttaatctctacagctctgtggtgtatcctatttatttccatattttacaaatacaaatgttaaataacttgcccaaagtcatatagctaataaaaggtagtgtgaacccagaaactctgagacaggtctcagttaatttagaaagtttattttgccaaggttgaggatgagcacccgtgacacagccttaggaggtcctgacatgtgcccaaggtggtcagggcagtttggttttatacattttagggagacatgagacttcagtcgacatgtggaagatgaacattgatttggtctggaaaaggtgggacaactagaagcaaaggcaggacaactcaagcagggagggggcttccaggtcataggtagatgggagacaaatggttgcattctgttgagtttctgatgagcctttccagagtaggcaatcaggtatgcatttagctcagtgagctaagcggtgactttgaatagaataggaggcaggtttgccctaagcagttcccactttgacttttccctttagcttagtgatttgggggaggtggggggggtcccaagatttaatttcctttcacagtagaaatggctattcaaagctttcatcttaaaaatcagcttaaaataccaccttctaagatccaaattaatggtcatctcttttgagaggacttcttacactctcccaggccaaagtatttgcttcctttctggtgctaacatatttttaccatggcagagcttttcagtgtatgtaatcttttcactgatatttctatctctgaatctcttataaatgatctgccgcacagagctgtccaatcgaaattcctgtagtgatggaacagtgctgtgtctgtcctacccaacatggcagccactagctacatatggctattgagcaggtaaaatgtagccagtggaactgagtttatttaaatttaagtttaaatagccacatgtggctagtggctaccatattggatggtaaagatctagcacatactccaggatagttcctcagaaaaggtttacagaatgaatgaatcattcattaaaacttttttagcctaacagaaaacacttacatagcttcagttttggttttcttttttaaccacatacagaatacactggtttactttattaataagcatgtatatgaataaacattaaaaatattacatagtatcattatcaagatctatcccatattttaccatgtgtatgtatccacagggcctgtcacctggctctctgcagcctcaagttcctgagctcaagcaatcctcccacctcagcatctggagtacttgagagtacaggtgtgcaccaccacacccagctattttgtttgtttgtttgttttgtagcgaaagtctctccaccttgtgttgcccaggctggtcttgaactcctgagctcaaacgatcctcccgcctccaccacccaaagtgctgggattacaggcatgacccactgtgccctgccaagcaaaaaaaaacaaaaaacaaaaaacaaaaaacaaaaaactgtggctgtaaaaatttttaatggattttaataattaagcttacatatttataattgcctatgccaactttgcagttgttttcattgtgttcagatagatcccaagtgactagatgaatgcgtggcacataatatggactcaatacatatttgttgaattaatgaaggaattatgcctactaggagattttaattaagtgtgaaaatctaacctacacatcgttttcaaatattaatgtttacaaatacttaatgcaataattaaggaaatagttatgttaaattttgtggacattcatttccatttcaaagatttttttcccccatctcttccaattcccaaacaaaaactgtccttggcctctggagtcttctcacaccactcctcaaactagacgactgaaaataggcctttggctgggcagaaaccaacaatatttaaaatacaaaacttatgaacgatgacataagaaaaaaaaagctctaaataggttaacagtgaggccaactaaatctgagactgaaagcgctccccagaccgcagccacaccactgggaccccagctttgcctccctcgatacccggccccgcggtccaaaatctgagtaaagcggaagtacgggcggctgctgcggcgcttgcgcaggcgctgaggtctcgccccataagactccgccccgccccacgagaccgcgccgccagcaataaggcccagccccgccttctgctgttgccgcagcaacccagaaagcgtcatggctgccgccggccaggaaaaagggtatttgacacagactgcggcagccctagacaagtcaccgtcactttcgccacagctagcagctcccatccgagggaggcctaagaagtgtctggtctatccgcatgcgccgaagagctcccgcttgtctcgttccgttctgcgttggcttcagggtctggatctcagcttcttccccaggaacatcaacaggtgcttgagtaagccagtcctaggcccccccggtgggcgccccgcctgctttccgccgcctgccaggcctcagattgcctaccctggcctggcttatgtttcaaatcaagacccccccacccacgtacacacacgaaaacactattagggaacaaggctttaacaaaataccacgatacatcttgtttattcaattaatcaaccaatcattaaattgtggacaatatagaatgctttggtgactacaaaaatattaaaatagtcaaagctttttctttagtgatattgggcattaatactggtaaggacggccgggcacagttgctcatgcctgtaatcccagcattttgggagccgaggcaggcggatcacctgaggtcaggagttgagtaacagcctgaccaacacggtgaaaccccgtctctactaaaaaatacaaaaaattagcccagtgtggtggcgggtgcctgtaatcccagctactggggaggctgcaggcaggagaatgcttgaacccgggaggcggaggttgctgtgagtcgagattatgccgctgcactccagcctaggtggcagggtaagactctgtctcaaaaaaaaaaaaaaaaaaaaaaaaaaaaaatactggtaaggatcagtttaccctttgtcggagatggcatctagtttgagagttaccaacaagtttttaaagttgctgcttaattgtaggcactttgtatgtaactggcagctaatatttgctctgggaatgcaaactaaattctataaaaaggcaatgaatcttttgcagaactctggtttaaagtagtctctccttatcagagaggcataggttccaagatccccagtggatggcaactgtggatactacagaaccctctgtcagaacacatttctgtttatgtcttccatccacaaatttaatgcctttttaaaaatcttaactaagcacttatcacacactgtggctgaaagtttttcagtttgaggtgtgatgccgaaactatcaagaatttctttttcttcatatttcaggaatatgattcattcctaccattgtaaccattcttacaactttctattaagtcaagaactttcatcttttcacctaaaggaataattttatggtttctctctggcatatctgaatcaccagcatcactgctcttgcactttgcacacaagcgcaccacactgtacagttgatctgatgactaaaaggtgactgatgtctacaacgtggagactctggacaaagggaggactcacatcctaggcaacacagagcaggcagggaggtttcatcagactgcccagaacagagtacaatttaaaagttacaaattatttcttgaattttccatttaatattttccgactgtgattgacccaaggtaactgaaactgcagaaagcaaaactgcagataagcgggggactagtttactaatttgtcttcagtatt

SEQ ID NO: 1128 - DNA, 6000 bp, Homo sapiens
ttgcagcccattataaaagactgggcttccctaaggttgggattcctcagctgtgatgtaaacccatggtgtgtgaggcttccacctcagcctcttcacgtcatcccgagacacctgtgggcaagaagtactagcatgaacagagctcacgctgcttcctatgctgtgagctgtaaagtctgtttggcttatgcaggttagaggaatcctaatgaatgagtgtggattactgtagacttaattaactccaattacagctgcttttccattggaagtgtctttttttttattttttattttttatttttattttttagatggagtctcactctatcacccagactggagtgcagtggcatgatcttggctcactgcaacctccaccttccaggttcaagcaattctcctgcctcagccttccgagtagctgggaccacaggtgcatgccaccacacttggataatttttgtatttttagtagagaagggggtttcaccatgttggccaggctggtctcaaactcctgacctcaaatgatccacccgcctcggcctcccaaagggctaaattataggtgtgagccacctcacctggcctgaagtgtctttactggaatgaatttctacagtccccagcaaatgttattctgctgttaatctggaatgtactttttcctctccataacagtctgcgaaaaccaccaaaagcagtttgcttttatctatcaggatctatagcacacattcaagctattgccttaggttcagatcaattttcttgctctttgccacaagattggcagagatttttgagtgtcttaacatgtcatagaacatcacactagtccactatattgatgatatcctgctgagtcgacctcatgaacaggaagaagcaagttccttagatactttagaaagatgcaggtgagctagtggtagagaaaaacctcactccaggtaccaagcaatatgtcattcagcatccaatcaggaaaacagaactaattccaggtattcaacagcaagaattttaacagctgatccttgaacaacattaagattagggggaccgacgtcctgcatggtagaaaacccaactgtagactccccaaagacataactattaatagcctactgttggaagtcttaccaataacataaacatcaattaacacatattttgtgtgatatatattatgtactgtattcttacaataaagtaagctagagaaaagaaaatgttattaagaaaatcataaagaagcgaaaatatattaactattcattaagtggaagtggatcgtcagaaaggtcttcatccttgtcttcacactgagtaggctgaggagacggaggaagaggagggattggtcctgctgtcttggggttggcagaggtggaagaaaatccacatattagtgggcccgtgcagttccaaatcctgtggttcaaacctgcatcggctttataaggaactggtggtgttgaagaaccgaaaaactaaaatgggaccatcaaattaacacagagctagacacttcaggaagcaattaccacccccagggaagaagttgaagttataagaacgtaagagttggaggcttaagagcctcaagacttagacttgaggatggggcgtacacagctggtgctaatacttcaggagctcacatgagctgtccgagagtaaaattgggtctcagacttccaaggagggccacttcttggtggttgctaaaacctcggagagaatatgatgaaacttgcaccaggagtgctaaacaaacaaaccaaccaaccaaccatactggagactggaaccaattgccccggccaggtgaagctttgttgccatggttacacaggggcttgaacagcaagcagagaaatagcaaatccctgctccccacctcctggccactctctcactccccatattggcagaatttaccatccacccagcaaaggagaaaatgccgcagcgttccaactccggcatcacagaactgagaacagagaagggagtgtttctaacagggatgtatttgcttaacaattggcacactgattacaggaagatttccaactctttagcaaaactgtttacaattaagccccaatctagctgggcgtggtggctcatgcctgtaattgctgcactttggaaggccaaggctggaggattgattcctcaagcccacaagttcaagacccgtctttataaaaaatttaaaaactgaccaatcattgtggtttgcacctgtagtcccagctacttgggaggctgagatgagaggctggggtgggaggttcacttgagtccaggaggtcaaggctgcagtgagccctgagcacgccaccgcactccagcctgcgcaacagcatgactctgtctcaaaaacaaaaacaaataaaccctaacctatagatctaacctacctctctagccattatcatctaaacctttggttgacaatgtctctttggttgataatgcctaaacactttctctaaccctaatgggttctgttctttcctaaaactcatttaaaaaacccctcatatttctatgcaattgctcccattagtcactctgtgtgagattgccccttcatcatccaaataaatttccaagatcacctttgaagcaatcatctatgcttactgagcactacgtgctgcacattgttttaggctctttatagatttcacttatttaatctctacagctctgtggtgtatcctatttatttccatattttacaaatacaaatgttaaataacttgcccaaagtcatatagctaataaaaggtagtgtgaacccagaaactctgagacaggtctcagttaatttagaaagtttattttgccaaggttgaggatgagcacccgtgacacagccttaggaggtcctgacatgtgcccaaggtggtcagggcagtttggttttatacattttagggagacatgagacttcagtcgacatgtggaagatgaacattgatttggtctggaaaaggtgggacaactagaagcaaaggcaggacaactcaagcagggagggggcttccaggtcataggtagatgggagacaaatggttgcattctgttgagtttctgatgagcctttccagagtaggcaatcaggtatgcatttagctcagtgagctaagcggtgactttgaatagaataggaggcaggtttgccctaagcagttcccactttgacttttccctttagcttagtgatttgggggaggtggggggggtcccaagatttaatttcctttcacagtagaaatggctattcaaagctttcatcttaaaaatcagcttaaaataccaccttctaagatccaaattaatggtcatctcttttgagaggacttcttacactctcccaggccaaagtatttgcttcctttctggtgctaacatatttttaccatggcagagcttttcagtgtatgtaatcttttcactgatatttctatctctgaatctcttataaatgatctgccgcacagagctgtccaatcgaaattcctgtagtgatggaacagtgctgtgtctgtcctacccaacatggcagccactagctacatatggctattgagcaggtaaaatgtagccagtggaactgagtttatttaaatttaagtttaaatagccacatgtggctagtggctaccatattggatggtaaagatctagcacatactccaggatagttcctcagaaaaggtttacagaatgaatgaatcattcattaaaacttttttagcctaacagaaaacacttacatagcttcagttttggttttcttttttaaccacatacagaatacactggtttactttattaataagcatgtatatgaataaacattaaaaatattacatagtatcattatcaagatctatcccatattttaccatgtgtatgtatccacagggcctgtcacctggctctctgcagcctcaagttcctgagctcaagcaatcctcccacctcagcatctggagtacttgagagtacaggtgtgcaccaccacacccagctattttgtttgtttgtttgttttgtagcgaaagtctctccaccttgtgttgcccaggctggtcttgaactcctgagctcaaacgatcctcccgcctccaccacccaaagtgctgggattacaggcatgacccactgtgccctgccaagcaaaaaaaaacaaaaaacaaaaaacaaaaaacaaaaaactgtggctgtaaaaatttttaatggattttaataattaagcttacatatttataattgcctatgccaactttgcagttgttttcattgtgttcagatagatcccaagtgactagatgaatgcgtggcacataatatggactcaatacatatttgttgaattaatgaaggaattatgcctactaggagattttaattaagtgtgaaaatctaacctacacatcgttttcaaatattaatgtttacaaatacttaatgcaataattaaggaaatagttatgttaaattttgtggacattcatttccatttcaaagatttttttcccccatctcttccaattcccaaacaaaaactgtccttggcctctggagtcttctcacaccactcctcaaactagacgactgaaaataggcctttggctgggcagaaaccaacaatatttaaaatacaaaacttatgaacgatgacataagaaaaaaaaagctctaaataggttaacagtgaggccaactaaatctgagactgaaagcgctccccagaccgcagccacaccactgggaccccagctttgcctccctcgatacccggccccgcggtccaaaatctgagtaaagcggaagtacgggcggctgctgcggcgcttgcgcaggcgctgaggtctcgccccataagactccgccccgccccacgagaccgcgccgccagcaataaggcccagccccgccttctgctgttgccgcagcaacccagaaagcgtcatggctgccgccggccaggaaaaagggtatttgacacagactgcggcagccctagacaagtcaccgtcactttcgccacagctagcagctcccatccgagggaggcctaagaagtgtctggtctatccgcatgcgccgaagagctcccgcttgtctcgttccgttctgcgttggcttcagggtctggatctcagcttcttccccaggaacatcaacaggtgcttgagtaagccagtcctaggcccccccggtgggcgccccgcctgctttccgccgcctgccaggcctcagattgcctaccctggcctggcttatgtttcaaatcaagacccccccacccacgtacacacacgaaaacactattagggaacaaggctttaacaaaataccacgatacatcttgtttattcaattaatcaaccaatcattaaattgtggacaatatagaatgctttggtgactacaaaaatattaaaatagtcaaagctttttctttagtgatattgggcattaatactggtaaggacggccgggcacagttgctcatgcctgtaatcccagcattttgggagccgaggcaggcggatcacctgaggtcaggagttgagtaacagcctgaccaacacggtgaaaccccgtctctactaaaaaatacaaaaaattagcccagtgtggtggcgggtgcctgtaatcccagctactggggaggctgcaggcaggagaatgcttgaacccgggaggcggaggttgctgtgagtcgagattatgccgctgcactccagcctaggtggcagggtaagactctgtctcaaaaaaaaaaaaaaaaaaaaaaaaaaaaaatactggtaaggatcagtttaccctttgtcggagatggcatctagtttgagagttaccaacaagtttttaaagttgctgcttaattgtaggcactttgtatgtaactggcagctaatatttgctctgggaatgcaaactaaattctataaaaag

SEQ ID NO: 1129 - DNA, 6000 bp, Homo sapiens
gctagattctgagtattcagttactttgatctgcttcacgtgcagctaaaaatctgctatacttagataaacctaattgagaaactgactttctatcatgaagtttattaacttttaacaaagtccattgattattagtgaagaaaataaatacagaatgcaatcacatctgaatctagctagtatctaccaataactgactacaaatgactatgtggatattcgtacttcgtgacactgaaattttatcatgaaaaattgtttgattttgtaaaagtcttggtaggaccacgggagtatgtcatacaggaacatcatggagtcacaatgaaaaaacagcttaagactcactgaactggggaaaccatgagcatcaacagaagaagaaagagaagttcagtatatgtcatgcccccttcatatctgcacagcttgaaaattttaacagctgggttgagcatcagaagacaactggggcttggtgtagtccagcaggagggttgaattacaaaaagcaaaggaaatggagaacagtaaggcatctggcattctggtttgggactatcacattcctcatccctcccctctgggggaatatgtcaccatattagaaatgcttttcattcccggtggtgaaagagtgttgtctttcttttacataattgtgtatcaaagctcctttccactcagggactgtaactatttttggtaagtttccaagttccgaaggaaaacttttattgtattttaaaagattgggctccgcccggtgcagtggcttgcacctgtaatcccagcactttgggaggcccaggcgggtggaccacaaggtcaggagttcgagaccagcctggccaacatggtgaaaccccatctctactaaaaaacaaaataaaagattgggctcaaagagtttctattatttaattcttaacattgcacagaatgtttgtttaaccatgtttgattatttaagcatggttgatactgatctttcaaccaaagggggtcaagctagaaaaaaggctatgttagttcttttcgagtaactatagtgggagaagaggcagcagggatggaaggggagagatgacgcagacctaagtagccccagcttccctgcgtttatgcccagccttgcccagctgtgacacttgatggtctggattccaggagcagctgaaggagggggcacatgcttcctatttaccagtttctggggggacctgaagccagcctggccatggttcttcctagcctagttctctcagtttctttctttctcacctacctaccttccttccttccttcttctttccctccttccttcccttctttccttccttccttcccttcttccttccttccttcctccctccctcttctttcccttctttccttccttccttcccttcttccttccttccttcctccctccctcttctttcccttctttccttccttccttcccttcttccttccttcctttctcccttccctccttcctccctccctcccttctttcccttctttccttccttcctccctccttttcttttttctttttttctcatcactggtcaattcctattccccaactccaaattctccctctaccctgagattagattcatcagtattttgcattttctgccaatactctagttctatgatttggtaatatcctggtatttgacaatattttcttaatataatcccttttctagcctcttggaatgcattcgtactatttctcccactgctaaagtatttattataaagtatgtgatcaaaaagcatttacaaaaatattattatataagttcactttctggatgaataacaccttaagaaattaagtataagtgactggattttccttttttctcccacttcagtcactttgcctttctatgcttgagcagaagtaactcatatttaaatttccccaaatcctctttaaggagtaagaaaacacacagcgatatattgtgctttttttttttccagttcctcctttctatcctccccacaggatctcccatccaaacagcataactctgccagcccaatcacccttaaaaccattttcatcacttttcacagggataatgattcatagcaacattcaactcacacaggtaaactaacgtcacgaagtctaaactcccctccagaatctggccctaaatcatttacctatttcatttcttactcttccaccatctcaccaaatgaattgataatgacctctgctttctcctgagccactccagaaacctccccccgcacccagcacacatttctcttacctggaatgccccacgttgcttttcccgaattcttccccttccaggcccagatcaagttctgtcacctctgggatacctctgtaaagagaaattactggcttcagccagaagacactgcctccagcctactgtttggctataattaaaatgtttggctgggcacggtggctcacgcctgtaatcccagcacttgggaggccgaggtgggtggatcacctgaagtcaggagttcgagaccagcctggccaacatggtgaaaccccatctctactaaaaatacaaaaattagctgggcctagtggtaggcacctgtaatcccagccacttgggaggctgaggcaggagaatcatgtgaacccgggaggcggaggttgcagtgagccgagattgcaccactgcactccagcctgggcaacaagggtgaaactccgtctcaaaaaaaaaagttcacagactaagtaaattagtatgatttacaggaaaccagaaaactgctgctaatgcttgctaatttggcaagaaagtttagcacaggaaggggtttgggcatcacaataggataaggactagttcaaccacactagtcccctctttgcaaattactgctctgcagagccactgttaaggttgggagtgggtcctatttctcagttttattgaggcagaaaaaggactgtcaaacattggtgttcactcaattcaggagggataaagaaaggcctaagtcttatttgtgggatctgagtttaactcctgtgactgtctttttagcaacagcaaactacttaaccccttttttttcttttttttgagacagagtcttgctctgttgcccaggctagagtgcagtggcgcaatctcagctcactgcaacctctgcctcccgggttcaagcgattctcctgcctcagcctctcaagtagctgggattacaggtgcccaccactgcacccggctaattttttttgtatttttagtaaagacagggtttcaccatcttgaccaggctggtctcgaactcctgacctcgtgatccacctgcctcggcctcccaaagtcctgggattacaggcatgagccaccgcgccgggacttaacctctttaaactcggccttaacctctttaaaccttatcctctttaaattggaattcctatcccgagggattgttgaaaggctgaaacaaacaaatgtattatgaaaatgtaaaagcatgcaataaactcagcaaggggtaaccatatataaaactaagtatatttctgtgcagaatatagtccctatagtcgaataggcgcaagtgttagaaacaggctctgccatggggtccctgaatctgacttctgaatgtcaagaactttttgaaatctgatgcagaatgtcgtgctcacatgtgttggtgaattcttctgcgaaaatgattcacagtttgcttcagggtctgaaatgagttcacgacccaaaataggaaggggatcggtagggcagtgtatatagcacaccattgacgtaaccattaataactccatcttaggagaagaccccatttttacatttcataaggcatttgccaacaagcatactatactttaataaacaaataaaaaaatagtccgcatccagccaggtaaggacacaaacaagcactctcttccattaccagttctcaccacaggactctgtgactataaaagatggggccttcggcagctcccaacagccggcttaattgacgccgtctttgcagaaggacctctcggcccaaaccaggcttcttttcctcttcttcactccctctggattggttcgttaatctctttgccccatctctttttcctcatgatgttaaatgctactttgttgtgggatgcttaacttgtaacatttatatgtggattaagtacactactatgatgcgtgagcggcttgagcctgtgtgtcaggctctgactacccagtgaccagcaagtgctgagaactgcctccttgggaactccacgcagctcgtggcttttgtgatcgaaagagcgtccacagcagcctgacatggtggaaaacacagcatgcgtggacctggttatttctagcctggcaccctgatgacaggaggttaaggcttttgatttagggagagagacctgagggtaacccaaagaaaggcctcaggtcatcgcagaggagacagaaattaccggtgggcgtcccggcctgctcctcttcttcccagagctcaaactgggcagcaggcctggctttgtctcccttctaggtacccgttgggcctggcgcggtttccaagtctccctcaatttccctccagaatcccgcgctgggagcggaagcccgcggactctcaggaagacctagatttcaaatccggggcgggggagccgggccgagcctcagggcgggaccaaagcgggaggactggcgcgggacgcgagggcgggaccagggcgtgaggacgcggggcgcgggggcggggcgcgctgcggtgggcgggcgcctcctggggcccagcctggggctgggttctcgggcgggcgggagctaggggacgggccgcagcggaggcggcgcgaggggccgacaggggcgggcgggaggcggggctggcgctggagcacatctcccggcggcgggccgcggaagcagtgcagacgcggctcctagcggatgggtgctattgtgaggcggttgtagaaggtatgaggaggctgtgcggtgactgccgccctcgctccgggccgtcagccctgcccccgctccctgcgttctcccaggccctgcgcccgcccgggtacctgcccggtctggaaggcggagtgtttgttttgccacctcgcccgggcgggggcgagcagtgaagcccgcggagcgagagacttggcccggaggcgggagcctgggccggggccggggaagccaggcagcgggttaaggcttttgatttagggagagggacctgggggtaacctaaggaaaggcctcaggtcatcggaggggagacctggcccgggggcgggaggctgggctgggaccggggaggccgggcagcgcgaggccgggccggggaggccaggcagcgggaggcctggccaggggaaccgagcccggggccgggaggtcgggcacggggcaccgagctccgagggcgggagacctggcggccggccgagtgccggaaggccgggtcaggcggcggaaggcagcggcaagctgggaaacggacggcgctaccgccggcggaggagtggccccgggaagcggtgctgcgagggctggggcggccgggtgctgactgtgagatactcgccctgggggctgatccttccaattttggacgaggcttccgtctctgctgccttccatgcctggggcctggattatcccgggttgacaatgtggtttagctcttccagagagatagttgcagggtttaaactccaattccttttcggccctgcagagtttcgtgagtgctcgcagctcatacctgtggctgtgtatccgtggccacagctggttggcgtcgccttgaaatcccaggccgtgaggagttagcgagccctgctcacactcggcgctctggttttcggtgggtgtgccctgcacctgcctcttcccccattctcagtaagtggcacccaagcaggaaaccggaaaacatcgttcgcagccccctctc

SEQ ID NO: 1130 - DNA, 6000 bp, Homo sapiens
gaaaacatttatgtgccagtctctaaaactggcaatcctaatttaaattttaaatctctaaaattcttaatcagctcattaggctgttgctggttcctgtcctacagggaaactctgaggtaagaaataaaatctggtctctgccctaagggtttttaaatctcaaagtgagacctaaaaaacaactgttagtttctgaatcatgtccatgaatgtaaatgcttttaagaaacatttactagtaaagatttaccaaaacagtagccaaaggatgtggcgtgagagctgtgtgcaaagcgctgcgtgatgactgtccctcttaatgctggctcatacaggctaggtactgaactcaaagtacaagcgtattttcgtgagtcctcccaatgacactctgaggcataaggatccccactgcagagttcaggtgactgaggctaagagaagttaatgaactttaaagtcgcacagccaagattcaaactaggatcttcccaactcaagagggcagactcccactattctgtagacagcttagtactatataggaatgataacacttaacttcagggaaggaaacaaaaatccataatctcagaagctttaaataagacaaagaaaataaataacatgatagaaagttactgcagagataacaaaataacataatgcactgaattctaatgaatgaaaaaatggcaaaaatgactatggcatttctgatgcgactaggtagtttacttttgtgttttctttccttttttaaaaaaatttaacaaacttcgcatgtggcattcaatttacttctaaagtgaaataggccagacacagtggctcgcgcctgtaatcccagcactttgggaggccaaggtgggaggaatggttgagatcatgtgttcaagaccagtctgggcaacacagagagaccccatctctataacaaagtaaaaacaagtagcctggcatggtggcacacacctgtagtcccagctactcaggaggctgaggcaagaggattacttgagcataggaattggaggctgcagtgagctatgatcgcaccactgcacttgagcttgggtgacacagcaaggctgtttctaaaaataataataataaaagtaaaataactggtttcatgttcagcgttaggtatatgtcattaaaacatattccctgtatctctgtgttcctccaaaggaaaagtgaagcctgtccagcaggacttctggggagattacacttctgtcaaacaacttgaaaaatatcaggattatatttattacctgtcagagaggacaaagtctcaaaagcagtcacgtttccagatttagcaaatgaaacagaaagaacatctgtttcacaatagtttggacaagaaaagacttcagttgtgatgtaccagaggttttatcaaaatcttttcccatctggtctctgaattcatttgagtacgtataagaattatcaaactggcgattgtaactgggcctggtgaagtcaatcttttaatatttgttatgtaattaaggtaaaaatatgagaacaggaatgtaaaatcaaatacagaatacattgaaataagttccattgtactatacaaacaaaccatcctttcctttcctctggcaagggccacgtgaccaggaagacagtacagagcactctccactattcaaagcctctgagtttatgacacaagttagaaagaagggcacttagtatgtgcaaacgatctgtcttccctgtgccaggtgaagtcctaagatggtgtttttggaaggacaaaaggagaaaatgggaaagccttcacagatctaaatgatttgtatgatataagtgtaaaatggaggatctcggatgcctttttataaaaattacagatgactttaaagcctcagcactcccaccaaggatgactactttgcagaatcagattcaagtttaaaaccgcttgaagaaatcctgctgtcaggaagactgaaactgccaaaactcagattcagtagcatttattcatttgatatttgcaccataacaatttactgaacaccaactgtgtgcagagtactatactagaccctgagtgtatcaagcagtggaagagacaaaccctatctctattcagggcttataccgatgctcactggtattcaaaagtggctcaacaaggcagatgccagaccgtgtccaatacatatcaggtagcttgatttcattattgtaatgcaaagaagctctacaggcaacatgtgaaggtaagaacaaaacatgcagagaaagaatattatataaatctaagaattctcccatctttgtttaggcccaaacaccagtgcttcttatctttggggcagagcttaaagatctaatagtaggcaccagaagcaatgtaatatatcattcatcaaaataaagactgctttgtagggggatgaagcagtaggagattgtgttaaacgaggtttgaaaacaaaacagtaaagaagcattataattgcctatatcagatgccagtctcttcaaatggcaagaggcaaggcctttattcaggatagcaaaagcaaatctgatttaactaggtacaatgtctaatgtctcttactttgaacaggttttattgccatactccaataaactgttcatccattcactaaaataattttcactttcaaaaaccttcttttgcaaaaaggcaaagcaaaaccaaagtccaagcatcgggctgtgatagagatgatttaagctttatatttcatttttagagattatgtaaccacagcacgcacattcacagtggctgagcccattttgatacagtctggtctaaccaccttgcctggccctctttcagctatcttgcaggtttacatcgtttcagtgactccgtatgtcacctctaccatttcttttctaattattatttgctgaataatcctaaaccaggtctactttttctagatagggcataaaagtaaaaatacaatggatgggcattcactgtgttatgccaggccccgcatttggggcaagacactaaggataccaagataaaccaagtccgtccctcctggagtttgcttgcaaatctagcagggaagatagtaaacaagcaactgcaaaggatatgacacatctctcttagggaatgctggctgcagaaagaacacagcataggaagatttaaccttaaactgtttaatgaaaacagaaatttaagtagcagctcttctaatcaaatgtgatggcgggagaaagggagtgcagaggtgttgcaggcagacactaggtatgaaggtcagcattgccgtgcagaaatcgaaccggtgctaaagataaggaggggtgggggcactcaggacccaacacacgcaggggtttgttagccatattaagtgctgggtttaacctaagggcaaaggacgagctttctagactttcatttcataaagatccctctgcctgtgctgtaaaaagtggactgcaaaggagcaggcgggtctggaagtggagagaccagggaagaggctgctgtggtcagacggctgaaatcagagatagagagacgcggacagatctggcagacatttacaaggtcgacaaggcttggcgactaagcaggaaaagaagtgggtgggcgagagggggctgcgaacgatgttttccggtttcctgcttgggtgccacttactgagaatgggggaagaggcaggtgcagggcacacccaccgaaaaccagagcgccgagtgtgagcagggctcgctaactcctcacggcctgggatttcaaggcgacgccaaccagctgtggccacggatacacagccacaggtatgagctgcgagcactcacgaaactctgcagggccgaaaaggaattggagtttaaaccctgcaactatctctctggaagagctaaaccacattgtcaacccgggataatccaggccccaggcatggaaggcagcagagacggaagcctcgtccaaaattggaaggatcagcccccagggcgagtatctcacagtcagcacccggccgccccagccctcgcagcaccgcttcccggggccactcctccgccggcggtagcgccgtccgtttcccagcttgccgctgccttccgccgcctgacccggccttccggcactcggccggccgccaggtctcccgccctcggagctcggtgccccgtgcccgacctcccggccccgggctcggttcccctggccaggcctcccgctgcctggcctccccggcccggcctcgcgctgcccggcctccccggtcccagcccagcctcccgcccccgggccaggtctcccctccgatgacctgaggcctttccttaggttacccccaggtccctctccctaaatcaaaagccttaacccgctgcctggcttccccggccccggcccaggctcccgcctccgggccaagtctctcgctccgcgggcttcactgctcgcccccgcccgggcgaggtggcaaaacaaacactccgccttccagaccgggcaggtacccgggcgggcgcagggcctgggagaacgcagggagcgggggcagggctgacggcccggagcgagggcggcagtcaccgcacagcctcctcataccttctacaaccgcctcacaatagcacccatccgctaggagccgcgtctgcactgcttccgcggcccgccgccgggagatgtgctccagcgccagccccgcctcccgcccgcccctgtcggcccctcgcgccgcctccgctgcggcccgtcccctagctcccgcccgcccgagaacccagccccaggctgggccccaggaggcgcccgcccaccgcagcgcgccccgcccccgcgccccgcgtcctcacgccctggtcccgccctcgcgtcccgcgccagtcctcccgctttggtcccgccctgaggctcggcccggctcccccgccccggatttgaaatctaggtcttcctgagagtccgcgggcttccgctcccagcgcgggattctggagggaaattgagggagacttggaaaccgcgccaggcccaacgggtacctagaagggagacaaagccaggcctgctgcccagtttgagctctgggaagaagaggagcaggccgggacgcccaccggtaatttctgtctcctctgcgatgacctgaggcctttctttgggttaccctcaggtctctctccctaaatcaaaagccttaacctcctgtcatcagggtgccaggctagaaataaccaggtccacgcatgctgtgttttccaccatgtcaggctgctgtggacgctctttcgatcacaaaagccacgagctgcgtggagttcccaaggaggcagttctcagcacttgctggtcactgggtagtcagagcctgacacacaggctcaagccgctcacgcatcatagtagtgtacttaatccacatataaatgttacaagttaagcatcccacaacaaagtagcatttaacatcatgaggaaaaagagatggggcaaagagattaacgaaccaatccagagggagtgaagaagaggaaaagaagcctggtttgggccgagaggtccttctgcaaagacggcgtcaattaagccggctgttgggagctgccgaaggccccatcttttatagtcacagagtcctgtggtgagaactggtaatggaagagagtgcttgtttgtgtccttacctggctggatgcggactatttttttatttgtttattaaagtatagtatgcttgttggcaaatgccttatgaaatgtaaaaatggggtcttctcctaagatggagttattaatggttacgtcaatggtgtgctatatacactgccctaccgatccccttcctattttgggtcgtgaactcatttcagaccctgaagcaaactgtgaatcattttcgcagaagaattcaccaacacatgtgagcacgacattctgcatcagatttcaaaaagttcttgacattcagaagtcagattcaggga

SEQ ID NO: 1131 - DNA, 6000 bp, Homo sapiens
aattcctaacacggatcaaaggtgagctgtgtctaagacagtcagacctgcaccgtcccgtgcagtagacaccgtggccgctgtgtctgagatattcagaccctcgccgtcccgtgcagtagacacggtggccgctgtctgtaagatattcagaccctcgccgtcccgtgcagtagacacggtggccgctgtgtctaaaatattcagtcccgtgcagtagacacggtggccgctgtgtctaagatattcagacctgcaccatcctgagcagtagccacagtggcaagtagcctctgcactggacagtgcagctacagaatgatgctatcactagaaagttccatcagccagcactgatgcagacctttgcaaatgcccctcacactgaatagcacctagctgatagattgtccactactcagtgaaaagcctgtgttaaaagcagtatttggtagaaaagcaaaaaaggggaaaaaattaaaagtggtaagtcattgtcttccttactgaattctagcagaagaatgttggaaggaagatgggagtcacgggagaaagtatcattgtcccaggacaggagggggtgccaggcatggttggctctgtccctggaattctatggcgggaatctggaaaaaggaaaagtgactggagaagaaaagattctgtgtgcaaatgtcatgatgcagccatcagtcatcctgagaaaataagcgaacaaagtggcttcagatggatgctgttggatacatgtacagatacaatgtacacttgcatatgcttgttcacacaaaggacaggatggttatctgttcatttaacaaatacttgttgagggcctatatgtgccaaagacatcagatgcataagagggtgcactatggaaagcctcaggaacacaagtgcccagaaacatttagaaaaattctaatgaaaacagaaaaggcattttcaaattagctgagagaaacgagaccaaaggaaagactgacccagtatttggatacattatgtgatgaaccttaatgcagggaggaaagtgttatctttcagttaatttctcaacttctggagagcttagaacagacctggctaggaggaaattgaatctgaggcagatgaggagatagtggtgccttgatgcttccagtgattgggtcagcagaaccaggggtgggagatgatctctctttttgttggcagatggtggtctctgctgtagctttgtcccctggtgacgggactcaggcagcaacccccatcattggcaatacccccacctctgagaatgtggagaggacttgtgaagacaatgttgtcccaagcagcacagcccaggtactgacaggattcagagctagaggtttcttagaggtcagggttgtagaagcagcagggactgcagctgcatagtttgtgtatgtaacaggctagtatctcttgttctagactcatccatttgtacattcatatgagtatgcacgcagggtgttttttctttctttttttttttttgagacggagtctcactctgttgcccaggctggagtgcctggtgcaatctcggctcactgcaagctccgcctcccgggttcacgccattctcctgcctcagcctcccaagtagctgggattacaggcacctgccaccacgtctggctaattttttgtatttttagtagagacgaggtttcaccatgttagccaggatggtcttgatccacccgcctcagcctcccaaagtgctggaattacagctgtgagccaccgcgcctggccagggtgttttttctttaaaccttaatttcatagtaattaacctccctttcaagagtcagccttgctgcccctgagatgatgcagaaaaagcacaaaaggatctgggcttgaatctcctcttactgcctgcttggctttaggcaagttaccttctctgaactctagttttctcttcagtaaaatgtggatatggtgccttggcatggggaggattaaacaaagccacatatttaaatattataagggtggattatatttaaatattaaaagggtggattctagctggttgcattcattaagtgtgtcctctcttgaatgaaggcattttctacccctagaactaaagggaaagcatgacggagcactcctgggtgccatgggtgatgatggctgtggtactccaggttggagactcggccaacagttggtagagcccaactaactgttgggagtggaggctgaggcctgctgcagtcactgagatgctcccccttttaaaaaattttaaaatagcccaagctagtcttgaagttctggcctcaagtgatcctcccacctcagcctcccaaagtactgggattatagacatgagccactgcgtctagcactgagctgtttcttgctgaggtttccctgtaagaacttccaaattgggtcacaaaatcatagttgttagtattttcagagttctggagaacaaaacaggagccagtgatgggagggagaataaagatggacttcagaaactacagctcaaagagctgtggaagattctagaaaggattcttcaacaagtgatatgaatactttgtcaatgaaaaggctgaacctctgtgaaatacttgaagagatttattctgagccaaatagagtggccacgcccatgacacagacctcaggaggtggctggggtgcaacttggttttatgcattttagagggtcgtgagacatcaatcaaatctattcaagatatacattggttcagtccagaaaggcaggacaactcaaagtgggggcttctgggttataggtagatttaaaaatgttctgattggcaattagttgagagttattaccaatagaaaggaatgtctgggttataagaggttgtggagaccaaagttttatcagcagaagaagccttggggtagcaggcttcagagagaatagatggtgtttctcattagacttaaggtctgtgttggctttccctgaattccaaaagggaggagggcatagtcagccatgtcccacccgcccccacttcatgtcgtggcctgaacggttttcaggttaatttggagtgccctggcccagagaaggggtccattcagatggggtggggccttagaattttacttttggtttacaactttatgaagagaccattagaaaccacttgaattcacatcatgaaaaaaaatccacactgtaaaaaaggtttgtagattaacacattaggtgaatgccaaagccacagaatatctaaatttctctgaggaatttgaaaactctcaggtatatgccttgtggacaagagagacagaaaaatgggacagaggatgagatagtttggagaatggatagctgatcagatctgtagctgtgcccagagtgctgaataatggatttgcgtccacagggaagaaagtctcaggtgccactgataaaagaccacgtccttggctctgggtccattcaacatcttggtagacaactgagtgaaaattcagagacaaccctaggaagtatgaggatgaaaaaagttagcattcatggaatgaggcactgaagaaactgaaaagctgaaataaccccatgaaataatgagaataattgtagtattctgaaccggggcacaggacacaggaccggggtggaaggcggcacgagactacgcgcgtgggaaagacccagggatcacagtggcccaaagctgggcacttcccaattccgggatttgtgctacaggcactccaggctccaccttagaactgtgtccagcacgaaggcagtgctgtcttgcgggaggcagggctgcaccaccaccggggtgtgaaggggcccagcaggcaggggtgtgaaggggcccagcagtgtttccagctgcacggggtcaggggccgcgctgatgcagagcacgggggcgcaggttaaacctaaaggagggaagcttttgggggcggaacagacaaccgagaatgctgcacactgcctttcccacccgaattgtgttttgacttttttttttttttttttttgagacagagttttgcacttgttgcccaggcctggagtgcaatggcccgatctcggatcactgcaacctcctcctcccggtttcaagcaattctcctgcctcagcctcccgagtagctgggattacaggtgtgcaccatcacgcccggttagttttgtatttttagtagatacggggtgtctcccaattggccaaggctggtctcgaactcccgacttcaggtaatccactggccttggcctcccaaagtgctgggattacaggcgtgagccaccgcgcccggcctgcttttgctttcttttttttttttttttttttggcagagtctcgctgtccacccctgtagtgcagtgagctcggctccctgcggccttgacctcccgggctcaggcaatcctcccgcctcagcccacggagtagatgggaccacaggagcccaccacgcccgactactttttgtaatttttgtagggatggggtctatccatgctgcccaggctggtccgaactgctgggctcaagagctccgcccgcctccgcctcccaaagggcagggatcacaggtgtgagctaccgcgccccgcccagagtttccgactgttagcaaatcacattcacctcaaaactatttatacaagaactgaaaggcaaactaagtccgtgctccatcacttcctgtcccaggtcgcggggccggacattttctccaagcgctttcctggcacagcgcgcaggcggcctgcgccaaagctctggcttcctccaggcgcccagaccccgccctccccgcaggcgccagggcgttgcctggcaacttagctgcgaggggattggctgcgcgggaccccgtgaccatcccggagaccacgcatttcctgcgcccccggaagtggtgataatgccaggccctgcccccggcagaggcggaagcggagtcggcctgagaggtctctcgtcgctgcaggcgcctcagcccagccgcgtgccttggcccatggccgcctactcttaccgccccggccctggggccggccctgggcctgctgcaggcgcggcgctgccggaccagagcttcctgtggaacgttttccagaggtgcggcctggcaccgcccgggcacctcccgcctccgccgcggcggccccgacccctgtcccgactcccccgaccaaccccgttccctgccggttctactgcggcctcctccgtcccctgtcgggtcccccgcggccccctcccgtcccctgccgccgcccccgacccctgccccagccgacgcggccgcccccgtcccctggcgggtcccccgcggtctcccccgtccgctgcccggtctcctggggccgcccctgcctcctgcccggtccctgtcctgtgcgtcgggcccttcccaagatgcagagtgcgccactgcagacccgaggtcgcggccaccggctcctgggctaggccctttttctcgcctcaagagccgccaggtggagggtctccagggtgcttgtttggggaaagcggaaacagactgcctgggcgctgttaaaatgtcagcagccaaggaagaagcagcgacctggcgtctgctcgggccaggtgacctttatggcggcgccttctgtccctggtcgcttttccaccgaatgtccgaaactgtagtgactgatggccagggaatggcttagttatctgagggaatcttgtcttgtctgtgaaaaagggaaacgggtgcaaatgggaattcagacaggccaggagaggaaggaagggaaggattgaggtgaagatgattgtcctcttaggggaagaccacactggacgtcggctcctggggcacttccttgattccgctgtactcctcagcgggacgggagaggcggaggttccaggagggagccttccagagtcggtgcagggttgacagaagacgtttgttttgcttttcctgaactttcgatcgccagct

SEQ ID NO: 1132 - DNA, 6000 bp, Homo sapiens
gcagaccccaccgcccgtgctccaccaggagcctgacattgttctctgagatcagggggctgtctctgtgtactgcccaggactgtggcatttttgtgcataaaaaaaaaaaaaaactgtgtgtctaacacagacggggtatgaggagagccactggtctctcctgaccttaaaaatatttttttagttcatttttagtgagtatggaaattactgaaggtacaaatcactctgaagataggttcttgtgtgcgaaggtcatcagtgaatcttcattctcagagttgataaatggttgtgagcgctcaagggtatcagattcaacgatgagtctgaggatagtacagctttcctattcagtttcaaggaaaatcatataaagcccagaccgtaatttgtcaggaatgtttgaagtgtggtgtgatggatgtcttcaccgtgctttaggatgattactgagggagaacggaaggaaggggtctggtacttgcacctttcagtagaattagtgtgaatgccacagcgaccaagctatgttcaggtgtctgcaggcagtggtggccttgatgatggattttctgaaatgggaattcgtgaagtcctctaacaaaactaagtgcgaacttctcaacttagctggtgactgcatccttgaaaaattctgtgtgtaaaatgatacagaaccatttcttggttatctgttaaataagagtgcatgtccagccgcgatgactgtggacggccttggaggtctgggaggccacgaaggactcccacacacagcagggtgtgaacccaccaggcagtgctttggccccctcccaggagtcatggcagccgacacgtcacctggagtgtctagaaaaccactaccttagagcccccactgcttttcctggtgcctccaggtatagatcacaaactcagtgtcccagaaagattttccttttactttaactcctgttgttgtttgttttcaggcacgtggactccctttaatccagtgactgtcaggtcgatcatatgtaagtatcggcagacggaccaacctgggctgctttgtatccgacccgcttgggtacccgcttgtgtttcctttgtctgtgggtccgtatcactttgctcccttctggaattccacttagatgagcgtcggccctttcatccctctccctccgtctctgtaccttttcacatctctccgtgtatgtttgctctattcttgattctgtttatttttaatgtacggtgtaacctgtcctttcagtttctaattctaaagatgacatatatttaaaatttctaaattattagttactttcacatcttatctgggtgtttttgatagacattgcttatttatttttgtgattccattctttattcaaatatttcatatgatagtcttcagttttaagaacatgcttttttgaaaagcgctagatatttgtgacatggagctccttgactgtgtttgaagtccttgggagggtggtctacagccagatatttttcctgctcaagcccacacagagtgaccaacttccttgatgcttctgtaatttttgtttgttttgtgggttcatgtgtagccttaatgtgagggtctgcatcatttctttgggtccagggtctccccagctgtataggcagctgggtttttgtttgtttcttttaagagacagggtgtccctgtgctgcccaggcctggtctggaattcctgggctcacgcaatcctcctgcctcagcctcccaaaaagtggggattacaggtgtgcacccccatgcccagacggtagccggggtgtgagctgaggctccaggcgcaggcaggtgttcaggagagtcgtgctgtgtctccatcccccgtagccaggtgggagctgcagctccaggggcaggcaggcctgggaggcaggtgttcaggagagtcatgtttccatccctacccgacttgatttctggaaggttccctttgctgggaggtgcagcccccttcagacctctttaatatggaatcccaggttcagttctgcctcacagggaccatggcattgtgtctcgaggtttcccagagcggcctggggctcattccctcgcctcccatccatgcacgtgttttagtcttgtgaggattccctgagttccttgcggagcctgtgtgtggtgaggtgtctgagtcctagtgtgggtgtagctgggggcttttccagatgactgtgccctgctggtcgtgcatatgttgctacgtcacactgatggagggagagaaaacttggaagtgtagtagtggcagggctcagcctttagtgctagaaaaggtgttgatacatggggagctacctccccaccggagaggaatggcctgggagccactcctctgcggagcccttaccctggggtgcagctcacccagcatccttccctgctggtgtgtggtgcgcagtgggtcctgcacgcaacagcatcgtccacacacactgcacacatcgtggaatggtcgtatgaaaaacagcccctggtccacacaccacacacgtcgtggaacggtgcacgtcgtggaacggttgtgtgaaaaacagccactggttgcacacagggttgtggactgttgggaagaaacatcgatgctgtttctcacatgatttttcatcctgtggattttcatttaattgtaacatatttctgatcaaaccaggagtagtcttattgcagtcctgtattaacctctgttcttgaaaagagaccacgtgatttatcattttctctgcagcagtaattcacactgaatttttctatgttttttagccatattgcaactacatataaaggtagttatagattcttttgtatttggacctggagttagactgaaagcaaataggacataggcgagggtctgtttctaattaaagcaggttttcctgacagggctgttccaagactccaccagtgctgtgggccctggagagtcagagggtcagctctgggaattagattcgcgttctaggccgagacccaggagccaggggagctggggccacttaccttccccgtgcctcggaagctgagtgtgaagctctgctcttctttctgtcgtggctgcggctggatttcctcacacatcccattgcacggcctgcctcacagctgcaagtgcaccttctcctgggacttagggggtcagggctgggggacaatcccccacacccccacccagggcgaaggtgacaagactttaagggatttcaccccattcacagacaggcatgcattgcccagtccctggttagtggtcagcagtggggccccgccaggctctgagggctgaggtctggtgggaagcctcaagtgagtttgctgcaactgatcttttgctgcttgaccgttcctctctgtctcagccatgtttgaccgtgagaacaaggccggcgtgaacttcagcgagttcacgggtgtgtggaagtacatcacggactggcagaacgtcttccgcacgtacgaccgggacaactccgggatgatcgataagaacgagctgaagcaggccctctcaggtttcggtaactcactcactctggcttgtgtagcgtgtttcattttggaaccttggagccgttgaagttctttaaaccttgttggacttaactgattgtctaaccaggctacgtaaagtttttgttgacgtcatgcaggttcatatttgatattgctcatgtcggaaggcgatcctcgacatggatacgtttattcaggtttttatccaaaatgagataagggctatgcaagccgttcatcttttctgaagtggaatgatgtcgtgagcaaaactgagaatgtggcttttgaaatcatttaaaagtggatccatgaaaataccgtggggcagggcagcttatatttcatgatagatcaaagcacgttgaaaaggcaacagtcacctaagaaacagctgtcagtcaccaggtccaaaccgtgcgcctcagaaggggcgttaggcagaacgcgtgcccattctcaggtgtgctcggcgtgtgtgtgctcggcgtgtgtgtgctcggcgtgtgtgtgcacacgtgtgccgtgcgcctcagaaggggcgttaggcagaacgcgtgcccattctcaggtgtgctcggcgtgtgtgtgctcggcgtgtgtgtgcacacgtgtgccgtgcgcctcagaaggggcgttaggcagaacgcgtgcccattctcaggtgcgctcagcgtgtgtgtgcttgacgcgtgtgcacacacacatgtgacggtgtgccgtgggtctaggagtgttcacagtgcctgtccagagtgcgtccatagggcctgtccacggggcttcccgtgctgctctcagggctgagaggaagcaggggttttatttacagaggaacaacgggcatgtttggggccagcctgaggctgttggtggctgcaccgagattctaatccatgcggatctcatctggcccctgttgtgaagccgcttccgtgatttgcttaaaaggctccttagaaacagtgaggaaaattcgattctacttgagtacctccgagatccctggagtctcacttatctaagcacgtcgcctctcctcgtgtttcctcccagcatgcactttgtggctgcctttctttctcttttctttctcaccttacgagcttgtccacagggccgggggtggacactgggtctcctcaagaagcagttctgagctgaccagctgcgagccaggatttgggctggatggctctgaattggtacttggaatgcagctgaccttgctgtgcccttgggtgggggaactggagggaacgctggccggctcctcttccctggggcaggtacggaagggctgggagggaaggatgccaccctccacagagagtggtcctgggggccagggaggccagtgctgccgattgcggccagggccacgtggacttcaggaccggcctgaagttatttttagataagcgacctctggcgccacggacatcttttcctaaccttgtcaggccctggagctccctttgtccatgccagtgaccatcggtcctcagaatgtgcagtggaagttgctgtggacagtgctccctggtctctgaggccctcttcgtcctggtctggccaaggacttcccagaaaactgtgcttagctgtggcgggaggcacggccggtcacgcagccttcctcccgccctggagtgggcaggcctgcttgtgttgtgcagcggcagaacccttcctgacttccaggtttttcctggggtgcggcatcccatcgcagcattttctctggttaccctcacgagtttcctcctgcgtttggttcttgatctccagggccatctcccacgtcttccttggaaaggggcattgtcatcctttttgtattttgatgattttgaaagatttcccatagtaactgttaggaagttggcctcagaagcaaaaattcttcttttgtcttggcccctgtgaacaagtgttctgctctcagatgaagcagggaggctgcactggagcttggtggccagcaggagggaatcaccagggtggtgaagcctgcgagatttctccccgggtgtctctgatggggccacatggtggatttcataatccaccgattcgtttttttaagcctttattgttaacatcaactgtgtgccatgctcagagacctgaagtgaaaaggtgaggaaggcgtgctcacattccagcactcaccacccggcaccgggacagctgactcagcacgtgccgtttaggttgctgtaaacagccggtgagattctcccctctggtgggcagtgcgtgtctgacaaaggcagtcgggcggagaacagttcctccgctgtggtcctttgccactgtaccaggcccccaagagctggggggagccccagggagcctcagcctgttgagtgggggcagctggtttgtcctccgaggtggaagaggtgatttctgaggaggtcatgctccgcttggct

SEQ ID NO: 1133 - DNA, 6000 bp, Homo sapiens
ctcacaagaacaaaagccgctgaaaattccagagcagaagttcttcagcagagggtgaggagggcggtggggccgctgcaccacacgcttggaggaccagcaggggtagagcgctggacaaacgcatgtcaggccggcctgctggcaaaggaacccctggatgcagagagcctgttgggctggtgggctgtggctgttgggagggacatttccccggggagctcccagccatcagaagtcaagggagggaggcggtgaggagcctctcgaagcagaaggtgtggaggggggactcccctgctctcctggccggagtcactgatacaaaactgggggtccctggagggcagtgagctcacgagttgtggtggattccttgtggagggggtgccaacccgcagggaagcagggctgccgtgccccctgcccagccacactgccagcacagaccccatcctcaggcgcctgcagggaggccacccacgccttcctgggtgagggaagcccctgagctaaacctcactgcactctgaggccccaagggccaggcagctgcacacagcctgggccacgtgggggcagtgcggctgcaccacggagctctcgggagctgctgactgaccgggaggacctgcccgacacagccatgggatttatagccgcagagagaagactacagagagacgggccttcgccctttcagctctcccttgtcaggcaggctgtgccctgtgacccttcagagcctgggtttgggggtggagggggtggacagctgaccaggtgcctggcgcaggcccagtgtggtgaggctgggtcgcggaggccaggccaggccagcggccacgaccacccaccagggaccctcagcgtcacgaccccggtcccaagacccaagacagcaggacatgggggcacagccatctctgggggcctctccttccccccgctctgggtcctcagtcatcagtgcagacatggaggtgcaggtgcacgccgtacaccctcacctggggcccctggcccatgcctccccaccctccctaccctgatctccccccacaaccctacacctccccggacaaccctgcacctcccccaacagccaccctgcacctccccgccacaaccctgcacctcccccaacaacccttcaactcccctctcaccttgcacctgcccctcaccctgcacctccccccatcctgtacctccccccttcaccctccacctactcccaaccctgcatctccccccaaccctgcacctccccacatccttcacctccctcctcacctggcacctccccccatcctttccctcccccaatccttcacctcccccctcccttcatctcccccctcaccctccacctcccccccgcaccctgcacctcccacccttaccctgcacctctccccatcttttacctccctcccaccctgcatctccccccaaccctgcacctccccccatcctttatttccccccaccctgcatctccccccaaccctgcacctccccccatcctttacctccccccaccctgcatctccccccaaccctgcacctcccccaatccttcacctcccccctcaccctccacctccccccctcaccctgcggcaagcagagagctgactccagcacagtgaacttggaatgatggaatgcaccctggaagcagctctgacgggcgccaccgtgactgtgcccagcagggagctcccttgtggtttttaacaaaagacaaaattccccaggtccttctctgtgctacaggagaaactggtgtgggagagggaacccaggcgtgaccagggagaaactggtgtgggagagagagggaacccaggcgtgaccagggctgcccaagcggctccctgtgaggcatcaacgctggagacacagcagtcatggggaacccggggaacccgggaaacccagccgccatcagagagccagagagccgcaggcgcctgtgcggggtcctggcctggcccgaggggtcagcacacccctgtctgcctctgaggtcagggccctgggggctcctgacctggcctgcctgtgggaggcaaaggtgtggccaggagaggacaggagggggcagtcacagtcaccactcctggaggcccatgaagagcagctttgcccccacacttctgtgaagccaacttgggcctgtttgggaggggcctggcgctgcagccggccgtgggcacctgccatgtggcggtccactggaggccaagtccagctcatatggctctggggacccaccgcaccagactccagtgtgggggtacccggagctgggggtgggtcctcggaggcttccagtcctgccccagctgccatccctgccaggtgttagcgcctctggttcagagtcccgagaggaccagtggcccaggagaaaggggtgtgtctccagctgctgggagtgtgggtgggagccagagggttcaatgacactggggacagcaagtccggactggagggaggagacctcctgaacagggtccccagcacagaggcagaaaggagactctgtgactgggggtgtcagctgcatctggaccttcgtggtggggagggaggcacgcccaatagcccgtctgaacgggaggtggctcagggatcccccattgtgctggtggggtgcccagagactccaggactccacgtggggctctgcctgctaaaccctgagactttaggggcagtggctcccacggcagggtcatcctttttctgcacagtcccactggctgccccaggtcctgcagagacctgagactttggggacaagcacaggggacaggtgggcgtggatggcctgtgccggtcaagggcagtgggaaggaaggaggagcagtttccttctgtacccaggaaatagagtaacaaagtgtctcattccagttggttctggtgggacagggtaggtggaagggaacccgtgcttgccctgagacatgggggtgctgtcttcccatgcagggggactgcggctcaccaccatcacattctacccacaggttcttattttaacagatcacaaaggtactatgtgcttcttgcaaaaatttacaggaattgtagacttttcaaaaagtaaaaagaaattaaagttcacctgttacctcagagttatccagctacacattttctgtgcataattcactttacaaaaattggatcaagataaaactaatgatttttaaaaatacagcaatatagttgcacattgttccatatcaaaaaataaatgtgtgcacccagggctcctggctgtctcagtggcatagtggctcatgcctgtaatcccaacactttggcaagccgaggtgggtggatcacctgaggtcaggagttcgagaccagcctggccaagatggcaaaaccactatctacttaaaaaaaaaaaaaaattagccaggtgtggtggcgcgcgactgtaatcccagctacttgggaggctgaggcacgagaatcgcttgagccctggaggcagaggctgcagtgaactgagatcgcaccactgctctcaggcctgggtgacaaagcaagactctgtcccaaaaaagcccatttactcagctcacatttttgagcctctgctattcgacaggaaccagaggtgagcagagccgacttggtgacccctggggacagagcggcagaactcagcaattctgggctgccctgcaggagctacacccggggaggggcggtggccacttgggggcagggtgggcttctcagctgcgcccaccccaccttgggagctgtgtctggaaaagagacttttcctgagccgacagcagacagcgagtgcaaaggccccaaggcccgcacgccttattcagagaacagcaggaggcgcggggcgggttgggggcgtcagggagacggggtttgactgagaacctgggggcgccagtgacagcctcggccgcgttgctgaaaaccgaccttgcgggatgaagagggcgcggttcccccggctgggatgaggaccgcggatgctgaggagcggactccagggaccaccgactccatggccggccccagcgagggcgagaacgggtggaagccggccagggtctgtggagacgtcagggtgcgaggccaggctgaggtgtccccagggatcccctgagggtacagggaattcagccagggcctgcgcgcccggacggaggactagagggggccaaggaccaccgggagggggaaggagaaggcgcagcccgaggtcggaggggccggcgggcgcgcagagggcgcggggtgagccctaaggacctgcaggcaggaccctgctctcggccgcgcggtcccgggtgccgaccggcggggtgggcggggcaggggcacccagggccgcacacctgccgcgtgggaccctgaaatgcccaggacgaagaacgtcgcacggacgaccctgccgtgcctggcgcgcgtccgcttcctgggaagctcaggatccaaaagcatcttaatattctctataattcgccaaaaaccatgactccttttacattttcgaaacgacctcatggggcaggcgagggggcacacgctctcctcactttacctgttcgggtctacaccgcccggctctagggccggcagctcagcacagccggccgcgagcgctggggaggggacgggggcgcagggagaaccgggggaccctgggcgcacacagaccccagggggaacgcagggcctggaggggctcagcgcgcgacccccgcctcggggcacggagactccgggggatcactgggacgcgaagggcgcagggcggaccccaggggaaccggatggcgtctccggttcgccagggcagctggggcagccggacccgagacagccggacccgcgggcgccctctgccgcctcccggccctggatgctgcggggcggggcgggcggctcgcgtgccggggtggggcagtccctggagccgccgcgggttcccgggatgcgagcgccggcacccgccgccacagctcctggccagggcgcgctgccccgcgggtgtgcctgagcctccgcgccccgcaggccctgggtaagtgtcctgggcgcccccgcaggcccccgccgcgtgccgcccgcggtggagacgggatgcgctcccgggtgtggggctgagggacgggcgccggcgtcgggaccctcctcacgccgcatcctcgcgtcgccaggcccggcggccccgggacggggcggacactctggggtgcggctggctggtctcacttaaaactcggacctcggagggaagccgcggcgcgtccacggttcgtggtcctcagcgtcccctcgagagtgttctgagccttcactccccgggcgttccgtgcgggccgcgctccctggggctgggcgggtgcgggcggcggagcggggccccgctgtcgggccgagggcgccaggtccggggggcctcacccccgggaaaggcccatgttcaggcttggtttcagtagcacccagtagcgctgaagtcttattttgagcggccagaattcccagaccggatgccctgagagagcgatgtggcgcctggagtccacgctgggaccccttctggggaggggtcgccatgggcgcgtgacaggcaggggccaccctctgacctcttctgcgaggccggaggtcagagaccttgtgcagaagcgtcccacgggcctgtcccacgggcctgtccggctgtggcctccgggatggcaagggcaggcggggaggggcttcctccctgggcctcctgtgcgcgcgcacaggctctcgtctgcggggttcttgcagaagggtgggcgtgtgcgcgcgttctccaaacgccacccccacggggcctcacagccgccccggcctggcaaccgtcacccattttacgaacgaggacatcaaggtaggtcgctcatccagcctctcagagcaagtgactggcggcgtttggactcgggccgagtgtgccat

SEQ ID NO: 1134 - DNA, 6000 bp, Homo sapiens
ctagtccgcctctaagttcaatctcctgcccctgagcccaaggccagtctccctgtgaactgcaaggaccacgtgactgccgggcccattgcagtgagcttgttttctgcaccgtggctgtgtctgcacactggatgcctccttgggatggcctctcccccagcatccacgtgaaggtgcagctcgtcagcacgcctgggctggccctggtggaggacgcagggggacatggctgtgtgcagggagagggaacaccgtgcagtggacatggctgccaaggggtgtccaggccactgccctgttgggaacgcagtgcagggtggagacacagctctgctgtcccagcagcgaccttgatggctctgagcctcatttcctgtgcccacacaatggccagcagcggtgtttgcctgccaggctgtggccagaccacggggccactgagcaggggagtgctgggaaaagccctggtgcccggcacggcgtctcctaccacagagtgacatcgctctaggcggctgctgttgacaccacgtgaccacaggctttgctgagtgtgccctggtatctgtggttggggcactgtcatctcctgatgcgccctgtgagaggggacctgaagtgacgcctggtgggtccctcgttcccacagatggcatcagcgtctgggtggccacccggcatcctcttcatctccatcttctgtgctcagatcccatggagctgccgtgggatgcttcctttacacgtgtggagagtagtggagtgggtccgttgggtccgtaggcgtttgctggggtttggtgcatccttcactgtggggtgccgtgaacgggggagcactcacagtacaggacatgggcggacatgacggtgtggctcgatgactttgtcaacttaaacagagcagcttcggcttggtctttttgtgcagggcccatgtctagagaaggtggcttggtccatatgtgcaggtcccgagtctagagaaggcggcttggtctttatgtgcagggcccgagtctagagaaggccgcttggtctgtatgtgcagggcccgagtctagagaaggcggcttggtctttatgtgcagggcccatgtctagagaaggtggcttggtctgtatgtgcagggcccgagtctagagaaggccgcttggtccgtatgtgcagggcccgagtttagagaaggcggggtctgtatgtgcagggcctgagtctggagaaggccgcttggtgtgtatgtgcagggcccatgtctagagaaggtggcttggtctgtatgtgcagggcccgagtctagagaaggcggcttggtctgtatgtgcagggcctgagtctggagaaggcggcttggtccatatgtgcaggtcccgagtctagagaaggccgcttggtctgtatgtgcagggcctgagtttagagaaggcggcttggtccgtatgtgcagggcccgagtttagagaaggtggcttggtctgtatgtgcagggcctgagtctggagaaggtggcttggtctgtatgtgcagggcccgagtctagagaaggccgcttggtctgccttctgcatgctcagaatcactgtcaactctagttactgcatcttgagctgccctgagttctccagatgcacccagagccgctgcctttagccatggctcgatggtctcaccccagggtttggctttggggactggggcaggtgctgtgcagagcagctttgattccaggtcagaacttgctaattggactttttgttttcttggcacttggtcatttttccccaagcatgagaagttaaaaaaaaaaagttttgccttgattatgaggaaattggttccaaatgccattaaatcaggcattgcctctagtttatgcaaaatatctcatgaaaaaattagagcagctttgtgcttgtgtgagcttattgtgcaaaatgctttacaaaaagtcaggaaccaattattcccagtcacagcatgagtgcatgatttcagtgtcttcaagctcagcatgcttagtgatgaataaacggctttaggcgtatattttagttgccattgacatttgttgattcaataagttgttcgttctctcaaagattagagctcgtcgatcagagcagttagaatcccacaggcatggttagcagatgtgtgcaagcttttgcacaaaaaggtaaaaatgttagctgctagagtgagcagcatattgaaattggaaatgattttattctaaactccctaagtggtagtgtaaaactaaagtaaagactgtctttagttgacgaaaggagggtttgtttttgtacggtttggataattttaacatcatgctctccccctcccatttctcccaccatgtctcttgatgtcactttgtaggaattagactttaaaagattaagaaagacttagggcagacatgccacactgatgattaaaacacagaactttgttccctcaacccaaacaggacttacatctcaccctgtcttcagatttgcctcagttggagaagtctttccagctctcctgcaccctcctccacatgtgccatctggcctcggttcagcagcagaccctttctcgcctgttgattcccttttgttacctgactgcggggttggagatgatggatgaggcactcggggaggcctgcggctgctcagggagggcacttggggtgggggtcaccttccaggggtctacaaagctcagggttgcctgtggaaactcatgcgagggccattttggtgtaggtcagcagggcgggactgcagctgctctggcgcaggaggcggcagactccatgctgaagaactggagagagagagctccagaagatgcagggcctcatgatctggcgcagcaccagctactgtgaggacagccgggtgcccatgcagcaggtgcacccaggcctccagcactgccatgtgcctctggcgcaagcgcaggtcttggtgactggtgagttggagaagtcccaggaccgcctgactgggggcaccaggcattacagtgacaaagccagattccctagatgcggggagtgagggctccaggtgaagcagcagctgctggccatgtgaccatgggtgcagatgaccttgtatgcctcatcctgaccgtgaccacaaagctgaaggagtctctctcttctattgggaaataagtctttgcctgtggtcgttggggctgagggcaagaatctattttttaaaaggaatgggattttttttttttttttgagacagtcttgctctgttgtccaggctggagtgcagtggcacaatctcggctcactgcaacctctgcctcctgggttcaagcaagtctcctgcctcagcctcctgagtagctgagattacaggtgtgtgccaccaagcctggctaaattttgtatttttagaagagacggggcttcaccatgttgaagccaggctgatctcaaactcccaacctcaagtgatctgcccgccttggcctcctaaagtgctgggattacaggcgtgaaccactgtgcccggctgagagttttagtcttttaagcaacatttataaatgaagaaattagggatggcagcaagtgtaaggggaatgttgcttgcctctggatgctggttcctctgcgtttcacttctaaaaaactggccctaaaacgtgtcaagagctcgcacaggagtgtttggagccatatttcccattgtcctggcaaagccggggccctccatggtgcccggctcttactgcacagggaccaacaggccggcccataagagctgatggggttggtatttctgtttgttgccaacccctgtttaccggaagtgtccccacaccattttccataagctgtgaaacaaatgtcataaggtctctaatttagaagggggaagacccaggtttctgggtctttgtttccttggttttgtgttatgtgtgccagggtgtaaagtggattttaagatgtggaattgggaggtagagtggtttagaataagaactccgaaaggttccttgtggatccccttttctggccatcgggatgtggatgtgcatttgttaaacttctcacacgctgcatccttcagcctggagaccctttggaaacacgaggtgacgccacggtagttattcagctaagcttccctctgacgggccctgaggctgccgccatagagcggcagaaccgtgcagttcctggaggagaagggggttttgattgcgaaatgttccagtatccagagtgaacactgaaggaggagccgttggctacttggtaagagagctgtgaagtcctggatttgggaaaacctgttttcatagaacaggatgggatggaagcctaaacccagcattccttactagcccctgaattaacagagcccaacgaagacaatcccctggcaacaggaagtcaagggagaaagaaggagccccaggctgggaggagtgcggactccccgagcaaaggaggagtgaccccccactgctcaccaaacactagctggggggcctttgcagttgaacggaggtggggcctgcagatgctgggcaagctgcttccctgcaggaggaagccagtcttgagtcctggctcacaccacagacagcttcagggcatgatggaagtttccagaagataacagggcagagctagacccatgaggaaacatttctcaggacaaaagccttccccatgtggagaggatggaagggttgggccttgtggtgtccaccaggagggcgggatggcagcggggacaccttgcatggaaggcggcccagaagggactgggcaaggcagctggacggctcagtggggattccagaaagagacacctccgcgctgcacgcacgcagccacgcagccacccacccacgcagccacccacccacgcagcacgcacagacccacgcacgcagccacccacccacgcagcacgcacagacccacgcacgcagcacgcacgcatccaggcacgcacacgcagccacccacccacacaggcgcacatacgctggcaccgctgaacagccaaaatatacacgatggttcttcttatggttcaggaggtggaaagttgaaaccatagcaagaaacgtggcctatccaccgcagcgactaaaagataaagagggaaaaggacaaacattggccagaaggtgcagcggctggagcgttcgcgccttaactggaagaggagccgccccgcctgggaggccgctctggcgcccggctggtgccgggcaggaggcccttgcggacccagcggcctcctcgtcggcaacgcccaccccgcggttcagccacggagcggatgccgtgtgcaggcacggaacgggcgaggctgttgcgctgcaggtgcccccacggtcgcgatgcggggcagggggatgccggtgggtatcatccctccacgtggagtccgcgcacagtaccagcccccacacggagggcggcccggactcagaggcacaggcagaagcagcctcgcgggtgccggcgatgccctgtggcctcatctgggtggggtcccgcggggtgttttcttgaaggtgactcacccaacggtgtgttcgtgattgggcgcattttggcctaggttaccctccagttacaagtccttaggaaggcaccatggcagagccgcggaggagtgcaccgcggggatgctggcgccgcccttttcacctcgaggggtctctgttcctctgttcaccgctttctgtgacagcgcattcacagaagggaactgcggaggcacagacagagtccagcccctttagtgagggccacctcctccttctgctctcctgaggctgtgtctcatcttgttcggggagccccgcaggtccttgccattgggttgcttgaagatgctcgtccctttagggtgagtttgttagttacattcctctgaagtcttgactcttaaggagctcctcctccagttaggaagaaccacttggttattatcacgataataaat

SEQ ID NO: 1135 - DNA, 6000 bp, Homo sapiens
aagtttctggagtggggtgatgtcctgcatttccgcctttcagagcctcagcaggttaaaaaacaaataggacatggagacagtggaagccactgtgcactcctgctacggaaagacggctgtgccttgttgaagatgatactatatgattcgctaccagagtggggccatccctgcttcaggctgttcctagatgtttaaaagaacattccaaacgacgttaagaaactttgtgctgccatttgtgtattcctttccaaatcttttctaaaatgttagaattcagaccacagttcctgagctttggatgcaaactccttggccctgaatccctggaagccctcccctgtggatggtatcagccatcacagcaggatgtgctttaagaatccaaatgaattcagttataccacgtggcgggacttttaaacttgagctgagcttactcatttctggccgactattaatcctatagctaaatcatgtacgtaaaggaaggggaaaaaaatccaacctgggtaaccacacaacaaacactaaataaaaccaaggtaatgtatggggcatctctgtgctgcttagtaaaacttgaagtttcttaatgtcgcgaagtaacagaaattacttgggggaatttcaggtgtttttggtaaactctttggggaagtaaacagtcagtgaactttcggaatgctgggacttttgactgcagcaaaacaaagctaagacaagtggattccttaaaaaagaccactggcagcagaggagaagcagagctgggaagagacaggctggtgagctcaggggataaattctaccccctctacccagcaggactggccttaagcaaaactgaactaagagggagatgcttcccctccacccacctccgtgagtgtccccgatcgatcgcgctgtcccagctgggctgaccttgtattcacctccaggtcttgggtgtctgtacctcttggtggaggcatttggaagtgcacacaccttgtccactacctcaaactgtgtcctgatgtttttaaattatggcacacgtagccataaaaaataagtgtacagaagagtatataattacatggagagatgcttgccatagccttagttcagaaggcagattacaaaacagtataactatttttgtaagaaaaaagttaataagaagacaagcacgtacatctgtccatagaaggaaagcctgggaggatagccccacgttaacagtgtgtgtttccaggtggtagacctgctggcgatttgagcctgtttgggcttgtctgttttttcacactgagctgtactgctttggtactgcatccattccctcaatactcggcagtttaggtgagctcagtgtgagttaacatgtcaagaggtgacatgtttcccaaggaccttatatttgtaatgctcagggattgatggggacgggaggtttgtgttggctctagaatctcccctgtgaggacgctggaaggggaagcctagggttgaggaggcagtgagaaagtctccaagtccacaccatgtaaagctacttctcccctgctttagggaagcgcctgtttcacgatctcattaaatccaaataaatgggcttgcccatagttaaaatgtgttgatttaaccaaaaaacaaaaataggctgggcacagtggctcatccctgtaatcccagcactttgggaggccaaggtggaaggatggcttgaggccaggagtttgagactagcctgggcaacatagcaagaccctgtctctacaaaaataaaagaaaatagccaggtatgatgctgcacacctgttgtcccagctactcgggagactgaagcaggatcacttgagtctaggaggtggaggctgctgtgagctatgatcgtgcctctgcattccagcctgggtgacagagaccctgtccctaaaaaaaacacaaatagaaagtggttgaaggcaattcactcgcagttggctgcagtctgtttctctctcgtacttggggctgaactagcctcaggagaaggaggctcccgagccccgtagtgtgatcattacaacaaataacgcagaggagaggtttgcttcccattctgcctccacgccctccagcctggctcatccacatacacatcgtctgccaccgtgttccctgttgtggactgttttgttaaatctgccttttcccttctttttttccagtccacctaaacccactgtgttcatctctggggtcatcgcccgggtaagtctgggagtgtctgcggtgggtttgaggcttttgcatggcagcatggagtctcctggttgcttctggttttgttaaactctacctggaataacccagcaccactgctcatctcctctgtggccatggctctcttcattgccgcgtttccccagaggctgcttctgcagaccgcaggccagactcgcatcctttacctttccagagccgccgtctggtgagacccaacattgtgacttaagcgcagacctcccaccagtgaactcccatcagcaaacccccgcagtgaaccccacagtattgccgtccatagggctgctgttctcagaacattcactttcttatcagaggatgcctgaagaaagtgccagtgttggggacagcccactgttggtggagctgtgaccgcagccagccaacctgccagccagagaagtgtggctccagcctgcccatgtggaccccaccctggccacacccacagttggcacagaagcccattgatccctctggaaaatagggagtccctcctgagactggacaggccgaacctggctctgtctcgtaggcgccctgtgcatttccttcccagccagcgtcccaggcctggctcacagctgtggtggcacatctgaacttaagatcctggatttggttctgtcctgcccccaatttaaatagtcacaaatacagatgtagcagaagaaaccccgcagcatccaagtcagttctgtgggagtcgcatgttcctgtgtctcacggcatggggcagagccagtgagcattcttgctgtcctgccagtgtgtgggcctcagtgccacctgccattccctggttttgattgcccaggccccctaacacccacaagggacagacttccaccttcctttatccattcacagtccacgcctgccctgcagggacgctggtgggtgctggcctgggcttcctcacatacaactgccatgcttcctgcagggacgctggtgggcgctggcctggagcttcctcacccacaaaccccatgcttcctgcagggaagctggtgggtgctggcctggggcttcctcacatacaactgccatgcttcctgcagggacgctggtatggggcttcctcacccacaaaccccatgcttcctccagcgacactggtgggcgctggcctggagcttcctcatatacaaccgccatgcttcctacagggaccctggtggacgctggcctggggcttcctcacatacaaaccccatgcttcctgcagggaggctggttgctgctggccttcggcttactcacatacaaaccccatgcttcctgcagggacgctggtgggcactggtctggggcttcctcacccacaaacaccatgcttcctgcagggacgctgatgggtgctggcctgggacttcctcacatacaaaccccacgcttcttgcagggacgctggtgggcgttggcctggggcttcctcacccacaaacaccatgcttcctacagggatgctggtggctgctggcctgtagtttccacacatacaaaccccatgcttcctacagcgacgctggtgggctctggcctggagcttcctcatatacaaccgccatgcttcctgcagggatgctggtgggcgctggtctggggcttcctcacccacaaacaccatgcttcctgtaggaacgctggtgggtgctggcctggagcttcctcttatacaaccgccatccttcctgcagggactctgttgggcgctgtcctggggcttcctcacatacaactgccatgcttcctgtagggacgctggtgggctctggcctggagcttcctcacatacataccccatgcttcctgcagggacgctggtgggcgctggcctggggcttcctcacccacaaacaccatgcttcctgcagggacactggtgggtgctggcctgggggttcctcacccacaaacaccatgcttcctgcagggacactggtgggtgctggcctgggggttcctcacccacaaacaccatgcttcctgcagggacgttgatgggcgctggcctggacgttcctcacatacaaccgccatgcttcctgcagggacgctggtgggcgctggcctggggcttcctcacatacaaaccccatgcttcctgcaggggcgctggtgggccctggcctggggcttcctcacatacaaaccccatgcttcctacagggacgctggtggatgctggcctgaggcttcctcacacacaattgctatccttccgcagggacgctggtgggcactggcctggggcttcctcacccacaaaccccatgcttcctattgattaacctgagctttccgtgtttcctgacagggtgacaaagatttccccccggcggctgcgcaggtggctcaccagaagccgcatgcctccatggacaagcatccttccccaagaacccagcacatccagcagccacgcaagtgagcctggagtccaccagcctgccccatggccccggctctgctgcacttggtatttccctgacagagagaaccagcagtttcgcccaaatcctactctgctgggaaatctaaggcaaaaccaagtgctctgtcctttgccttacatttccatatttaaaactagaaacagctccagcccaaaccttgtttatggggagtctggttggatgtcatttgaggatcattgtgcccctagaggtgccattagcagaatttgccaagatccgagaaaaattttagctttagttctatttcagcagtcacctgacgtccttgtctatggtcttaaaaacaagaaggcacacatttgagaagatgagattaaggttaggagaaaacctcagtcattgcatgctttttagtatgggccaataaaatctcaacacctgtgggagagtaagaactaagggaatgagtttgggcggcccctcataaaggaccttagaggcagggaacagcaatgccaaatttccctctctcgtgagatgggggatcctgtgcaggctgatgaggcacccatgagaaaagccgaaaaagcatgcatcttagaaatagcccctcaattccaggagtcaacatgccaaagaatgaggctggagacaggtagctccgagggaggacttctggcatgagatctcggcacggcaagcccagcatcgcctcagcccagacaggctccaccaggagatcaagcaagggctgcctttcaggagtcacctcctgagccacttcagagttctggaagtgaccacggaccagggtggaggaatagacttctagttcattctgggacacttgagccagagagttgaaagcttggaaagaccagataagaaacctgccctttgtctccctagggacatgagacaccacattccatttgtgctagaaaaacctatccactgatgagtctaactgttccaaacgcctcccacctggtgtgcacagctgcctgggtccattgtcacttgggtgcatcaggttgtcctccgatttttagatgagtttcctgtctagagatgtcctagtctgctcactggctggtggcagtagggtaccctgcgtcctcgaaaagccagagggttcacctagtcagacgaaactccagaacagtgcttgtggagggcctgactgtcctgctcacccacagccgatctgctgcaggtcagcaactgtgtcgtgagcagctgccaaccaccagcctttctggtgctgttctccagttcacgtctgccagct

SEQ ID NO: 1136 - DNA, 6000 bp, Homo sapiens
gcaaatgtcagaaaagatcactggccatgtgccatctatatgctatatacatttttcattctctgtttagtcatcattggctactcttcatttaggtagcagttgtgagaaattaaatgtatctatgttctagaattatggggagaaaataactgttgaatgcttcttctgtgcccaccatggttttaggtgctgggaatacctagtgggcaagatggattaggtttctcccctcatggagctgacattctagtcagtggagaaaaacaataagccagcagacagataaatgaggaatttcagatgaggatagagtgctataaagacagtaagacagagcaggccccttgaaaagctgattccagaataagaagaagttaactacgcgaggatctggaagagacagttctcggcagtggtgttgtaggactttcttgttagcctagctaaaaagagcgtccttgtcacataaccacgaaagattaggctcacagacactttgaagggtggggaaaatggaatttattaggcaaaaaggaaaaaaaggaaacagggactttcagcaaagcaagagtcctgctagccggtttcccgcgtcacagattgaatcccagattccacccgggaagaggtcaggctcctctcccctgtaaagggcgtgaacttctgtggctccaccccatcttccggtgtgcaggtagtcagagtttctctgcggacccctttatgcttggctgtctcagtgggagtggctaacacaaagtcccaaggggaagaattggcttgtcctgctagaggaacctcagaaaggccagtgtggccagaggagccaagagggaggagctcacaactgggcaggacccccatcatgcagggtctggtaggccatgtgtgctaggggttgcatttggctgcccatgaagacaccaaccacaaggactttatttaatagaaatttgtttcccacacaacaaaaaagtctggacgaggagtccacagctctgaagcgcctccatggaccctcagattcccacatgcctttgaccttcctgctctgtcacctttagcttgtgattttcatgcctttgattgcctcacagttgcgatatgattgttctacctttggccttctgtctgaattcaaggtggtacaaatgatgtcaccaggaggaaggggtgtccccatattaagaatgtaaattttccccaaaacaccccagcagatttccatggtcaaaactgtgtcacttggctacccctagctacaagggaagctgaaaaataaatgtcttttttttgcgaagttcactaccttcttaacagtatttccttcattagaaatgctattgagtagacagattattccacactgtaatgagtagcttggattgtattctagaggagaagctatttgccgataggtgggaaatcaagagttctttgaagatgtaaaattaacttggctgtcacactgtcaggagcagaatgtacctgaatcacgtagcacccaaatataatacgttagtggcagtgaatctgtacaggtctgcagcaacctcaattcttgcctcttcagaaggaagaattcaactgaggggtataaagcagaaagagagactgaggcaactttaaaggaggagtgaaagtttattaaaaagctttagatctggaacaaaaggaaagtacacttggaagatggccaagcaggtaactttagagatcaagtgcacggtttgacctttgacttagggttttatacattggcatacttctggagtcttgcatcccttgattcttcagggatcagtcttatcccctgattcttcccttggggtaggctgtccacatgcacagtgacttgccagcgcttggaaagtgagcaggggcagtgtgtttattggaagtgtacacatgctcacttgaggcaatcttcccttaccagcctcatgttcctagaaggtcatataccagtcaaacgttgccattttgcctctcgatgtgtggcaaagagatcttaccaggaagctgctgaccaccactttcaggttttttctatctactgggagactgcctttccctggcactgactgcaaccaattattattttagagaaacagtgtaacaacttcctgaccatcacctgatggtcacacaacatttctggtggtgtgggttgtgggggaagagtcctctcctgccctgctcaggccgactagctacctactgtaagacaaccagagtttcccaatcagtacaaacctggagaacaggtcacaggcaaagagacacaacctgtcagacctcagggcagtccaggggccaccagggcccctctggagctctgctccttcctgtgaaggctttctcccccaccccccagggttccttaccaatagcatttgttattgagtctaagatgctgtggctcgtaacatgcaactttgttttaggtaccactaagggtaaaaacactaccaattaaatgataccacaatgtgctctttcaacttaaaattttcattttatacttccaagaaataattctttaggcttaagacatacgacataagtttttaactatatagcacttttgcacatacataaaaaggaagttactcatgaaattaatcagttaggtatccttaaacctttaagaacgtgagtgatgtgctatctctttaaagagtaacccagtattaatttcaggattctcttctaaactgctggcacccacttggaagtttggatgtgaatgcaagacaatggcaagcatatcatgactgcagcctggccaacaattatcctattaccggtgttgaaatgtgtgtatggagtggggaatgcaagaccaatgtatgctatgtgcatctccatgtgtgccctgatgcacagagttgcgcagcactgagttagacaacaaatagagaagccaaggtggcggtggtgagtttggagttcagtggaggggcagaaagagagaaattaagttgcagatgtggcacccataagcgtctgcaggtggtggtggtggtgagtctggagttcaggggaggagcagaaatagagaaatgaggttgcagatttggcacctgtaagcatctgcatgatagtcgtccacaggctgcatgtgactatctatgggaagtctagatagagaagaaggccaatgctgagccttgcgatactcaaatgtttataaatctagaagagggcgaactgccaagctgacagagtgagcagccagggtggccagagaactggagggtaaggcagtgatgtggcacctccggagcaaaggaggagggggacggccagctgcatcaagtgctgctaagagctcaaatagaatgaaagtagaaaatgaccattggatctggcagcacataggttataagtgacttccacaaaaggacctcccatggttgagggcagtgcagcagaacttgatgaaaaccagacaaactggactggagggagtgacaagagatgaggagctcagcctccctgaacagttttgttgtcaaagggaaaagtacagccaagcgaggggtggtgtttccttcgctaaagagattaggcctgtctgaatgcgaatccagcaaggcattgcggaagttaacagcagttgcaaaacactggggcaggcgggaagaacacgatccaaggcacgagagccaggggtcagccacggcaacaggaagatgatggtgaaaaccaaaagtttctgagagtggtctcaatttaggaagtttattttgccaaggttaaggacgtgcattgacacaacctcaggaggttctgatgacatgtgcccagggtggccaggaaacatcttggttttatacatttgagggagacatgagacatcaatcaatacgtaagatgtaggttggctctttaggaggtaaaatgtgaagtggaggcgtccgggtcataggtacatttaaaggttttctgattggcaactggttgagagttatcatctaaagacctggactcagtagaagggaatgtccgggttgcatgaaggagttgtggagaccaaggtgttatcatgcagatgaagccgggaatacactgcaaatgtttcttatcagagtcctctattagtcttagggtctccgtgcggatgtttgtgaggccatgtttgacttccgcttcccatcaaggcctgaactagtttttcaagataacttagaaggccacaggcggaggggagggtccatccgttggctgcagggcttagaattttatttttggttcataacgaggagggcagggacagaagccaccgtctctgctccccagcgctggccctcactcggaaagcaggctctcccctcgcatcgtcttttaacaaattcctgctctctcggcccccgtcgctgccatctgggctctcctttccgcgcttcattaggcgctgccgcggcaggggctgagggcctcaggggacggtcgcctccctgccgggacgccccggccctggcccgcactgtggggcgcagtcacccagccgtcgccgcgtagccaggagcccggctgagcgcgttcgctgcaggagccatcctcagctgggccctacttaactttccgcaactccagtccccgcagccagtcggggaccccgcctccctctccttccttctccctctcacttcttcaccccttctctcccctccctcctccgcccccgcccccgcccccgcccccgcccccggccacagcatccgacgtggcgcggccggctgcgcacgcaccgtatgcttggctcgcggcccagcagggcgggcgggccgcggtgacgtcagtgcgcatgccgtcggtgggctcggctgcgccacgtcggcgcgcggcggccgcgcccccttaacggcagtggcactcacccggctcgcgcggccccggcgccccacgcgcgcgcgtcgttctcccgcccgctcgctccccggcgctcacacctgagctcactcgcgcacgcccgcccggcccgagaaccgcgccgccgcctcggccccgcggaagccccgccgcgtcatgtcttcgcctcccgaagggaaactagagactaaagctggacacccgcccgccggtactgactcttttcctctctctccacgcgcgggtgccgggggcgggctcgaacccgggggcgccgggcgggggctccgcggggagggccccggcgagcgctgagacgggttccgggccttgatgcccgcccgaggggcgcgggccgcggagaggtcgggcgcccaggcccgggaggagcccgccggagcttcggccccgcttgccggcggcggcgaagcgtttcttcctgaggaccgcgggcggccgcgtacctgtgcgattgcgcgcaggctccggtgccttgggcgaacccagttgcacaacttataacaaagttttggcggataatatttacttagaggatacagatgtctagaaagaaagtagcagaagcaatgaaaagtcagtggtgttaatatcatggtgatgattaattagaggctgccagcgtttcataccgactcaagaaccaaggagcggaaataatttttatcattaatcactcaatatgactttcaccgccagtttcttccacatccagattttttttttcccccaaagttgctttttctgattttgagcaaatcctaaacttctgagccaaggaagttaaagccaggaaagagcggtctttcttagaacatagggatctaagcagccttcatgcttctgccacctcctcctctctctgggcacagttcctgtttgcactttggattctgtccagacgggtctgtttccgtttctactctcctttccagtggcagtcggcccatatggagggacactggtgagaagatcaaaggccttgggtctcagaagccaagtcacttcaatgtatggatgcgtgaggttcttttaggtcttaatagcacgccttagtgtcataaactcagtcttgtaggaacagaagtctttgagaaacat

SEQ ID NO: 1137 - DNA, 6000 bp, Homo sapiens
tgaacagccacaacataagagaaaaagtcaaaatataataagcacatgaactcaaccttgaaggcaatcagaacactgtgaattagaacaacaatgagctatcatattttgcttatcagactagcaagataagattgataaagtccagtgctagcaaaaatgtgagtaaacatccttggtaagagtggacactgaaacatttgtggataaaaattggaggtatatatgaaaatttaaaatgttcctaccctgtggctcagtaatctcatttctagggctttctccaacaacatatttggagagcaatttggtagctatcaaaattttaatgttcattctctttgagccaaccaagtcatttattttttattttatttatttatttatttatctatttatttttttgagacacagtctcaatctgttgcccatgctggagtgccatggcactatctcggctccctgcaacctctgcctcccaggttcaagcgatcctctggcctcagcctccctagcagctgggactacaggcgtgcaccaccactcctggctaatttttgtatttttagtagagagagggtttcaccatgttgggcaagctggtgtggaactcctgacctcaggtgatctgcctgccttggccttccaaagtgttgggattacaggcagacgcgagccaacctgcctgccaatcaggccattctaagtatctatcctaaagtccatgcaaagacaatcctagcagcacttcttaaaataaaaagctggaattactaaagacctaacaatggaagaatggtagaatatattacaaactatgtaaccattaaaaaaaaatggagtaaatctatacatagttacctggaatatgtgatttcattaagtttaaaaaagaaaagtcacagaaattattgcattttgaatttttaaaatatttgcatgtgcatacagagacatgactatatacacatgtaaaaaaggaggcaaccaccaatacgtcaatggtggttacctctgagacaggattagatgaaggaaggaggatgtgtgatttggaagtactatattttactgtatagataaagatgtagatttctttttaacagtgctaggatttggggtagttttttaatctttggatatttttagcagttttctattttttttctaaagaaagaaacatagttctcccacatatggacatgccattcttctgaggatgcttaagttgaccccaggaggagccctagctgctgttccccattagaggccccttttcagcaggaagtagccagaaagagtccttgcccaaaaccccctaacagcagttagtgtgatatcgccacagggaggaatgtggcatgagttatcaagaaattattttaggcagatagagagtaaaaggggtccttgggaagttttcattttttaaagtatctccagaaaagtttcttgtaaaaccccggcttttagagccaggcgggcaacctttgatatgcaaacctaggccattagaaactgggttcacccaaacatgccgattccagggaccttcttgcccttgccccacatgttcctggcaacatggccgcccccacatatccctatttgtgtagaacatcatggcgccccgcatttgcatattaaaaggctagagtgggagggccagctctttcatgggctacgtgaattacgtgcctagtcaaaccaatcccctgagccctaggcaaatcaaacaccgcctcctccagcctctgcttatatacctggctggtatccgcagcaagtggggacttactcttttggctttggagcgcccccctccctctgtctctgtacagggaagcttcttctttcttccttctccctttccttcttgacccttcttgcctattaacctctccactccttaaaaccaaaaaaaaaaaaaaaaaaaaagaaatgtggttctcaaagaagacaaatgaagtagcaatgataaaactccttccctatttgagaaggaggagagagaaaaggagccacggcagaaaccaacagaggaatgccacagacagaggggaggctcccgccagaggatggcagaggcctggaagccaaggcgtgagaacttcaagaggaggaagtgaaccgaagcccagtgctgcagagaggcctggagggccctcccagagagcagccagtgagtggtagtgatgaaagccaggtgcaaagaattcaagggagccattttccaccctgcctgtgcatttttgtaaaaacagagaagtcagagccccattctaaacctcctgcattagaagctctgcaagtgacacccagacacagtacattttaaacactcaggtgattcttgttcacagccaaggttgagaaccagtgagttaaggcactgagagggaagtaagtaaggaaagctggtgtgcgtaagtcattctttcactaagattggcaggtaaagaaatgagtgaattaaactgtaaagccatcaaaagggtcaaagaagatgtagaagttgtaggttgagataaagaagcctatggggcagaaaagattaaatatgcaagaaaggtagaggaaaggggaaggaaagaaaggaacttgatgtttctagactttgttagatggcacacattttacatatgccatcaccattattattcatttgactggatttttgaggcacatgctactgtgtccaatttacagtgagaaaccaagaatagcaaggacctaacccagtgccagtgctgggctcttcctctgcatcaggctgagaagcaaggtcttggaggaagtaaacggatatggagtccaggactcaggtagggagtcagcttgcaaaggacgaacacgtccgctaagacagagatgcagaaatgaactagaggaggacatcagtaaagaagctgtgaagctggagcacatcagtgcatagagagaaggagatagtcaaagaaccactgtggggcagaaaaggaaaatatagtggctcactgcggatttcatcatctcaggaaagctggggcaaggtaactcactgacaatgagtacccgtggctttgtgacagtgcctgtgtgctacacaacagagcagaaagccagccctgcccttcttaccagtgaggtatggattagccacgcaacgaccagtctgtaagccaggagtacagacgagccaagctgcctgcagctgagtgggaaccacaaggaggaaaagccaagtccctgccttctaagagctgacagtctggagttacccagagtgatcttctatttcactaactgttaaaatagtctgattagaacaactattgtagaattgagtgaccctttgctttgcaaaggtcatatagaaatattctgccactgaggatctcatgtcgcccagtggttctgaaaataaatagaagttgcgtaccttcatggacacccatgaatgaaagtaaatataccctaatcatcacaggaagcatgtgcggtctgcacgtgaaagatgcatctcccatcagctaacagaaccaggtggagtctatgttttaataaggacgtgttattgatcaggaagtattaggttattatgcctaggtagttgcttctgggattccagtccaaaaggatcaccaaagcatcatgggattttcaatggcttcctgtggcttggcaaatgctcactgctaactgtgatttcccagttatccagagtagcagtcaaatcaaaggggaaagcctcatgtttcaataacttaaaacaaaacaaaaaaaaaaacggccaggcgcagtggctcacgcctgtaatcccagcacttcaggaggccaaggtgggtggatcatgaggtcaggaaatcaagaccatcctggctaacagggtgaaacctcatctctactaaaaatacaaaaaactagccggacatggtggcacgcgcctgtagtcccacctactcgggaggctgaagcaggacaattgcttgaatccaggaggcagaggttccagtgagccgagatggggtcactgcaatccagcctgagcgacagagcgagactctgtctcaaaaaaacaaacaaaaacaaacaaaaaaaaaaactcagtaaccttggtttaaagtatttccttggtggccctctgggttgtgtaacaatcggatgcattaattattatggcatcaaatgacaccagcaacatacatagtcagaaataactatttgattcaggcaggtgctattatttgtttcagcactgttaaatgtggggtttttgtttttgcaagagaaaaggcggttgtgtgtggtttcaagaagaagaaaagtcagaacaacatgcagcccattagaaaagataaattctttatttgtggaaaacaacagaagtggggctatttaggcaccgccaatgtttattatattcatatggcagagaataaacacagcacactagaagtttgcgctttgggtattaaaaaaaaaaaaaagcaaaaccttcttaggtcactgactatcttcttttgctcctttctatctgactcctcaggcaaggtgcaattcaaatccctggagaacctctcaaatatagctgctgttcaatgttactcagaaataaggaaagaaatttgacacggagacactccacatcttggctgcctggaaaaatatcatctttgaggtcattcaactcactaagtcatttttattattgttttgtctgtctattttctggtacagtctcaatgaaagatatgtggccctaatcatgcaaaaccgatctggggggaatcagttgtttcttcaggtcttcgcaggattccagctcccccaactacctccgtcgccttctaaaactggcaggctctggacgttttgcatgctgaagaaaatcactgttttgcctccagcaaggaacataaatgttgcaacactgactcctcctctcatgaagaaagagtgaacaagtgcaccgagttgagcttcttctcacagagccaccgggctggggaccggggagcggaggctgaaatccccagacgccggttttctgggctgggctttctgccttactcactccttctccctctttctggattttaccgaccgttcgcgaaacagctttccacacaatggagcttcatgtcctcgtgcaggaagtactcatcgactgatgtggcagactttgctccctggcaaaagtgagtacccatggcgagctgaggccgcctccgacggcgcgcggcaggggctgcgcgggcggccgctctccgggatgcgggttcgaggcccgcgtgctgaaggggagagcggggccaccggcgcgggctcctggagagaacgccagccaggagccagagtcggcagccggcggggaagcccgggatccgcccgcctcccgcccggatgtcccttctcagaggggctaaaaaatactcttaaggtgctttgcctccaccactgcccccaaccccagcttttacaaactgcactcggctcgcattcgcctttgtcaaaggcatcttcacctgtatccttgagcatgagtttcggcgttgattgtgggattctcagaatgcaaattatttgcgtcaaaataaaaagaaaagaaaaaaagagcggggagggggaaggggcgcagacaggtgatgtgatgaaagccggactcgagactctcccatcagcagcagccgccgccgcagcagcctcgcgggcatccggcggggaaagtttagggttagcaatgctgacctgaaaggtgttgctcctcccaaaagtcagcgggggtaggggcagatgagcagcctccgggccagaagccggagctggacggaggcacctaggcagaggaattgcagcccgggaggaagctggaaggagagcccgctggagaagggaggagggaagggaagaggagttggttaaagtcaggcaaactcaggtaactggagggccggcccgagtgctacggcaggggaaggcaagggctggagttctggctctttgagtagaaaactatcc

SEQ ID NO: 1138 - DNA, 6000 bp, Homo sapiens
ccggcagccctcgccctgttggcggcggcggcggcgggagtcttggccgccgcctccagcgcgcccttgctgccccgcgcgaccccaggattgcgaactcttgcccctgacctgttgggcggggctccgcgctccagccatcagcccggatgggtctcctggctgggacttggggcacctggagttaatgtccaacctagggtctgcggagacccgatccgaggtaagtgagggagcgggccggggagcagggagcgggtggtgcctgcgtcgcgggtgggtgcggccggctgaagggcgccctagtcagaggggtgcgtctggaccccagagcaaacggtgagagtagaaagtggaaagactagagggaacctaagctatgcgaggagagagaaaagtagaaccggagagaggccggcctttcggaggggcatgttgccttttccacgtgggcaaagatctgtggagccccagatgcgcctggacccggaatgcccaagaggggcagtttccttccccgactcggccaggtgctcttccgtcaagtcacagaacgattcagggcttgggtcatcttcgaacccaccgccgtcgaaatgtgtcctctctggacgtgcagagatactatcattgccaagagtgcaacttactattgagcttgttttgatctgtgccaaggaaaagcgcaggccgggggaggggctgctgcaaaggtgctgagaacctaaaaatggagggctcacctcctccgggcgaggtctggcaaagctacattcctcacccggttgcctgcacgttcctaacgccctccaccccaactaaccatccccgtcgaggttaggagaggggctttcttgccagtcctggattcaaatctctgtctcgaacgtattcttgagactccactaggccattgaggttattattttaatgacccctttttctcctgtactctgtgccgccttccaaaaacaccccaccaccactgccactactttacaccacctcgaggctaattccgcactggtggtttgtttcctgccccaacgaagaaaaacgaaccctcttcgggctggaaacggactttcgcgggttcccgccagcttcctggggcccagctagtttcggctttggtagaatccgccgccaggacccatgtgcgcgcccccggggggcttacccatcccagagctcgcgacccttctgctcataggcggggacaaaggcaactcttccggcccctgctgcggagatgttagaacgcgctcgactcttgctcagtgtttggaatatatgcttaggtatttcaaggaagagatgtttcttccaacctcattcacgcacccagtcccgcaaagccgtcaaagccggcctcgaccaaactcgtactgtttcgctgcgccttcgctttgtcagggaaggtggcgccttttcaacaagtaacaagtgtccgatctctgggaagtccgccgtgtccctagccctttcccgctagcaattcgggtgctctcgggcctggaacctggccctttaaacagaccgctttcccagtttgcctgcgagaagtgtcccaaattctttttccttccctcatcttgggccccgcagttatggggggttgaggggagaataagtcctctgtcagtcaaggacacgaagcatagttaagaaaagcaatagatcttccagcaatttctgtctctacctccccccgccaaaaaaaaaaaaaaaaaaaccgagtttatagcaaacccgtctccccgccccaccgcctcctttttctctctctgagacctggatcttgaaggcaaagcccaaacaaacctcccagcctgccaggcacaagaaggtgcgggggcactgacggcgggagcgctgcctcctgcgaatctgtcacggtgacgcgtggaaggggtgagggatggtctgaaagcaggttgccaagaaacccgctcaggtgaagtggggagaggaaaaccagcgagaatggaggggtgggagcctgaaaagcagagatgccagtaaggacctccacaggttcccgggctaatgggatttcgggaggctcgtagagggagtggtggttctccggttttataactaaaatgataacacagcctccgggccgcgtgggcgcgacacggctcagacggtttctggtgccccctgctgccgggaactcagaagtgcctcgcggcgagcggctgcttctgcgagcacttctgtggctttcctgggcgtccttgcctccccaggcctggggacccacaggtgccggcgcccacggcctgctgcttttgccctgccgggacgtggtggtcccggacccagaaggggaccagcttgccaggcacgagaaatggtgcgcggtcacctggcagagcagagcccccgtcacttgaggagcagagcttggttctcgcacgtggcggcgcgtaaagcagtttgcaccgcgggcaaaggcccatggttgaggagaagcgcgtcgggcagatgtagatgtgttttgggaaagcgatagagagacaaactgagaagccgaggggtggagcccacacggactctaagaaaaacgtcctagtagacgctgtgtgtgccgagtcccccaacctccccccttttcccccgcccagcaaataccgagaacgaaagagcccctcggactggagccggtcccggcggcgctcagagggaagaatgcgccctccctgtcccgggggaagaggggagctcgatccgggcgctggcggcgctcggccgagggcgggaaccgcagccgggagcctcctctggcgacgcggggagttttccactgtgtagtcttttgccagcttcgccacacttctaattgaggatctccacgtccaatttaaaaagccctccgtcggccaagcaggaaaaaagggaaaaccctcttaagacggaagggaaatctagtgcctctgtggcttcctgctggcgggcaccgcgatttggaatggcgcattaaccccgcgcctccatgctcctccggtcggaccgccagccatttcgcacgcacccgggagctggcaccggcggggggcttgaggggggaagctcgcgttccccaggtcctagctgccaaagtacctttctgggctcattttgcatggcctggtgcagttttcctgtgtctgcacatcgcgacccagaacctagctttttcccgagtttgcaaaccagcccgcgaggcaagaggcgctcggtgctgcaggtcactaggagtttctagtccctacaccctctcgagcccaacagctgcatagcgaacaaacagacgctcaggagatgtaaaatgcattagtctctgcagaggtgggaggtggcggccgaattaaaggcttccccgggttgcctgcaccgggacagggagtggggttccgggtagagatgaggactggaaccctggaatggaggcgggggtgcctgtgaactaatggctaggaaaggcactgaggtttttgcattaacctgggttttgcatttccctcccgcatgggaaaaaaaaaatcgagtttttcctaagaaccgttttatggagccggtcgaggggataggataatcgactgcacgaatctcgcagattccgcttgaggagattctctctaggtcactagtgccctggagacgaaccctgggattaggaaggcactggataacactgcaccccaagatgcctcggttcttccccgtctcctcattggttggaactcgcccccaaatttacagcccctttttctaacccacccccagctgcgtggccctcctttgtaggggtgtgaggattgagaagccaaacagagcccacctcgggctgaaaagagctgaaccccctactctgcgccgtaccacggtctaggccttccagtgccagagcacctccaaagcgtccgagactgggtacagtcgtccaggcgtgacgggggcgcggggagccagtgactcctctgggaggggaagggattagggccagaatctctcaaaggtgcaaaaatccagtcaagagagggttttcgggtataccacggaggattaaaactttcaagacaaatgcagtctttgcctaacagcaatggtaaagcatttactgagctcttactacatgttccgctagagcttgtcatgcgtgatttaatgttcataactttaagaggtgggaggagtattttaaatcgaatcagtgctttgggaagttaagtaacttaaaccagatatcccatacaggccaaaagtctccaagtccctgctaacttcttgctctcgcaacagaatacctatttaggtgggaagaatgaggtgtgggcggcaggctgggtgagtggtgcccccgagcctgccctcgactagccagaagcccggttgggacccgaggcaggggaatgcgcttgattttatttccaaagagaaacaccgtccttgcttgggccgagggctcgttcaggggcctataggagctaccgggacaagaaggggaggtctctggttggggtggaggacgaagggtgggaactacccgattgccccccaggaatgggggatgttgcgcaccagtagaggggactggacaggaatcgtggtggtgggggtggggggttaactggaggggacagcagccctgcttgaaactctgacccctaagaccgtgtggtggagaagggcagctgcaacctgaaccaggagtgcgagctgctcctggggcgcgctgaggagggagaagcgaactggggacttgcaaggagggcaggagtgcccgaggagccgctggcctgcagcggtgccggaggagggcggtgacgaggttggagaggggcgcagggacccgcagggagcccaggcttaacgtgcattctgcggttctctcccccacctcccgcctgcccgcgcaggtgccgccgccggacgggactttaagatgaagttatgggatgtcgtggctgtctgcctggtgctgctccacaccgcgtccgccttcccgctgcccgccggtaagaggcctcccgaggcgcccgccgaagaccgctccctcggccgccgccgcgcgcccttcgcgctgagcagtgactgtaagaaccgttccctccccgcgggggggccgccggcggaccccctcgcacccccacccgcagccagccccgcacgtaccccaagccagcctgatggctgtgtggcctaccgacccgtgggcaaggggtgcgggtgctgaagcccccaggggtgcctggctgcccactgctgcccgcacgcctggcctgaaagtgacacgcgctggtttgcccagcacagaggggatggaatttttatgctgctcctttagcattctgatgaacaaatatcctccccaccagcaccaccacctcagaaacacacacacagctgtccccttttctgtttcctcacctatacacactcccagtttttctttgcttccaaagccctttatctgtgtgtctgtgcctggctgtgcttaattctgagaactattgcactttcatcctaaactgcgcctgcaaggcgagaggccggcttttcacaaaagcaagccagaggcagagaaaacacagaagggcctccatttccagaacaagcgtctgggtaatgtcaaatctgttcagaaaagttcctctgttcagaaaagttccggttctagaaagacttaaccataaatagtgctggctgggactagggacaaagactgtagctcactccacgtgagacaatgctaactcttgagaaaaaaacccaggttattcttattagaaaataagtctgtgatttacctctcaaaaattaacatgttttagaagcaagtcaattagggcatatcagctgtgatgtgatctcgttttccctccactcctcagaagcttgttgcatgaagtgagagaggctacattacatgtgatagaggctgttgcagaggcataatgtcaacaaagatagcaatagaaaatttcacacaaccccaaaataaagcaggaa

SEQ ID NO: 1139 - DNA, 6000 bp, Homo sapiens
agacacccgagcgggaaggccggccttcgacaggcgcgaggaaagcccggcgctgccctgcaccggcagagcgccaccctcccagtgcggcgcgcgggggcaaagcccggcgcgggcgccgcggtcaagttcggattgcccctttcggctggcccgcgcagagcgccgcacattcctctcgatttttgatccacccggagaggagaaggcgctagccccgcggcgtctccgcgctctcagcgctctccctgcagcccagggaggggcgcctcgcgtcgcccactcgcaccccggccccccgcctcgggaactccagggcctcctcgctgctctcctctcctcccccaccgccaggcccagccgacgcctcccgacccctccctcccggggccccgcgcctcccctcccccaccccggaccccggacccccagcccgggctctagaagaccagcctgcgctcctggcgccctcatgtcttcacgggactccccgcgccggttgacgtggtgtctcgttcggatctccaggcaagacctcagctccggcagcagcatcagacaaaccagtctcgtgctcccaggcagtgcgcccagaggaggcgcagagcgcggcagctgccgctgagccgcccgcagcgccccgggcccgcgcagccccagccaagagcgcgacgcgcgcagccctgtcagccccccacccaaagcagcggcggctgctcggacctcggcttctgggggtgcgggggcccggcgggagagttgccggcagccctcgccctgttggcggcggcggcggcgggagtcttggccgccgcctccagcgcgcccttgctgccccgcgcgaccccaggattgcgaactcttgcccctgacctgttgggcggggctccgcgctccagccatcagcccggatgggtctcctggctgggacttggggcacctggagttaatgtccaacctagggtctgcggagacccgatccgaggtaagtgagggagcgggccggggagcagggagcgggtggtgcctgcgtcgcgggtgggtgcggccggctgaagggcgccctagtcagaggggtgcgtctggaccccagagcaaacggtgagagtagaaagtggaaagactagagggaacctaagctatgcgaggagagagaaaagtagaaccggagagaggccggcctttcggaggggcatgttgccttttccacgtgggcaaagatctgtggagccccagatgcgcctggacccggaatgcccaagaggggcagtttccttccccgactcggccaggtgctcttccgtcaagtcacagaacgattcagggcttgggtcatcttcgaacccaccgccgtcgaaatgtgtcctctctggacgtgcagagatactatcattgccaagagtgcaacttactattgagcttgttttgatctgtgccaaggaaaagcgcaggccgggggaggggctgctgcaaaggtgctgagaacctaaaaatggagggctcacctcctccgggcgaggtctggcaaagctacattcctcacccggttgcctgcacgttcctaacgccctccaccccaactaaccatccccgtcgaggttaggagaggggctttcttgccagtcctggattcaaatctctgtctcgaacgtattcttgagactccactaggccattgaggttattattttaatgacccctttttctcctgtactctgtgccgccttccaaaaacaccccaccaccactgccactactttacaccacctcgaggctaattccgcactggtggtttgtttcctgccccaacgaagaaaaacgaaccctcttcgggctggaaacggactttcgcgggttcccgccagcttcctggggcccagctagtttcggctttggtagaatccgccgccaggacccatgtgcgcgcccccggggggcttacccatcccagagctcgcgacccttctgctcataggcggggacaaaggcaactcttccggcccctgctgcggagatgttagaacgcgctcgactcttgctcagtgtttggaatatatgcttaggtatttcaaggaagagatgtttcttccaacctcattcacgcacccagtcccgcaaagccgtcaaagccggcctcgaccaaactcgtactgtttcgctgcgccttcgctttgtcagggaaggtggcgccttttcaacaagtaacaagtgtccgatctctgggaagtccgccgtgtccctagccctttcccgctagcaattcgggtgctctcgggcctggaacctggccctttaaacagaccgctttcccagtttgcctgcgagaagtgtcccaaattctttttccttccctcatcttgggccccgcagttatggggggttgaggggagaataagtcctctgtcagtcaaggacacgaagcatagttaagaaaagcaatagatcttccagcaatttctgtctctacctccccccgccaaaaaaaaaaaaaaaaaaaccgagtttatagcaaacccgtctccccgccccaccgcctcctttttctctctctgagacctggatcttgaaggcaaagcccaaacaaacctcccagcctgccaggcacaagaaggtgcgggggcactgacggcgggagcgctgcctcctgcgaatctgtcacggtgacgcgtggaaggggtgagggatggtctgaaagcaggttgccaagaaacccgctcaggtgaagtggggagaggaaaaccagcgagaatggaggggtgggagcctgaaaagcagagatgccagtaaggacctccacaggttcccgggctaatgggatttcgggaggctcgtagagggagtggtggttctccggttttataactaaaatgataacacagcctccgggccgcgtgggcgcgacacggctcagacggtttctggtgccccctgctgccgggaactcagaagtgcctcgcggcgagcggctgcttctgcgagcacttctgtggctttcctgggcgtccttgcctccccaggcctggggacccacaggtgccggcgcccacggcctgctgcttttgccctgccgggacgtggtggtcccggacccagaaggggaccagcttgccaggcacgagaaatggtgcgcggtcacctggcagagcagagcccccgtcacttgaggagcagagcttggttctcgcacgtggcggcgcgtaaagcagtttgcaccgcgggcaaaggcccatggttgaggagaagcgcgtcgggcagatgtagatgtgttttgggaaagcgatagagagacaaactgagaagccgaggggtggagcccacacggactctaagaaaaacgtcctagtagacgctgtgtgtgccgagtcccccaacctccccccttttcccccgcccagcaaataccgagaacgaaagagcccctcggactggagccggtcccggcggcgctcagagggaagaatgcgccctccctgtcccgggggaagaggggagctcgatccgggcgctggcggcgctcggccgagggcgggaaccgcagccgggagcctcctctggcgacgcggggagttttccactgtgtagtcttttgccagcttcgccacacttctaattgaggatctccacgtccaatttaaaaagccctccgtcggccaagcaggaaaaaagggaaaaccctcttaagacggaagggaaatctagtgcctctgtggcttcctgctggcgggcaccgcgatttggaatggcgcattaaccccgcgcctccatgctcctccggtcggaccgccagccatttcgcacgcacccgggagctggcaccggcggggggcttgaggggggaagctcgcgttccccaggtcctagctgccaaagtacctttctgggctcattttgcatggcctggtgcagttttcctgtgtctgcacatcgcgacccagaacctagctttttcccgagtttgcaaaccagcccgcgaggcaagaggcgctcggtgctgcaggtcactaggagtttctagtccctacaccctctcgagcccaacagctgcatagcgaacaaacagacgctcaggagatgtaaaatgcattagtctctgcagaggtgggaggtggcggccgaattaaaggcttccccgggttgcctgcaccgggacagggagtggggttccgggtagagatgaggactggaaccctggaatggaggcgggggtgcctgtgaactaatggctaggaaaggcactgaggtttttgcattaacctgggttttgcatttccctcccgcatgggaaaaaaaaaatcgagtttttcctaagaaccgttttatggagccggtcgaggggataggataatcgactgcacgaatctcgcagattccgcttgaggagattctctctaggtcactagtgccctggagacgaaccctgggattaggaaggcactggataacactgcaccccaagatgcctcggttcttccccgtctcctcattggttggaactcgcccccaaatttacagcccctttttctaacccacccccagctgcgtggccctcctttgtaggggtgtgaggattgagaagccaaacagagcccacctcgggctgaaaagagctgaaccccctactctgcgccgtaccacggtctaggccttccagtgccagagcacctccaaagcgtccgagactgggtacagtcgtccaggcgtgacgggggcgcggggagccagtgactcctctgggaggggaagggattagggccagaatctctcaaaggtgcaaaaatccagtcaagagagggttttcgggtataccacggaggattaaaactttcaagacaaatgcagtctttgcctaacagcaatggtaaagcatttactgagctcttactacatgttccgctagagcttgtcatgcgtgatttaatgttcataactttaagaggtgggaggagtattttaaatcgaatcagtgctttgggaagttaagtaacttaaaccagatatcccatacaggccaaaagtctccaagtccctgctaacttcttgctctcgcaacagaatacctatttaggtgggaagaatgaggtgtgggcggcaggctgggtgagtggtgcccccgagcctgccctcgactagccagaagcccggttgggacccgaggcaggggaatgcgcttgattttatttccaaagagaaacaccgtccttgcttgggccgagggctcgttcaggggcctataggagctaccgggacaagaaggggaggtctctggttggggtggaggacgaagggtgggaactacccgattgccccccaggaatgggggatgttgcgcaccagtagaggggactggacaggaatcgtggtggtgggggtggggggttaactggaggggacagcagccctgcttgaaactctgacccctaagaccgtgtggtggagaagggcagctgcaacctgaaccaggagtgcgagctgctcctggggcgcgctgaggagggagaagcgaactggggacttgcaaggagggcaggagtgcccgaggagccgctggcctgcagcggtgccggaggagggcggtgacgaggttggagaggggcgcagggacccgcagggagcccaggcttaacgtgcattctgcggttctctcccccacctcccgcctgcccgcgcaggtgccgccgccggacgggactttaagatgaagttatgggatgtcgtggctgtctgcctggtgctgctccacaccgcgtccgccttcccgctgcccgccggtaagaggcctcccgaggcgcccgccgaagaccgctccctcggccgccgccgcgcgcccttcgcgctgagcagtgactgtaagaaccgttccctccccgcgggggggccgccggcggaccccctcgcacccccacccgcagccagccccgcacgtaccccaagccagcctgatggctgtgtggcctaccgacccgtgggcaaggggtgcgggtgctgaagcccccaggggtg

SEQ ID NO: 1140 - DNA, 6000 bp, Homo sapiens
caatgagacaatttgatcctaatgaaagaaactgctggaaatcactgataaatctcccttgccaatgtcaggattgatttcttatgagaaacgatttactccaaagaatttgtcacttcccactacttgcaaaaaggccattacagtgaatttttcccctttctttttttcttttcacttttttttaagtggtctgaaggcaaatctatctttccttcatgagtaataggatcattcgtgaaaatggctgttaaaaagcaagcaagcatggaacaaatcgcagtccaataaagctgtgactttgaaaaggaaattgctctgcttaagtgatggattctgtttcagtcctcacgacccaagttatgaggcagtccagggaccggggtcctggccctcatagtcaaagcagctgcaaagccccactgggagctcgccaaggactctgtgaatggccaaaagctgacccacccaccccatcacgtctacaggctgcagccctacagggccacagaggctgagcaagaatgtggcagtacctagcatccagtctcctccagcgaccctttcagccagcctggaatgtcccctcacccccacctcctctctgcttacttactccaatcaagggctagtttgagttccataaccttataataccctgtattatttttcatcattttatggttgtgttttctcttcccaaggactgtaagatccttgggcacaaattgcaccgatcatttagacaactttcagttagagactcacaagaaatcccagtgaagaggacgatagcgatgaaataggaaattagcagggcttcgaaccttttttctcaaagaggagatgggaggcttgaacaatgtttgttctctctgattctcaggcagggcttcctagataaaaagctgagatctggggacaatgtgagaatccttagcagtatgttgctgttgttgctttatcagaggatgttctgcctattgagagcagagtcggtgctgcaaattcttcccttctggacttcgctgaggaacagcttcaaatcaaactattccgtttccttgagaacagagaagctggagcctcggagctgtggggctccctactttcagcttatgggggcgtgagactgtgacatcaggccatccccttgttcccaagacaccaaatgtttgcttcccatcttaactctattcaaggcagtcacttcagaaggaacttttgctgaattcatctgtatgctgtagccatgtaaataaatgttctttcaaaattagaaatatttgctttaattctaaattaaatttaacattttcctttatattactgttttaagatactttgtattttgaaaggaatttaatgttttggaagagtcttagtcttagaacctatcaaaatagggcttcttcattttgctttcaaaaagaatcataagatgattgcaaccactgggaaaagataaagccaattcactaacctgggagcatctgaaaaatcaactcctgagctccacccttcaagagattctgatttaattgccctgaacaaggcctaggtctgggacttttttttttttttttttttgagacagagtcccactgtgtcacccaggctggagtacagtggtgcaatcactactcactgtaatctccacctctcaagttcaagcaattctcatgcctcaacctcccaagtagctgggattacaggtgcccaccaccacaaccagctaatttttctatttttagtagagactgggtttcgccatgttggccaggctgatctcaaactcctgaccccaagtgatccacccacctcagcctcccaaagtgctgggattacgggtgtgagccaccaccacttccagcctacaggtctgggtattttttgaaatctccccagtgtttcactggccatgtgaaaatcagactccaggacatgagtctcatatatacttctgttggagtatttatcactttataccatcaatactcatgagcatatctccctctctgtagtggtagtttctgaagggctgggagaggactgtcaaaacccaaagtgcctaccattaacccacctccttctgagggaccatcctctgtggagggaatgtggggaggaactctaggaagtatctcaagcaaaggtggccaggctgtgtactctgtgatgccaacaacctggacatgaatgattggcccaggataggcacctgcccccaggtctgcggatatacagggtgttttgcaacctgtaaggagactgatacaaaggctcagtccaactctcacccctggtgaatccctagcaggacaaactagatcctttcactaaaggagtttaaatgtgagatcaactgagagctgagcagttggtagcaggagcagaagccaaaggacacccaggggaaaacagcgagagaggagctgaatcaccttggcggctaagccgttagtggggatcggcagatgcctgctgctgagggggcagcgagataacccagtcacagagctgtatcctgaatgaccttccagttcctgaacttcaatccagttttcatgaggcctggctgggtggcctttccggaaggcttttcggagacacgtggcggaatggtggagattccggtcagccttccttccacagtaaattcccattactgagggtaaacctcagtggtatctgttccttgcaacccccgccccccgcccaaaaaaaaagcccaatcagcacaatgcccagggcctagcactttgcctggcacacagcaagtgctagatatttgcaggtgcttggacgggctgatcatccccagcaaaaagccctctaaaaataaagaaatcattcagagtaagaacattgatgagggtcgtcttcaaattccaaaaacaatgctaaacggcaataaatatattaagcttattctgccctctaatttctgaatctaactacatttctaccataaatctatcaaagagggaaatgtcattttctgcagaactccagagagcatcctaatttcagctaaggtatgttttgatgactcgattttcacttcgcttaatcttaaatcacagcaacgttagtaagaacaattttcctcccacactcgcttcactgacaaacctgcaaagtagctgatctttgacttttaagaagtttaataatacatgatcttccccccacactgccacacgcatttcccctgcctattgtctgtatcagctacttgaagaacacatactccccaacaaccggatgagtcataaaataagaggtacatggacgtaaactgagcctgtttacactttccctggccccagctaataaaataaaagaggtcccactgaattcaggtccaatggcttccggaaaacaggtttctgcttagcaaagacatgccctatttagtacattattttagaggtacagccaattccatgccccatgtgaatgaaatgtatttatggttatagccatgcacagggtgtgtaaggacttgccctcctcctgtcctctacaaaagaaggctcaggcagcttctggtggtgaactaaccaacaaaaggaatgcccagaaggtctcacctctcccatccacagagctctggaatgggggccgggcccctgatcgctggaaactcagcatccaagtgggcgcttgctgaagtttcccatctgcattttcgaaaatctggataaaagcaggtttagctcaacctcccctaacccgttcctgataaagtgatcttacgcctctggaattgggattttgaatgtatgtgcctgccccatgtctggtattagattacaacagcatgaaaatggagcctaggactgaggagccggccagcctcagaagccttcttcattgcctgccatgtaatacatgatatgcaaagcctctgacttcagccagcagatatttggagaccgtgttggccttagcatggggactaaactaatgtgtgtttaggtcagaaagcgaatcagaaaagccactggagggcacgtcacggagtgagagccctataaattcatccccactcgcagcgtcccctggcaaatactcggcttccctcacccggccgctccgcacctctccttctcggtgctagaactccggccggcagctccttttctcgccactgcctcctgccctgcggagaagcgagagggcgagacacccgagcgggaaggccggccttcgacaggcgcgaggaaagcccggcgctgccctgcaccggcagagcgccaccctcccagtgcggcgcgcgggggcaaagcccggcgcgggcgccgcggtcaagttcggattgcccctttcggctggcccgcgcagagcgccgcacattcctctcgatttttgatccacccggagaggagaaggcgctagccccgcggcgtctccgcgctctcagcgctctccctgcagcccagggaggggcgcctcgcgtcgcccactcgcaccccggccccccgcctcgggaactccagggcctcctcgctgctctcctctcctcccccaccgccaggcccagccgacgcctcccgacccctccctcccggggccccgcgcctcccctcccccaccccggaccccggacccccagcccgggctctagaagaccagcctgcgctcctggcgccctcatgtcttcacgggactccccgcgccggttgacgtggtgtctcgttcggatctccaggcaagacctcagctccggcagcagcatcagacaaaccagtctcgtgctcccaggcagtgcgcccagaggaggcgcagagcgcggcagctgccgctgagccgcccgcagcgccccgggcccgcgcagccccagccaagagcgcgacgcgcgcagccctgtcagccccccacccaaagcagcggcggctgctcggacctcggcttctgggggtgcgggggcccggcgggagagttgccggcagccctcgccctgttggcggcggcggcggcgggagtcttggccgccgcctccagcgcgcccttgctgccccgcgcgaccccaggattgcgaactcttgcccctgacctgttgggcggggctccgcgctccagccatcagcccggatgggtctcctggctgggacttggggcacctggagttaatgtccaacctagggtctgcggagacccgatccgaggtaagtgagggagcgggccggggagcagggagcgggtggtgcctgcgtcgcgggtgggtgcggccggctgaagggcgccctagtcagaggggtgcgtctggaccccagagcaaacggtgagagtagaaagtggaaagactagagggaacctaagctatgcgaggagagagaaaagtagaaccggagagaggccggcctttcggaggggcatgttgccttttccacgtgggcaaagatctgtggagccccagatgcgcctggacccggaatgcccaagaggggcagtttccttccccgactcggccaggtgctcttccgtcaagtcacagaacgattcagggcttgggtcatcttcgaacccaccgccgtcgaaatgtgtcctctctggacgtgcagagatactatcattgccaagagtgcaacttactattgagcttgttttgatctgtgccaaggaaaagcgcaggccgggggaggggctgctgcaaaggtgctgagaacctaaaaatggagggctcacctcctccgggcgaggtctggcaaagctacattcctcacccggttgcctgcacgttcctaacgccctccaccccaactaaccatccccgtcgaggttaggagaggggctttcttgccagtcctggattcaaatctctgtctcgaacgtattcttgagactccactaggccattgaggttattattttaatgacccctttttctcctgtactctgtgccgccttccaaaaacaccccaccaccactgccactactttacaccacctcgaggctaattccgcactggtggtttgtttcctgccccaacg

SEQ ID NO: 1141 - DNA, 6000 bp, Homo sapiens
gaggcatctgctcccttacaatgtctaaagggctagagaggaagccgctaactgctaaccacacagctcctccatgaggctggacattctccaccacaatgttcgtatgtcttcatcagtgctgagatgtactgtaatttatttgtactgataaaagctacagtgcttaagtttgcaaacaatttactttttccctacttttttttttttgagatggagtttcaatcttgttgcccaggctggagtgcaatggcacgatctcagctcactgcaacctctgcctccggggttcaaatgattctcctgtctcagcctcctgaaaagctggggttacaggcacacaccacgacacccagctaattttgtatttttagtagaggtggggtttctccatgttggtcaggctggtctcgaactcttgatctcaggcgatctgcccgccttggcctcccaaagtgctgggattacaaatgtgagccactgtgcccggtctgcttttcccccacttaaactagaaaggagtcaagttacttctataggccaggcttggtggctcatgcctgcagtcctagcactttgggagtctgtggtgggaggatcgcttgaggccaggggttctagactggcctctttaatatagggagatccccatctctacaacaaatgaaataaaaatagtcgggcgtggtggtgcgtaccgttagtcctagctactctctcgaggctgaagtaggaggaatgcttgagtccaagagtttgaggttacagtgagctgtgatctaaccactgcactctagcctgggcaacagaataaacgcctgtttaaaaaaaaaaagttacttctctaatgtaactcctgcccacttatattccaatacattttactgagatggggtagagttacaacagataggtcaggaaactgggagtaagccagggtctaccttatctttgcttccccctggtagaatggtgagtatgtaaatattatctctcctggatgggtgggggatggtggaatatagaggactgctactgtagaccatgagctctttcaaggtagggactatgacttttcattttttagaaaaatgtaattttctatagcgtctggcagttaacaaaagcttgaagaatgaaggaagtgaacatttggggatagatcaatgggagaatgaaaggaagacagggtggaagaaaatgtgacaaaaaatttaaaaaggtaattaagagaaaaagcaaaggaatacaggaggcttcttaagacagtagtctttttttttttttttaattttttttttattttttattttttttttattgatcattcttgggtgtttctcgcagagggggatttggcagggtcataggacaatagcggagggaaggtcagcagataaacaagtgaacaaaggtctctggttttcctaggcagaggaccctgcggccttccgcagtgtttgtgtccctgggtacttaagattagggagtggtgatgactcttaacgagcatgctgccttcaagcatctgtttaacaaagcacatcttgcaccgcccttaatccatttaaccctgagtggacacagcacatgtttcagagagcacagggttggggataaggtcacagatcaacaggatcccaaggcagaagaatttttcttagtacagaacaaaatgaaaagtctcccatgtctacttctatccacacagacccggcaaccatccgatttctcaattttttccccacccttcccgcctttctattccacaaaaccgccattgtcatcatggcccatccccaatgagccgctgggcacacctcccagacggggtcgtggccgggcagaggggctcctcacttcccagtaggggcggccgggcagaagcgcccctcacctcccggatggggcggctggccgggcggggggctgacccccccaccaccctcccagacggggcggctggccgggcagaggggctcctcacttcccagtaggggcggccgggcagaggcgcccctcacctcctggatagggcggctggccgggcggggggctgacccccccacctccctcccggactgggcggctggccgagcagaggggctcctcacttcccagtaggggcggccgggcagaggcgcccctcacctcctggatagggcggctggccgggcggggggctgacccccccaccaccctcccagacggggcggctggccgggcagaggggctcctcacttcccagtaggggcggccgggcagaggcgcccctcatctcctggatagggcggctggccgggcggggggctgacccccccacctccctcccggacggggcggctggccgggcagaggggtcctcacttcccagtaggggcggccgggcagaggcgcccctcacctcccggacggggcggctggccaggcggggggctgatccccccacctccctcccagacggggcggctggccgggcgggggctgaccccccccacctccctcccggacggggcggctggccgggcgggggctgacccccccacctccctcccggatggggcggctggccgggcggggggctgacccccccacctccctcccggacggggcggctggccgggcagaggggtcctcacttcccagtaggggcggccgggcagaggcgcccctcacctcccggacgtggcggccggccgggcggggggcaagacagtagtcttacaaacagtgaattggattcggtttttaactcaacatgaatggaaaagaaacaaaaccaaaattaaaacactgagcaattaaagctgctttaaacagagactatgggaaactggataagatgatgtctaagtttctatccaattttttgatctataattct[450 bp omitted]tccagagagctatttctgttttacagagatccaaaatccaaaaattctgctttacagagatgccttgtgtagaaactcaaaagtcaaacagataaaagtgaaaaagccagacaccaaaagttaaaacagtaaccactacaccacctgccccccaaatacatcagtaatcaaagatttcttaactttttgcccttcaaacaatgtgcagtcctcaatacagtaggaacttgattaaggctagctggaactgttccctgcttatctggtgtaattctaagctcaaaggcagaaacttttgcttctcctgcaatatcttcctcggaacaaaacagtgcctaatgcatgttactttgatttcagaaacagagaggagaaaatcaggagagttgggtaattgatttttgtgggattaaaaatgacatttttagtttttttctttttttatactcttttcatgaaggtaaattttgtttttttgggccattgacactggcccaatgctatgacattccaaaattgagagaatataaactttttaaaacagaacacttgattttgactactaatcagaggagtggaattgagtaacaaactcaaacattttatgaaaaataaacagactttatgctatggtatggttccatttatgtttatataatagactaagtattactcattacaagtacaataaatatttgttgatccggttgatgtaaccgtaagccttgttctctctcagtccagtgaaagtatacattttactgataatctaaaagtattaattcctatacaccaaaagatctgcgtatcatccccctcttggaatacacattcacttgcacatatccccagcctgctcctcgcaacagagcttgctttggggaggaaatttcaggatcacctccagaagaaaacaccgacagcgctcctagagccatcgtggtgccctctagcaacttacgggctccaagcgaaaaaagagctcgggttggtgcgggggggcggggagcgggaaactccatcacagacgcaagtgaaaactcctgcggcttctagattccatccgagaaggaaagatgaaaatcaaggttagaaagcagtggcagggcggtgtcccctgccttgctttaattcacgcggctctcgtaacaagccacagatgtgcatcactcaagcgggcttcccagtcctcatctcccctctggatggtcttctgcgaccgcagagtggtagttagggaagatcgcagcgggcagaaactccgccaggggagaaaggagcctgggggcgacggtccgcctaatcgttccaggaagcccctccgcgtgccggtgggcgggcgctcaggcccgaggatgcggggcgaggaggcgggtactggtgattctcctggcagcccccgcccgccccgccagggggagcgtctgcgcccgacgtaggctgcggggcctgggctggcggcgcagggcggtgactcggctcggtggctgccctcccgcgtccccaccccctccccgcccgcccccggcgcggccctgcccgccccctccgccccctcccgcagcgccatgcgcagactcagttcctggagaaagatggcgacagccgagaagcagaaacacgacgggcgggtgaagatcggccactacattctgggtgacacgctgggggtcggcaccttcggcaaagtgaagggtgagaaccccgcgggactaggcttggccccagctgaggagccgcacgacttccgctttccgcacctcttcatcctcccccgcccgctgcgtcccttctttccagggctgggcagcccctgtcccggatcctgcgggagctctccccagccgccgcggggctgcggcgcggccagcacaggccgggtgggggtgggggtggggtaggggccagtcgccatggcgacggcgccgcggcctgaggggctggtaggtacgaggggctgggatgcgaaggtgcaaactttcccaggtggggcaggcgggcggcgcggcgcgctctgggtgctgggagggggcgccgggcgcgatccccggggaggcggcatcttgtgcgcccgggttgtgctcccttggctcagggccagcccatcgcttccttggcggtccttggcgttgtcggtatttccgtcctctgtaggaggctgtcgatttaccggcccctgctgtttcccgagtgcgaaatgtgtttccgcagaagtaaggtttctttgtgggtagccgacatcattttttttaaagaccatgtcgtcggaaaggatcactggtttccttcggagcagttaatgagtataaactggttcagtatttgcgatgcatggtttacgttctgaatgagactgtgcctttagtgtttccgaattaacaggagtttctccgtgcgaaacttcgttgttagttcagatgttgcctccagatagtatttattactttattagtacagttcatttccacttattttcaaaggttatttgtattctaataaactctttaagtgcacatcattcgaacttttgttttaagaaaggtgtattgggtgcattgtacagcattcgggtgacgggtacactaaaagcccagacttcaccactatgcagttcatctatgtaaccaaaagccacttgtacccctaaagctattgaaattaaaaga

SEQ ID NO: 1142 - DNA, 6000 bp, Homo sapiens
aaatatcttattgtcctgtactcaactatttttaaaccatggttggccatggggtaacaaaccctgaaatcctgcaaagggaaaccttggataagtggagactactgtagtctttctcacattgcattactctttattctgcatctgtcttattctttttcctttccttttatttttatttgtagtagagacaaggtctcactgttgtccagactggtcttgaactcctgaatcttcctgtcttggtctctcaaagggttcgggtgccctgccatccttctcctacttttaaggccccttgtgattacattgactccatccaggtaacttccttatctcgagtttcgctaattagcaaccttaattccctctgcaattataattgtcctttgccacataacctaatttattcgtaggttgaggggattaataccttgttatctttggagacagccattattctgcctaccacggggactatgagaaatgaggtcagtgtagaaaaggtaggacaggtgtcaaccattaaggaaccaagcagtgtgacaggcattatgtcagtctctttactccagacattcccagaattgaagacaggagagaattatttttcctcctctctctagtgttcggtggttctttttggtgtatgtcaaaccatgtaaattttgccctgatcaagtaaacccttggctttctttaaagaggtctatgaaggctagtcagaccctccaattttctatacaattgctaggtttaggtcagggctagtgactgtatcaactttttttttttttttttttttgagacagggtctcacctgtcacctggcctggagtgcagtggtgccatcgcgactcactgcaacctctacctcccgggttcaagcaattcttgtgcctcagcctcccaagtagctgggactacaggcgcacgccaccaccacgcctggctaatattttgtatttttagtagagacagggtttcaccatgttggccaggctggtctcgaactcctgacctccagtgatcagcaccccctcagtctcccaaagttctgggatgacaggtgtgagccaccacgcccagccaggactagatcaacatctgaaacggatgatctaaggctgttagcctaggcattcaccccctgacattttgctttttggcagtgatagaaactatgttaagtcctgcatccatggttctgatacaatcaagtctcttgaccaccaggactcagcactgagacctgcctctttttatttctacaatacatgaaattactgttgacttttgtctttaaaacatcacataaattcattaggagcaattcaagggagaatttactgtacattcatacctatgataaagtttaatttatgaattagcacggtaagattaacaacaactaataataaggctgggtgcggtggcttacacctgtatcccagcactttgggaggctgaggcaggcagatcacctgaggttgggagttcgagactagcctaacaaaacaaaacaaaaaaagctcaaaaaacaacaataataaaatagaacacatttaaaacttttaatcctgtgttattattctgatttgaggtctatactttcaattttgtacctcctggctatattttatataatagagaacatcctggttacactcatccttcccccacctcacttcctttgcattctaaggctgtggtatgcaaatttctgttattaagaaacaatttttttttttgagacggagttttgctcttgttgcccaggctggagtgcaatgatgctatcttggctcaccgcaacctccgtctcccggggtcaagtgattctcctgcctcagcctctcaagtagctgggattacaggcatcgaccaccatgcccggctaattttgtatttttagtagagatggggtttctccatgttggtcaggctggtcttgaactcccgacctcaggtgatccgcccacctcagcctcccaaagtgctgggattacaggcgtgagccaccgcacccggccatcaacaaacaatttaaactagacagcctggcatggtggcttacacttgtaatcgcagcactctgggaggctaaggtgggaggatcacttgagcccaggacagcctgggcaacatagagagaccccatctctacaaataataaaaaaaatatggttcacgcctgtaatcttagcactttgggaggccaaggcgggaagattgcttaaaccgaggagttcgagaccagcctggacaatgtagtgaaaccctgtctccacaaaattttttttttaaaaagagctgaacaggttggcgcaagcctatactcccagctgctcaggaagctgaggggggaggattgcttgagcccaggagtttgaggctgctgtgagctatgattgcaccattgcactccagtcagggcaacagagtgagactctgtttcaaaacaaaacaaaaggaaaacttgtagaaagaagtttaaatttcagtgctaagtttcccacttcaagtgaacacttttttcccattggctttgaaatctcagaaaggttactgtgagaaaggagcatatttagggttgagcattggagaggagactggtggtttgggacacctgttattaaagtaccttcctggtcaagttgaacaacaacaacaaaaaattggcaatctttatgacagtgccaatcaaattgtggacatgaggtgggatgcatcacttgaaagccatacttttgagatacatattttaaaactcttacctagagtataatggtggttaccagagagaggctgggagttgcggggaagggaagggtgctggtcaaaggatacaaagtcacagacaggaggaataaattataagtattgaaggtgatgtatatgttaatttgagtgaatcattccatactgcatacatataaaattactgaatatcccataactatatatgattataattggtcaaagtaaataaaaattttaaaactcttcaattttataaaactcttacctaatattaatttttaatatcatatgaggatttttttttttaagagcctaggctagagtaacttactacaacctcaaacttctgggccgaagcagctctcctgcctcagcctcctgtcccaagcagctgggactacagatgcgcaccatcacgaccagataatttttaaattttttgtagagacagggtcttgctatgttgctcaggttggcctcaaactcctggtctcaagtgatcttcctcagactcccaaagtgctgggattacaggcatgagccacctcgcccagccaggattttaaaattcttttttaaccttggagataccagaattgtattactcattatccttggttcctaatagcattggttcatgcatgttctgcttttatttacatattagctatttacctttaacaatatagtagccctgataggcccaactcctacattgtaggacatccatgatctcctccccaatcccatcccatccccaagctccccatatgcgaggtaaccatcattctgaatttcatatttatcattctttgctttttgttttgtataattttaatgacttcatgtatactcttaaatgtaagggtgtgtttattttcaacttttaaaaaggttgtcatactgtatataatcttttgggatttacagtttttccttactattgttatgatttctctatattgtgggtcactgaagttcattctttttgaatgccatgtaatattatgttataagaaatatcacagtttattcatccagtatcctgttgctagttatgcagatcgctttcaggttcttgtgaactatgaaggagtaaataaagaccaaccaggtaattttcttaaaataaataataataaaaaaccaaaaatgtaaaatattaaatagtaatgtttaaagtggaagtataaatctccctgtagtcatattctcagagataaccagtgttaaaatttgggatatctcttgtcttctttaaaatataatgcatatctgcatatacatattatatacatatactatatacacattaagttttttaaaacaaaaatgagatctataacttgctgtttccatagcaatatatcatggatatcattacttgtcaatatgtagagatgtactttatcctttttaacagttctttggtgtttcactgtcgacatgtcaatatttattccctaaaccccaactttggttattttcaattttgtactgttgtaaacaatgttgtaatgcagattcttgtacatacatcttcgggcatttgctcaattatttccttaagataatttcctagaactggaattgctgggttgaaggatatgaagttttatttttgtctgtcttcaactttatttatttattgctgtatattgccatattgcccaccaaatatcaattaataatttacattcttggcatcatagtatagttctctgagcagggaatacctagtccaacctgaagttcaagagcgacttcttggaggaggtgaccctgggtctgagtcatggtgagaatttatcaagacttcaaaagagcagataaataatccacaaggaccccggatcagagagtgctccgagctgggttgccccactgtgcttgtatctgcactctccaacactaggcatcattgacatgttaaagcttagccaaatagaattgttctttgtcattctttttttaacttttacttattcattaggatgatttcataatatatttcctggtttagaggaaacaggaacaatggctaccgagagtactccctcagagatcatagaaagagaaagaaaaaagttgcttgaaatccttcaacatgatcctgattctatcttagacacgttaacttctcggaggctgatttctgaggaagagtatgagactctggagaatgttacagatctcctgaagaaaagtcggaagctgttaattttggtacagaaaaagggagaggcgacctgtcagcattttctcaagtgtttatttagtacttttccacagtcagctgccatttgcggcttaaggcatggtaagttgactttgtatactttttggggtgagaggaagggggcagactttctgaaaaagaaaacaaaatgaaagaaaattgttgccttttatttttgttagtctttttctggagataattttcattgaaatatgaaatagggaaaaactggaatttaaaaagtttctgaaatttaacatcttattggtctactgaatcgataatttgtttttcagactgtactcaaaacttgaagttgttttagtgctaacaaactgctcattattctggcagtaacatgctaaaatctcacagttggaaggaaaatactttaataataacacaatccagggtttgtttttcaagtagatgaattcgtggatatttacagtgccaagaccacaagctgtatctttcacttagtatagccgttttgaaaatacaaggaaaataatttttaacacatagatggcaaatcagtagtttcatttttttggtgataagaatgccagcagcagctgttttctggagcaattccagtgctaattcttaaatggttcaaagataactagtagtccatgaaaaagcaattcttccagttatttagcaattctgtaaattactactaggactaggtctagctctttttctaggaatctaaaaaaaaattcaaaattattttaagggatgttagagaggtagaggctcagataaaaaggtgaatgttagtgatacctaatttaggacaagatttatatgcttagaaatttttcttttattatttctaaagcacactattccaaatagagccatttgcttactgattagaaattatttgtgatcagatttcattagcaatgaccccaagagacgtgagtctgttgtgagtcacagtaagtccacaagtaaacactgttcatatgattcaaatttttcgt

SEQ ID NO: 1143 - DNA, 6000 bp, Homo sapiens
actgaatgaatgaacaatcccctaatccaaatcctggatataacctttaaagaaattatataggatagccattgatgtaatataaatatttaatccacaaaatcattaccttttctacctgcagaaagctattatctagaaagggttgacttagttggctacagtctttggaatgtgtgcaaaagtacattcacacagaagatggtcaaagtaaaagacaaaaacaactacctcagtgtcagatttcaaatgtatagtatttaaacgaggattttaaaacaactgtactttgtgccaatgcaaaagtttaaaaatgttaagattcaacctatgttttaacccaaagaaaaaattttaaccattatattcttagaatgttacaaataccttcaaagaaaatgctataaaattaatttttaccttgatacatagcttgtgctccagtccaagcaaaaaggcttgcaatagcattagctctaaaaacaacttctatctgatcagcacagttttgtctcaaaagcctttcccttcttaatttgtcaggtaacagatgaaactgggtgtgaccgtaacagcaaggatctgcagtttttgagcctgaagagcaaaataaaaacatttcagatgaaacaaacatgtagaacatgtggagcacatgttttagtatttgagccttttttttccttctttatacatcatattctcagtactctaaatacataagtaggaatattagtttacttatatatcttatggatcataataaaattaaatttcacaggaaagcataatttctcaatctgctagctatcataaagcccatcataacatggaagaagttgaaagaatatatagacaagttatttaaaatttctatgatctgttttctcaaatcccttagtcatgattagctatggttgtctccttgtcatattaactaagaggatacagccacttcaagactttaataacttatttaatgaaataattacacactttgctcctaatttttaaaaatcatttttacactacttttctaagtaaaaaaaaaaaaaataagtagcaacatttcatgaaatgctgacattcttgattctagtggtagtcttttcaacaaaaagttccttgcaggtcactccctaagaccacagtgactgagaaaaggctgataaaataggtctggagggctggtataaaaccttcttaagacttcttcacattgggtaggaattaacaaaggaagaaaaaattgcaaaaaaataagctgcatgagggagggcagacatcagacattatgaatttgtgaattccttatcttaccaccatgcatggcacaaataggacacttaaaaaagccaattgctatctcaagtccagttctaaaagtttttacttttaaaaaaacactaatttttctatctaataagtcaacaaagcctattttctaaagttaaatacttctattttggtagaaacaagtaaaatttcaaataatgaacttaatattttctttccagtgtttatgcatgttgtaataacctgagattacgaattatattgctcatagactatgtaaacctctcggtcttcgagaattaattcctcattgtagtcaatactccaaatttgcatacgacacttggaacacatttatggtacaatatgtcaaaagagaaacttaccaacaaatatgtggttttcatactgccgtttgaataatggaagtttgtctggtttacattttatagtggggatttctataggaacagaataatccaatggcacaaacttaaagaaaaagaaaagacatactaaattcacagcaacattagtatgtattttactcacactcattagatttaaaaatcttaaaatgaggtgatttcacaaaatgatttgataatactatcatcgaatgatgggccaaatcgagcaagccacctgtttttacaagtaaagttttactggaacacagccgacacatattcatttataaattgtgtatggcgctttgcactgttaagagcagagctgaacacttgcaacagagacttacggcctgtacagcccaaaatattaactatccagatctttacagaaaaagtgtgtcaacccctgacatgaaagcatagacaatactcaaaatatccttgtttttctccaaaagaactgcaaatatgtaaaatggcccagttgataactgttaaacttccttgatttatgactagtctagtaaattacaatcacaaattacaatcgtaaactatttcagaatttttatattaagagaaacatatagatctgtatggtcaggcaaaatgacactttaacccgttattgttaaaatggttatctgacctttatggagtataccaaagcagatttaaaaagctaaaaagatttttgagaggtgatgtcttcaaaaaggaaacttgaaaggcaagagatccacctgaaacattttattctactaagactattactcaacctgcctatgacaaatcctacacgagatatcaatagatacataatcgcaataaatccttacctctgcgagttgcttggatattcgaatctggttgtttggtttatcatctatctggtatcgcaagtcatcaattcgacctcttcgatgaccacgaggaataatttcttcaccacgcacccagtaaaaatgaactgggcatctataatctatcaaaaagatattcaaaatttttttcatctgatcatctaaataaatttggttactattagaacactaaagagtactaacttagcaaatgataacttaggaatgattgaggtaagagtctgggttatgtggtaatttaactattatgacttaaatataacattcaaacatttattgtctacttgtgccatcattacaatgaacagtaaccaaagagattcctcattaggagtaataaaagaaaataagattaacaagaatatcattcaccataaataaaaatagggctattttatgaacatccaattcaattttcacaataactcccaaaggtatgtatacttttcattatctctattttataggagaagaacctgggtcttgacaaagttaaacaggttttctaggccatccatcaggagtagtctaagtccatgacgctttcctcaagaccacttctttctcaactggggaagggaaaaaacatgcacacaacaaggctaggttgagcacacatctacagtcctaacattacttcaataaatattaagacatacacttggtagaagatataaaataatgaatgcgtcaaaaacaataatttttaaaattatttatacgttaattacttttcatgtccgccctgaacagttacacggaagctgctgattttttactaggaacttggaatgggagtttgaagtttgaccccctaatctcttagctatagggtgtcaggcagacacatttaacgtttctatgcctcagtttgttacgtttttgtctttttttcatttaccaaaacattgctacctatcgtgaacggttattgtgagcattaataagttggcacatataaaatttagaaccagggcctagcacataaatactgagtaaacgttaggtatcttagttaatacttcatttaatcttcacaattctacaacaaagaactactaccgtaaaacgcgaaaaattaagcaaaaaagttactaaagaaaaagaaaagacatactaaatttaaaattaaggtaaaaagaagttactactcagccatgtgacacatggtcacacagctttgtggtggaacagccaacaggaaacctggcccgccccactctcttaagtggcgtttctcttcatcaccactgctcttccatttggctgaacactcacaaagtagaatccaggactggaatcctggagagctcaggctttcagagttgaagagctggtaggtgttagcgcagccacacacacctagtctctagattcctaacgcagtgactgttacaaaaccaggccaccccagataggaacgaaaggactaggaaaacatgaacgaagcagagagaaagaaatgacgaggggtaaatctgcggcagagtaacccagtacaatccccatctctcccttccgccctggggcggaatccaaggctcaccgagggcggcagcggccagggccgggttgtgtgggctgaggaggcccacgagggttgacaccagctgatccaggaagggcaaagatatgacctcgctctcctcgtaacggtgcacgcgccgcctgcgccgcaggtagaagtgctcctgcagcaggcagtcgcaggcgaccgcacgcagcgccgcgaggtccagcgcaggttcaggttcgggttcgggctcgggctcgggctccgctgggggcggcggcagacccgacaggaacacggtcttggtgaagtactggtaccagcggtcggcattcagcgcgaaggtctgcgggtaaaccatgtacttcataaactgcatcttggtgaggattcgcagcttctcgtctaccgactccgcagcgtgcaccgtcgcctgccagcgctcgatccgccgcagccgtgcagctttgctgtcggctgtcatggaggccacaatcggcgggtaccgcgcgacgggggtcgccgcgacgtcttggcaggtcgtttctgtagccgtggcggcggcattagccgcggtgtgcaatgaaagcctcggaccgcgtagcaaaggcctccaacacctggccgccgccatctttgcccgcgattccggacccagaggtcaacttaagcaattgtccttgccctcttgctgtagggaccaatcggaaagcggaatctgagccagtctgggaaaggacgattctcagtgggcgtgggttatgttgcgtcattcatggtttagccaatcatataacttctccagtcgtggtttcctgcgtttgtagatggaaggaagaacttgtgtgcttagacctgacgctgggaggagatgctgccacctaggttacttgtaggaccctatacggcaacctcctttgccaggaactatttataaacatcctgcaggaaaatggtaagcccttggttaaatttattggcttcatttatgtatctcacaacacttcttttctgttttagttctaggaatagaaacttacttttggaaatacagtactagcatgtttttcagtatatttgattatatttaaaaattatgcaagcatcactcgtgacctactattcatctttgggaaaataattccatatatttatctgtgctaaatacagacaatttgtttaatgatatttattttgaaaggggggtgtatttttacttggatttaactggggaagacagaaagaaaagggaaataaaactatcaaagaagtgtgtttaaattttgccttgtattaaaacccattataaattaaacacgagttcttactaatctgtgagcctcttaaaaagggactgatttaatttttaatcttcagcaacaaatcaatacttgtgcataatgggtgctcactaaatatctgctaagaagtcaccaaagtctcatttcgggtaatctaatttattgattcactcttctgtaattagggaccagaatattaatttggatttattgtaataattcttcagggtattaaaacacaaatgttgctaaaaagaatttataactatatttttaagttaaaacagatggtacggttaaactttgaaattgcaagtctattaaactgacctttagaaataaaatgcaatacttcagtttcattaataatatcttctgtgagaagttgctagtggaatctaaaatatcctttctacattgttaacaaaaggaggatataaaaacttgagatctttaaaccgatattcaatatttaaaaagtgaggtgctcaattttatctaagttgaagtgacagttttttgtgtaaataagtaataaatacgctgtttgagaatgtatcatagaaatcctaggttgatattttttaaattct

SEQ ID NO: 1144 - DNA, 6000 bp, Homo sapiens
ctcatttgcttttattttttaattaaaattttattttaagataattatagattaacaagcttttgcaagaataatacagctaaatctcctgcacctttcacccagtttccaggaacatcttgcagaactatagtaaagtaatacaccaggattgacattgatacagttaagatagagaacatttccattaccacaagaatcccttatgttgctcttttataggaattttcactgccttcccatctcactgactccttaatctctaccaactattaatctgtgttccatttcgataattttgttacctcaagagtgttatataaatgaaatcttaccatatgtaaccttttggtattggctttttgtaaatccagtgtaattctctagagatttatccagatctaccgtattaattgtaaccatgcacctgttcaagaacatctgcttgtttgtttccgatgctgggctataatgaataagactgtatcatgaagaggtttttgcttgaaaataaattttcatttatctgggataaatgccccaagagtgcaattgctggtcaaaacttaccaagttttacgtttatggatcatgcttttggtatcaactctaggaactctttgcctagtcctatatcctgcagtttttttctcttattttttggtaataattttatgcttacattgaaatttgtaatcattttaatttttccaaaaggtgtaagagatagattgaagtttatttattcatttatttattgtccaatggatgtcctattgtcccaacacaatttgtcaaaaagtctatctttctccattgattactgtagctatacattaaggcttgaaatcaagtagacctatcctcctattttattcttctttttcaaaattgttttagctaatcttcatctgttgatgtgtacaagttttacgactttccagacaaaaaaagtggggagagagggaagacaatatttactttgaaaggtgattgtgactatgtgattatgcaggagatttaaatacatatgaagttcttaatacagtagctggcatataatgtagacacttagcttccttcctattatttccgaaccaactatcagaaacccttcaaaaacaaaccaagcacaaaactgcacctttctttccccaaaatattttgttctcagttttacataaatttgttatatatacaactgggtaagatatctgccttacgtaggaaatatatgtgaaagaaacaaagctcaaaaagaaccagctgcaactcccactacatctgttggtaggaaatagtttctgtttccttctcacctcatcaatttgatagtgaaaaagctctggtaaaaactacagttgattgggaaagattggtcttattcaaacatcaacagaactgtctgatgcccaactaaaattgatcaagacagatactcaataacaaaaactactgtggttacaaatattatcccactcatcagaacctgtttctgaagatggtaattgtgattattggaaaagtgttccattccaccttagctgtactggcttccttgttaatcctttatccccttcaggtgttattcaaatgtcatcttctcaagaaggccttgtgtgattagtttattgaaattattccactcaactcctatgtctaacactattcagtctcctttcctgcttcaattttcttcttggctcctagcaccatctaacttggaacatgtatatgtgacatatttggctagattatttcacccattagcatgtaaactccacgaaggcttttattttactgcagtattttctgcacctagaacagtattggtatatagcaatcacttaaatatttgttgaatgagtgatgtagagaaggttcaaaaagccactggagaatgtcatggcttgaccggtttgaattgtaatactttaaatcaaagatcaatggaaacattaataggaaagatcttaacatcaattttcttccaggagaatttaaacataaacacatacaaatagataagcacatgctttagaaactctcccattcccttctctaaacctcaacccactctctctaccacccttccctaaaaaaatgagagattaaagaaaaagtaaacacactgtgtccatgggcctttttctctcatccgactgctcagatcctaaattttagagtctttctcgaatcatctttttctcattgcttcccattgtctccactgctattatccctttaagccacaatcagttcttgcctaaaatatggccaattgtctgctaactggtttccctcttccaaatttgacctgcgacaatctttatttccaaatcagctacaatgcaatggactggattgtctccctactaaattcatatgctaaaaccctaacccctaatgtgagatagggactttatagaagtaactcagatttaatgaggtcacaaggggagggccctgatctgataagatccttatgagaagacacagcaaagatgttgttttctctccaccctatgaggacacagggagaaagtggctgtctgcaagccaggaagaaagccctcaccagattctgaccatattggcatactcatcttggacttccagcttccagaactatgagaaaataaatgtctgttgttcaagccacccagtatgtagcattttgttatggaagcccaagccaactaacatgctgagaaattcttttaaaaacctaagtcacaccatgacaatcttctgagtagaagcctccaatggctctccagtcttaatcctagcaattgccttcaggagcctttagtttctggctcttttcctttgtagccgcatttcctactacgttccccacccatcattcctttcaaccacactggccaatgacctaattcttgaacccatcaggcatgtttccatctcagggccctgtactagctgcactttctagaataccattcactgatactggtatggttcactcctcacttccttcaaacctttgctagaagaatgtaatcctttcaataagcattgcaaacaacactcctcacctgcccccacccccaccaaatacattgcactgatgatcttcacttctccagctgtttttttcccccgtgtgcttatccccttctaacacatcatataatttactactatgattatattttattgtctgtctccctgttagagtgcaaacttttgtttgctttgttcattaagtatcctgagcacttagaacacagcctaacatataaaaggcaatcaataaaattcatcaagtaaaactgactgagaggccagcagcctggattccagtcccaatactgcccctaccatgctatataactttggctttatgtctgtttccttgtgtgtaatataaaagctttggatcatattagatagcctactttccatggctctgactcagtcctttctcatccgtaggctgttttgttcattgccagtcttactccacctttcctctggcccagactgctccacccttgattaagtatactctctttcccacagcctccttccttggttcataatgttgatgatcagtaagtattgaataaattgaagttattttgattcactcacaaaaaaccataaaggcactttctgacaggattatgtcttttggtgttaattggtctctagctctaatttctaatcctaaaatctatgctgtaatactataagaatttaaaaaatatcaacctaggatttctatgatacattctcaaacagcgtatttattacttatttacacaaaaaactgtcacttcaacttagataaaattgagcacctcactttttaaatattgaatatcggtttaaagatctcaagtttttatatcctccttttgttaacaatgtagaaaggatattttagattccactagcaacttctcacagaagatattattaatgaaactgaagtattgcattttatttctaaaggtcagtttaatagacttgcaatttcaaagtttaaccgtaccatctgttttaacttaaaaatatagttataaattctttttagcaacatttgtgttttaataccctgaagaattattacaataaatccaaattaatattctggtccctaattacagaagagtgaatcaataaattagattacccgaaatgagactttggtgacttcttagcagatatttagtgagcacccattatgcacaagtattgatttgttgctgaagattaaaaattaaatcagtccctttttaagaggctcacagattagtaagaactcgtgtttaatttataatgggttttaatacaaggcaaaatttaaacacacttctttgatagttttatttcccttttctttctgtcttccccagttaaatccaagtaaaaatacacccccctttcaaaataaatatcattaaacaaattgtctgtatttagcacagataaatatatggaattattttcccaaagatgaatagtaggtcacgagtgatgcttgcataatttttaaatataatcaaatatactgaaaaacatgctagtactgtatttccaaaagtaagtttctattcctagaactaaaacagaaaagaagtgttgtgagatacataaatgaagccaataaatttaaccaagggcttaccattttcctgcaggatgtttataaatagttcctggcaaaggaggttgccgtatagggtcctacaagtaacctaggtggcagcatctcctcccagcgtcaggtctaagcacacaagttcttccttccatctacaaacgcaggaaaccacgactggagaagttatatgattggctaaaccatgaatgacgcaacataacccacgcccactgagaatcgtcctttcccagactggctcagattccgctttccgattggtccctacagcaagagggcaaggacaattgcttaagttgacctctgggtccggaatcgcgggcaaagatggcggcggccaggtgttggaggcctttgctacgcggtccgaggctttcattgcacaccgcggctaatgccgccgccacggctacagaaacgacctgccaagacgtcgcggcgacccccgtcgcgcggtacccgccgattgtggcctccatgacagccgacagcaaagctgcacggctgcggcggatcgagcgctggcaggcgacggtgcacgctgcggagtcggtagacgagaagctgcgaatcctcaccaagatgcagtttatgaagtacatggtttacccgcagaccttcgcgctgaatgccgaccgctggtaccagtacttcaccaagaccgtgttcctgtcgggtctgccgccgcccccagcggagcccgagcccgagcccgaacccgaacctgaacctgcgctggacctcgcggcgctgcgtgcggtcgcctgcgactgcctgctgcaggagcacttctacctgcggcgcaggcggcgcgtgcaccgttacgaggagagcgaggtcatatctttgcccttcctggatcagctggtgtcaaccctcgtgggcctcctcagcccacacaacccggccctggccgctgccgccctcggtgagccttggattccgccccagggcggaagggagagatggggattgtactgggttactctgccgcagatttacccctcgtcatttctttctctctgcttcgttcatgttttcctagtcctttcgttcctatctggggtggcctggttttgtaacagtcactgcgttaggaatctagagactaggtgtgtgtggctgcgctaacacctaccagctcttcaactctgaaagcctgagctctccaggattccagtcctggattctactttgtgagtgttcagccaaatggaagagcagtggtgatgaagagaaacgccacttaagagagtggggcgggccaggtttcctgttggctgttccaccacaaagctgtgtgaccatgtgtcacatggctgagtagtaacttctttttaccttaa

SEQ ID NO: 1145 - DNA, 6000 bp, Homo sapiens
attatataaatctaagtcaattttgagtataaggttaaaatacatatatatgttaaaaaaagatgagcctagtaatcaaatatgtagtaaaattcctcttggatattcacatagtgttaatctacttcatattacattacttcaggttttagaataaaatccaaatgccccacaatgagctctaatagtcctggaagatatagcctctggcttccactgtctccttctacatcattctccttgtcccactcttcattacccttcatgttgttcctaaatatttcaggcctgttcccacctcagggacttttacttgctgatccttttgcctggaagtgtctttacccagatttgtgcataggcagctcctcgccattcaggtcttagagtaagtcatttttagggacctctcctgaatgactttttaaaaatagattcttctccatacctcatttatacctgcccccctataaatcattctactctttaggctaaagtattttccccatagtattaccactagttataaacattacatgcttattatcttttaccaccccacacccccactataatataagctctaagaaagcaggatctgtttcactcaacactgcatcttgaacagagtatagcatataaaaaagcagttactgtttactgaatgaatgaacaatcccctaatccaaatcctggatataacctttaaagaaattatataggatagccattgatgtaatataaatatttaatccacaaaatcattaccttttctacctgcagaaagctattatctagaaagggttgacttagttggctacagtctttggaatgtgtgcaaaagtacattcacacagaagatggtcaaagtaaaagacaaaaacaactacctcagtgtcagatttcaaatgtatagtatttaaacgaggattttaaaacaactgtactttgtgccaatgcaaaagtttaaaaatgttaagattcaacctatgttttaacccaaagaaaaaattttaaccattatattcttagaatgttacaaataccttcaaagaaaatgctataaaattaatttttaccttgatacatagcttgtgctccagtccaagcaaaaaggcttgcaatagcattagctctaaaaacaacttctatctgatcagcacagttttgtctcaaaagcctttcccttcttaatttgtcaggtaacagatgaaactgggtgtgaccgtaacagcaaggatctgcagtttttgagcctgaagagcaaaataaaaacatttcagatgaaacaaacatgtagaacatgtggagcacatgttttagtatttgagccttttttttccttctttatacatcatattctcagtactctaaatacataagtaggaatattagtttacttatatatcttatggatcataataaaattaaatttcacaggaaagcataatttctcaatctgctagctatcataaagcccatcataacatggaagaagttgaaagaatatatagacaagttatttaaaatttctatgatctgttttctcaaatcccttagtcatgattagctatggttgtctccttgtcatattaactaagaggatacagccacttcaagactttaataacttatttaatgaaataattacacactttgctcctaatttttaaaaatcatttttacactacttttctaagtaaaaaaaaaaaaaataagtagcaacatttcatgaaatgctgacattcttgattctagtggtagtcttttcaacaaaaagttccttgcaggtcactccctaagaccacagtgactgagaaaaggctgataaaataggtctggagggctggtataaaaccttcttaagacttcttcacattgggtaggaattaacaaaggaagaaaaaattgcaaaaaaataagctgcatgagggagggcagacatcagacattatgaatttgtgaattccttatcttaccaccatgcatggcacaaataggacacttaaaaaagccaattgctatctcaagtccagttctaaaagtttttacttttaaaaaaacactaatttttctatctaataagtcaacaaagcctattttctaaagttaaatacttctattttggtagaaacaagtaaaatttcaaataatgaacttaatattttctttccagtgtttatgcatgttgtaataacctgagattacgaattatattgctcatagactatgtaaacctctcggtcttcgagaattaattcctcattgtagtcaatactccaaatttgcatacgacacttggaacacatttatggtacaatatgtcaaaagagaaacttaccaacaaatatgtggttttcatactgccgtttgaataatggaagtttgtctggtttacattttatagtggggatttctataggaacagaataatccaatggcacaaacttaaagaaaaagaaaagacatactaaattcacagcaacattagtatgtattttactcacactcattagatttaaaaatcttaaaatgaggtgatttcacaaaatgatttgataatactatcatcgaatgatgggccaaatcgagcaagccacctgtttttacaagtaaagttttactggaacacagccgacacatattcatttataaattgtgtatggcgctttgcactgttaagagcagagctgaacacttgcaacagagacttacggcctgtacagcccaaaatattaactatccagatctttacagaaaaagtgtgtcaacccctgacatgaaagcatagacaatactcaaaatatccttgtttttctccaaaagaactgcaaatatgtaaaatggcccagttgataactgttaaacttccttgatttatgactagtctagtaaattacaatcacaaattacaatcgtaaactatttcagaatttttatattaagagaaacatatagatctgtatggtcaggcaaaatgacactttaacccgttattgttaaaatggttatctgacctttatggagtataccaaagcagatttaaaaagctaaaaagatttttgagaggtgatgtcttcaaaaaggaaacttgaaaggcaagagatccacctgaaacattttattctactaagactattactcaacctgcctatgacaaatcctacacgagatatcaatagatacataatcgcaataaatccttacctctgcgagttgcttggatattcgaatctggttgtttggtttatcatctatctggtatcgcaagtcatcaattcgacctcttcgatgaccacgaggaataatttcttcaccacgcacccagtaaaaatgaactgggcatctataatctatcaaaaagatattcaaaatttttttcatctgatcatctaaataaatttggttactattagaacactaaagagtactaacttagcaaatgataacttaggaatgattgaggtaagagtctgggttatgtggtaatttaactattatgacttaaatataacattcaaacatttattgtctacttgtgccatcattacaatgaacagtaaccaaagagattcctcattaggagtaataaaagaaaataagattaacaagaatatcattcaccataaataaaaatagggctattttatgaacatccaattcaattttcacaataactcccaaaggtatgtatacttttcattatctctattttataggagaagaacctgggtcttgacaaagttaaacaggttttctaggccatccatcaggagtagtctaagtccatgacgctttcctcaagaccacttctttctcaactggggaagggaaaaaacatgcacacaacaaggctaggttgagcacacatctacagtcctaacattacttcaataaatattaagacatacacttggtagaagatataaaataatgaatgcgtcaaaaacaataatttttaaaattatttatacgttaattacttttcatgtccgccctgaacagttacacggaagctgctgattttttactaggaacttggaatgggagtttgaagtttgaccccctaatctcttagctatagggtgtcaggcagacacatttaacgtttctatgcctcagtttgttacgtttttgtctttttttcatttaccaaaacattgctacctatcgtgaacggttattgtgagcattaataagttggcacatataaaatttagaaccagggcctagcacataaatactgagtaaacgttaggtatcttagttaatacttcatttaatcttcacaattctacaacaaagaactactaccgtaaaacgcgaaaaattaagcaaaaaagttactaaagaaaaagaaaagacatactaaatttaaaattaaggtaaaaagaagttactactcagccatgtgacacatggtcacacagctttgtggtggaacagccaacaggaaacctggcccgccccactctcttaagtggcgtttctcttcatcaccactgctcttccatttggctgaacactcacaaagtagaatccaggactggaatcctggagagctcaggctttcagagttgaagagctggtaggtgttagcgcagccacacacacctagtctctagattcctaacgcagtgactgttacaaaaccaggccaccccagataggaacgaaaggactaggaaaacatgaacgaagcagagagaaagaaatgacgaggggtaaatctgcggcagagtaacccagtacaatccccatctctcccttccgccctggggcggaatccaaggctcaccgagggcggcagcggccagggccgggttgtgtgggctgaggaggcccacgagggttgacaccagctgatccaggaagggcaaagatatgacctcgctctcctcgtaacggtgcacgcgccgcctgcgccgcaggtagaagtgctcctgcagcaggcagtcgcaggcgaccgcacgcagcgccgcgaggtccagcgcaggttcaggttcgggttcgggctcgggctcgggctccgctgggggcggcggcagacccgacaggaacacggtcttggtgaagtactggtaccagcggtcggcattcagcgcgaaggtctgcgggtaaaccatgtacttcataaactgcatcttggtgaggattcgcagcttctcgtctaccgactccgcagcgtgcaccgtcgcctgccagcgctcgatccgccgcagccgtgcagctttgctgtcggctgtcatggaggccacaatcggcgggtaccgcgcgacgggggtcgccgcgacgtcttggcaggtcgtttctgtagccgtggcggcggcattagccgcggtgtgcaatgaaagcctcggaccgcgtagcaaaggcctccaacacctggccgccgccatctttgcccgcgattccggacccagaggtcaacttaagcaattgtccttgccctcttgctgtagggaccaatcggaaagcggaatctgagccagtctgggaaaggacgattctcagtgggcgtgggttatgttgcgtcattcatggtttagccaatcatataacttctccagtcgtggtttcctgcgtttgtagatggaaggaagaacttgtgtgcttagacctgacgctgggaggagatgctgccacctaggttacttgtaggaccctatacggcaacctcctttgccaggaactatttataaacatcctgcaggaaaatggtaagcccttggttaaatttattggcttcatttatgtatctcacaacacttcttttctgttttagttctaggaatagaaacttacttttggaaatacagtactagcatgtttttcagtatatttgattatatttaaaaattatgcaagcatcactcgtgacctactattcatctttgggaaaataattccatatatttatctgtgctaaatacagacaatttgtttaatgatatttattttgaaaggggggtgtatttttacttggatttaactggggaa

SEQ ID NO: 1146 - DNA, 6000 bp, Homo sapiens
atcctcctattttattcttctttttcaaaattgttttagctaatcttcatctgttgatgtgtacaagttttacgactttccagacaaaaaaagtggggagagagggaagacaatatttactttgaaaggtgattgtgactatgtgattatgcaggagatttaaatacatatgaagttcttaatacagtagctggcatataatgtagacacttagcttccttcctattatttccgaaccaactatcagaaacccttcaaaaacaaaccaagcacaaaactgcacctttctttccccaaaatattttgttctcagttttacataaatttgttatatatacaactgggtaagatatctgccttacgtaggaaatatatgtgaaagaaacaaagctcaaaaagaaccagctgcaactcccactacatctgttggtaggaaatagtttctgtttccttctcacctcatcaatttgatagtgaaaaagctctggtaaaaactacagttgattgggaaagattggtcttattcaaacatcaacagaactgtctgatgcccaactaaaattgatcaagacagatactcaataacaaaaactactgtggttacaaatattatcccactcatcagaacctgtttctgaagatggtaattgtgattattggaaaagtgttccattccaccttagctgtactggcttccttgttaatcctttatccccttcaggtgttattcaaatgtcatcttctcaagaaggccttgtgtgattagtttattgaaattattccactcaactcctatgtctaacactattcagtctcctttcctgcttcaattttcttcttggctcctagcaccatctaacttggaacatgtatatgtgacatatttggctagattatttcacccattagcatgtaaactccacgaaggcttttattttactgcagtattttctgcacctagaacagtattggtatatagcaatcacttaaatatttgttgaatgagtgatgtagagaaggttcaaaaagccactggagaatgtcatggcttgaccggtttgaattgtaatactttaaatcaaagatcaatggaaacattaataggaaagatcttaacatcaattttcttccaggagaatttaaacataaacacatacaaatagataagcacatgctttagaaactctcccattcccttctctaaacctcaacccactctctctaccacccttccctaaaaaaatgagagattaaagaaaaagtaaacacactgtgtccatgggcctttttctctcatccgactgctcagatcctaaattttagagtctttctcgaatcatctttttctcattgcttcccattgtctccactgctattatccctttaagccacaatcagttcttgcctaaaatatggccaattgtctgctaactggtttccctcttccaaatttgacctgcgacaatctttatttccaaatcagctacaatgcaatggactggattgtctccctactaaattcatatgctaaaaccctaacccctaatgtgagatagggactttatagaagtaactcagatttaatgaggtcacaaggggagggccctgatctgataagatccttatgagaagacacagcaaagatgttgttttctctccaccctatgaggacacagggagaaagtggctgtctgcaagccaggaagaaagccctcaccagattctgaccatattggcatactcatcttggacttccagcttccagaactatgagaaaataaatgtctgttgttcaagccacccagtatgtagcattttgttatggaagcccaagccaactaacatgctgagaaattcttttaaaaacctaagtcacaccatgacaatcttctgagtagaagcctccaatggctctccagtcttaatcctagcaattgccttcaggagcctttagtttctggctcttttcctttgtagccgcatttcctactacgttccccacccatcattcctttcaaccacactggccaatgacctaattcttgaacccatcaggcatgtttccatctcagggccctgtactagctgcactttctagaataccattcactgatactggtatggttcactcctcacttccttcaaacctttgctagaagaatgtaatcctttcaataagcattgcaaacaacactcctcacctgcccccacccccaccaaatacattgcactgatgatcttcacttctccagctgtttttttcccccgtgtgcttatccccttctaacacatcatataatttactactatgattatattttattgtctgtctccctgttagagtgcaaacttttgtttgctttgttcattaagtatcctgagcacttagaacacagcctaacatataaaaggcaatcaataaaattcatcaagtaaaactgactgagaggccagcagcctggattccagtcccaatactgcccctaccatgctatataactttggctttatgtctgtttccttgtgtgtaatataaaagctttggatcatattagatagcctactttccatggctctgactcagtcctttctcatccgtaggctgttttgttcattgccagtcttactccacctttcctctggcccagactgctccacccttgattaagtatactctctttcccacagcctccttccttggttcataatgttgatgatcagtaagtattgaataaattgaagttattttgattcactcacaaaaaaccataaaggcactttctgacaggattatgtcttttggtgttaattggtctctagctctaatttctaatcctaaaatctatgctgtaatactataagaatttaaaaaatatcaacctaggatttctatgatacattctcaaacagcgtatttattacttatttacacaaaaaactgtcacttcaacttagataaaattgagcacctcactttttaaatattgaatatcggtttaaagatctcaagtttttatatcctccttttgttaacaatgtagaaaggatattttagattccactagcaacttctcacagaagatattattaatgaaactgaagtattgcattttatttctaaaggtcagtttaatagacttgcaatttcaaagtttaaccgtaccatctgttttaacttaaaaatatagttataaattctttttagcaacatttgtgttttaataccctgaagaattattacaataaatccaaattaatattctggtccctaattacagaagagtgaatcaataaattagattacccgaaatgagactttggtgacttcttagcagatatttagtgagcacccattatgcacaagtattgatttgttgctgaagattaaaaattaaatcagtccctttttaagaggctcacagattagtaagaactcgtgtttaatttataatgggttttaatacaaggcaaaatttaaacacacttctttgatagttttatttcccttttctttctgtcttccccagttaaatccaagtaaaaatacacccccctttcaaaataaatatcattaaacaaattgtctgtatttagcacagataaatatatggaattattttcccaaagatgaatagtaggtcacgagtgatgcttgcataatttttaaatataatcaaatatactgaaaaacatgctagtactgtatttccaaaagtaagtttctattcctagaactaaaacagaaaagaagtgttgtgagatacataaatgaagccaataaatttaaccaagggcttaccattttcctgcaggatgtttataaatagttcctggcaaaggaggttgccgtatagggtcctacaagtaacctaggtggcagcatctcctcccagcgtcaggtctaagcacacaagttcttccttccatctacaaacgcaggaaaccacgactggagaagttatatgattggctaaaccatgaatgacgcaacataacccacgcccactgagaatcgtcctttcccagactggctcagattccgctttccgattggtccctacagcaagagggcaaggacaattgcttaagttgacctctgggtccggaatcgcgggcaaagatggcggcggccaggtgttggaggcctttgctacgcggtccgaggctttcattgcacaccgcggctaatgccgccgccacggctacagaaacgacctgccaagacgtcgcggcgacccccgtcgcgcggtacccgccgattgtggcctccatgacagccgacagcaaagctgcacggctgcggcggatcgagcgctggcaggcgacggtgcacgctgcggagtcggtagacgagaagctgcgaatcctcaccaagatgcagtttatgaagtacatggtttacccgcagaccttcgcgctgaatgccgaccgctggtaccagtacttcaccaagaccgtgttcctgtcgggtctgccgccgcccccagcggagcccgagcccgagcccgaacccgaacctgaacctgcgctggacctcgcggcgctgcgtgcggtcgcctgcgactgcctgctgcaggagcacttctacctgcggcgcaggcggcgcgtgcaccgttacgaggagagcgaggtcatatctttgcccttcctggatcagctggtgtcaaccctcgtgggcctcctcagcccacacaacccggccctggccgctgccgccctcggtgagccttggattccgccccagggcggaagggagagatggggattgtactgggttactctgccgcagatttacccctcgtcatttctttctctctgcttcgttcatgttttcctagtcctttcgttcctatctggggtggcctggttttgtaacagtcactgcgttaggaatctagagactaggtgtgtgtggctgcgctaacacctaccagctcttcaactctgaaagcctgagctctccaggattccagtcctggattctactttgtgagtgttcagccaaatggaagagcagtggtgatgaagagaaacgccacttaagagagtggggcgggccaggtttcctgttggctgttccaccacaaagctgtgtgaccatgtgtcacatggctgagtagtaacttctttttaccttaattttaaatttagtatgtcttttctttttctttagtaacttttttgcttaatttttcgcgttttacggtagtagttctttgttgtagaattgtgaagattaaatgaagtattaactaagatacctaacgtttactcagtatttatgtgctaggccctggttctaaattttatatgtgccaacttattaatgctcacaataaccgttcacgataggtagcaatgttttggtaaatgaaaaaaagacaaaaacgtaacaaactgaggcatagaaacgttaaatgtgtctgcctgacaccctatagctaagagattagggggtcaaacttcaaactcccattccaagttcctagtaaaaaatcagcagcttccgtgtaactgttcagggcggacatgaaaagtaattaacgtataaataattttaaaaattattgtttttgacgcattcattattttatatcttctaccaagtgtatgtcttaatatttattgaagtaatgttaggactgtagatgtgtgctcaacctagccttgttgtgtgcatgttttttcccttccccagttgagaaagaagtggtcttgaggaaagcgtcatggacttagactactcctgatggatggcctagaaaacctgtttaactttgtcaagacccaggttcttctcctataaaatagagataatgaaaagtatacatacctttgggagttattgtgaaaattgaattggatgttcataaaatagccctatttttatttatggtgaatgatattcttgttaatcttattttcttttattactcctaatgaggaatctctttggttactgttcattgtaatgatggcacaagtagacaataaatgttt

SEQ ID NO: 1147 - DNA, 6000 bp, Homo sapiens
acaagttgacagaagtaggcatgagaaggtcagtaatagcaaacttctctgggctaaagaagcatgttctaacccattgcaaggaagctaaaaaccttgaaaaaagattagacgaatggctaactagaataaatagtgtagagaagatcttaaatgacctgaaggagctgaaaaccataccacgagaacttcgtgacacgtgcacaagcttcaatagccaattccatcaagtggaagaaaggatgtcagtgattgaagatcaaattaatgaaatcaagcaagaagacaagattagagaaaaaagagtgaaaagaaatgaataaagcctccaagaaatatgggactatgtgaaaagaccattttgatttgtgttcctgaaagtgatggggagaatggatccaagttaggaaaccttcaggatattatccaggagaatttctccaacctagcaaggtaggccaacattcaaattcaggaaatacagaaaacaccacaaagatactccttgagaagagcaaacccaagatacataattgtcagattcaccaaggttgaaatgaagggaaaaatgttaagggcagccagatagaaaggtcaggttacccacaaagggaagcccatcagactaacagcagatctctcagcagaaagtctacaagccagaagagagtgggggccaatattcaacattcttaaagaaaagaattttcaacccagaatttcatatccagccaaactaagcttcacaagtgaaggagaaataaaatcctttacagaaaagcaaatactgagaaatttcatcatcaccaggcctgtcttacaagagctcctgaaggaagtactaaacatggaaaggaacaactggtaccagccactgcaaaaccatgccaaattgtaaagaccatcaatgctaggaagaaactgcatcaactaacgagcaaaataaccagctagcatcataatgacaggaccaaattcacacataacaatattaatcttaagtgtaaatgggctaaatgccccaattaaaagacacagactggcaaatgggataaagagtcaagaccaatcagtgtgctgtattcaggagaccaatctccatgcaaagacacacataggctcaaaataaagggatggaggaagatctaccaagcaaatggaaagcaaaaaaagcaagggttgcaatcctagtctctgataaaacagactttaaaccaacaaagaccaaaaaagacaaggccattacataatggtaaagggatcaatgcaacaaggagagctaacaatcctaaatatatatgcacacaattcaggaggacccagattcataaagcaagtccttgaagacctacaaagagatttagactcccacacaataataatggaagactttaacaccccactatcaatattagacagatcaacgagacagaaggttaacaaggatatccaggacttgaactcagttctgcaccaagcagatctaatagacatctacaaaactctccatcacaaatcaatagaatatacattcttctcagcaacacatcgcacttaatctaaaattgaccacataatttgaagtaaagcactcctcagcaaatataaaagaacagaaatcacaacaaactgtctctcagaccacagtgcaaccaaattagaactcaggattaagaaactcactgaaaaccacacaactacatggaaactgaacaacctgctcctgaatgactactgggtaaataacaaaatgaagtcagaaataaagatgttctctgaaaccaatgagaacaaagacacaacataccagaatctctgggacacatttaaaggagtgtgtagagagaaatgtatagcactaaatgcccacaagagaaagcagaaaagatctaaaatcaacaccctaacatcacaatgctaaaaactagagaagcaagagcaaacaaattcaaaagctagcagaaggcaagaaataattaagatcagagcagaactgaaggagctagagacacaaaaaacccttcaaaacatcaatgaatccaggaggtggttttttgaaaagatcaacaaaaatgacagactactagcaagactaataaagaaaaaaagagaagaatcaaataaatgcaataaaaaatgaaaaaggggatatcaccaccgatcccacagaaatacaaactaccatcagagaatactataaacacctctatgcaaataaactagaaaatctagaagaaatggataaactcctggacacatccaccctcccaagactaaaccaggaagaagttgaatctctgaatagatcaataacaggttctgaaattgaggtaataattaatagcctaccgaccaaaaaaagtccagaaccagatggattcacagccaaattctaccatatgtataaagaggagctggtatcattccctctgaaactattccaatcactagaaaaagagggaatcctccctagctcattttatgaggccagcatcatcctgataccaaagcctggcagagacacaacaaaaaaagagaattttagaccaatatccctgatgaacatcgatgcgaaaatcctcaatacaatactggcaaaccaaatcgagcagtacatcaaaaagcttattcgccatgatcaagttggcttcatccctgggatgcaaggctggttcaacatatgcaaatcaataaacataatccatcacataaacagaaccaacaacaaaaaccacatgattatctcaatacatgcagaaagggccttcaacaaaattcaacaaccttcatgccaaaaactctcaataaactaggtattgatgggacgtatctcaaaataataagagctatttatgacaaacccacagccaatatcatactgaatggacagaaactggaagcattccctttgaaaactggcacaagacaaggatgccctctttcaccactcttattcaacatagtgttggaagttctggctacagcaatcaggcaagaaacagaaataaagtgtattcaactaggaaaacagggagtcaaattgtctctgtttgcagatgacatgattgtatatctagaaaaccccatcatctcagcccaaaatctccttaagctgatgagcaacttcagcaaagtctcaggatacaaaatcaatgtgcaaaaatcacaagcattcctatacaccaataacagacaaacagagagccaaatcatgagtgaactcccattcacaattgcttcaaagagaataaaatacctaggaatccaacttacaagggatgtgaaggacctcttcaatgagagctacaaaccactgctcaacgaaataaaagaagacacaaacaaatggaaaaacattccatgctcatggataggaagaatcaatatcatgacaatggccatactgcccaaagttatttatggattcaatgccatccccatcaagcttccaatgactttcttcacagaattggaaaaaactactttaaagttcatatggaaccaaacaagagcccacattgccaagacaatcctaagccaaaagaacaaagctggaagcatcatgctacctgacttcaaactatactacaaggctacagtaaccaaaacagcatggtactggtaatggctgcacaactatgcaaatatactaaaatccattgactcatacactctaaatgggtgacctttatggtgtgtgaattatgtctcataaagttgttagaagtcaacataaatggaagagcaaccattcacataaaaataaacaaaattgtcaatgttttaagaatttttcagtaggtgtagttaattacaatttgacttttttaagtctgcactaaaattactcaccaaaaccaatagcagggtcctcactgctgttactgaaaatgattaacctttgatacacttgtaatatctgagaaaaagaaatgcaggggtctcagcagggctcccttctaaggtcacttgatttctaaagaagtaaccactaggtttgaagtcatcaggatgttaactatggggatggttggttcagtacccaacatcctgacagcacatctgaccatgtatattgtatcggagaccacatcctcagctcagaaaaagagctgaactcatttcaaatagaaagcacactgcatactgttcctccagggactgaggttgactcttcttagagtgagacattccccaacattggaacaaaaatgactcccacttcttttctcacctaaacctgttcagaagaaagtaaggaagaaaggcaggaagcaggggtcgggggggggcggggagggagggaaactcggagatactttcagtatctaaagttgtgaaactagacaatcaggaacgcacaatcagagggctgaaaagggccaagagcccctaccctcctccagcccatgttcccacacctgccacagaccaggcaggagcacaataaacactcaccacaaagtggggaaggaaaatccaggcaggagcctctatgtaaataaatctccctcctgtcctcagcttgcacttggcctgctaattcttatataacccaaggagacagctagaaagaattttgattggtgaccaattttgaggacttttattaaaattctaatttaagtcttcgagagtttccagtcatggatactacagataatattgcagatgatgaaagcgtcttcaaaatcatagctgagacactttacagtcttccctggtgtactctgatggcaacaaggtcccttgcccctctcctaccctgtagaattccagcgcccccctcagcagtcctagcaaaggaaagcctgcctgctggcagtgagccatcatccaccattctcacttatttggatttggtttcctaatgctaaactttgaaacttgaaaaaaaaaatgaaaggaaaccacatcctttttactctcagtatatagatagaggcagttaagaactgaaaacagattttcaggttgattgatgtgggacagcagccacaatgaggaactcctatagatttctggcatcctctctctcagttgtcgtttctctcctgctaattcctgaaggtaagactgattcttctcatttccattatgaccatgaagcaaaatggagcagactttcaatgaacttttggcaatattaccttcctatactgaaagaagatgttttcccccaagccttataatgtttagccaggcacaatggcacatgcctgtagtcccagctactaggaacgctgaggtggaaggatcacttgagcgcaggagtttgagtccaggctgggcgacatagtgagaccctgtctctattttttttttttaaatagcattctttcttggattttaaatatgtctgtattttagaaaaaaaaatcttttcttctcataattattttgcaaaagatagcagaaccaccaatgcttattgctgccaatttgtaacttgaaaattgccaaaaaggacaatgtaaaaatgagttaacaaaactctcttgttcgtaaaacaaatagtaccttccaggaaaggaatagtggcaacttagtcagctcagcctttcctgctgcagaaaatgcatagataaagacaattaagacaaatctgacctagacaccaaaagtgaatcaggaattattagaatttttatacttatttctctggtctagagactctttggcaataaattaaggcgtgaggccagttccctcattaaccctttgggtgtgctatagtattttttattaagctaattttttgtctaccaaatggtaaccaatatttctgcttttgtgtgagttgagcatgcatgggttaaaatgctgtataattcatggtattaccactgaaagggtgacagctcttggggagctctagatttcccttgaagaacctgctaggaagtgaggactactctcaagctgtggcaatatggagccagccacggtttttcccaggattcatcagcttttggaggcagggacttatgtaataacctg

SEQ ID NO: 1148 - DNA, 6000 bp, Homo sapiens
gtttagggtttttttttttttcttttttctacccctccttgagtatttttttttgtactccattttatttctgtcagcttattagctattaatccttattttacctttttactacttgctctagagtttaccatatgcctatttaacatatcatagtaatcttcaaaaatattataacagctgggtgcagtggctcatgcctgtaatcccggtaatttgggaggctgaggcaggcagatcacttgaggtcaagagttccagagcaacctgggcaacatggtgaaaccccgtctctactaaaaatacaaaaaaattagctgggtgtggtggcgcacacctgtaatcccagctgcttgggaggctgaggcacgagaattgcttgaacccaggaagcagacgctgcagaaagctgagatcgtgccactgcactccagcctgggtgacacagtgagactctgggtcaaaaaaatatataacacttgacataaaatgtatgaaccatacaatagtatatttccatttctcccctctcatcctttgtgctattgtcatacattttatttccatgtactttaataaatcttacaatataatgttatatctttgctttaaacaatttaagtacatttttacaacggcaaaagtctttcatatttgccctcttagttatcttatcattcctggtacttttcattcctttgagtagaaccaaatttccatctgctatcattttccttttaaatgatgtgcttcctttcactttttttttttttttttttttttttgagatggagtcttgctctgtctcctaggctggagttcagcgccacgatctcggctgactgcaacctctgcctcccgggttcaagtgattctcctgcctcaacctcctgagtagctaggattacaggtgcccaccaccatgccaggctaatttttgtatttttagtagagatagagtttcaccatgttggccaggctggtcttgaactcctgacctcatgatctgcctgcctcagcctcccaaagtgctgggattacaggggtgaaccactgtgcctggtccctttcacattttttgtagtgcagttatgctggcaactgactttatttggcatttgtttgtatgaataagtttatattttaccttccttcatagttcttttccttgatgggcctattaaaatattttttttcttttgtaagccacttcaccccttccctatgggtttgtttttatttacctctacatggctgactttggacagaaacgttaaaagttctacttgttgttttcctgaagctatgcttctatttctggactcatcgccaagtcacctgaaggcaatacaaatgaagtatctgggccacatgcagtggctcacgcctgtaatcccagcactttgggaaactgaggtgggaggataccttgagcccagaaaaaaaaaaaattagcctggcatggtggcacgtgcctgtagtcccagttacttgggaggctgaggtgggaggatcacttgagcctgggagttggaggctacattgatccttggtcgtgtcactaccctcaagcctggacaaaagagtgagaccttgtctcaaaaaaaaaaaaaaaaaaaaaaaaaagtgtccctttgctttactcctgctctccagtgattctacagcatggaataggccactgacttactcacatgtatagttctcatctgtccattttaataattgcaactagagctctttttgaactttctctcttgttcttcaagcatacatcaaacctgagtttagagggtatttgcgtcctagtttcacgagattggcaagtagtttttagagagtatgtttgtggccattcttttcttttgatactgacggagggtttcttttttaattttttgtttgtttaagacagggtcttactctgtcacccaggctggagtgcagtgatgcaatcacggctcactgtagccccaacctcctggcctcaagtgatcttcttgcctcagcacccccaagtagctgggactatacatgcatgccaccctgctagctaatttttagaggaggtctctctatgttgcacaggttggtctggtcttgaacttctggcctcaagtgaaactcctactttggcttcccaaagtgctgggattacaggcatgagccattgcacctggcaatggagtggtttgtggttggttagttttttgtttgtttgtttgtttgtttttgagacagagtttcactcctgttgcccaggctagagtgcaatggtgcgatctcggcttacttcaacttctgcctcttgggttcaagcaattctcctgcctcagcctcccaagtcgctgggattacaggcgtccgccacaacgcccggctaatttttgtatttttagtagaggtgaggtttcaccatgttggtcaggttggtctcaaactcctgacctcaagtgatccacccgcctcagcctcccgaactgctgggattacaggcgtgagccaccatgcctggccttgtttgttttttgttttgttttgagacagagtctcactccattgcccagactagagtgcagtggcacaatctcagctcactgcaacctccgcctcccaggttcaagcgattcttgtgccccagcctcctaagtagctaggactacaggtgtgcgccaccactgcctggttaattttggaattttctttttaatagagacagggttttgccatgttggccaggctggtctcaaacttctggcctcaagtgatctgcccgcctcggcctcccaaagtgctgggattttgggtgtgaaccaccgcactcacagagtttttttctttttttaataaatttttatttgaaattatttagatttgcagaaagtgcaaagtaatacaaagagttcctatatattgccatacccaatttaccctaatgctaacatcttacactagcatatttgtcaaaatcatcagtgtaccaattcatatactgtacattactatttactaaaatccagagtttatttggatttcaccagtttttccactatgttgttttttgttccagaattcataaatagagggttttttttttcctatttttgattctttaagttcatttttgttggttgcatggaggagtgtcatatacgcactcattccaccaaattcccttgatatcctttaccgttactttataaaccatttacatttctcttgcagagagccacaacctaagtgccttacctgatgacactgacagagagaatcactggaaatgatagttttatacttaattcttgtcactaaaactctaatagtgtttttaaaaacctaatacaaggccaggcctggcggctcacacctatcatcccagcactttgggatgcctagggaggagaattgctcaaggccagaagtttgaaaccagaacagcctgggcaacatagtgagaccctgtctctgaaaaaacaaaacaaacaacaacagcaacaacaacaacaaaaatacctaacacaaatacttaaatgcatacaactatttttataacttttaacttttacacttagttgtccatttctccaaaatatgaagtcctctgcggaagtgactccagaccttcagagccgtggtgaactttgtgaattactggtaatgaacaccgtcatcttgtctgttttaccagcacatgatcatataattgaaaactgttttgaacaggaatgtctcatcataaataagttaataaattctacaaacatctactaaacatctgttatgttctaggtacagattggggaaatcacaataaaccagtcgggcacaatacctagcttcatgaaatgtatagtcaatctcttctacttcaaggcccagactctcttagactttgttgattagcatccaggctaaatggatcctctctggatcttcatgtggagggcaataaggctggatttgctacttggcctttttaggggttgagaagatgttactttaacaaaagcaagtgcccaacaaaatcataaacccaggtaataggctgaccactttaagctgagaaatcctacctagttctctgggatataagccactactaatttaatgcacacatataccaccttattttgaggctgtgtgttaggtatgttatgtttgtcatccccccacccccaacacacacaaaaaccaacttgctattcacgtgattcattttctatatgaattgaaaaatggcactaaagaaaaaagtttggggatatagaaatagcttattttttaaggaagaaacataacctttctaagtactggatgtgtaatattaaaaatgtagttaaccaaggacagaggctgcacctaatgacttttggaggaaccttcttgctcaagacactatgattctcgttacctggatagtatcacccatggattgtatcatatatgaaccactgaggaacacacattcctgcagatgtttgcagattattaattgctttatatttggagcacccctcccttcaatcagcataaatatttgagggtgggctgtgtttagaagatgtttagtctccaatgattacaacatgatgcaccactctcctatacaaattttgatttaagaaaagattttatttttcaaaggaaaccacaagtgaaagcaatcttgaagattcaatagcagttggtcctatagtgccaggtaagaactttgaagtagcacgtgggattatatgtatttgtaaatatatttgtatacagggcagttgcaaaaaaaagagtatttataattgtccaaagagcttccaaagaggagcagcattgcaacagtgtcgtgtatgagcaaaagtcaagattcttgtggcttctccagagtgcaggcaggaccaaactgatagtaggcaacgtgtctcaggtacaagcaaaccagtccttagaagcaccaatcagtaaacttctttcctgagatttttatttttattcattttattttattttattttatttgagacagggtcttactttgtcacccaggctggaatgcaatggcaagatcatggctcactgcagcgtcgacctcccaggctcaagtgatcctcccatctcagcctccccagtagctgggaccacaagcatgtgccaccacacctggctaatttttgtattttttgtagagacagggttttgccatgttggccaggctggtcttgaactcctaggctcaagcaattcgcctgcctcggtctcccacagtgctgggattacaggcatgagtcactttgcctggcctctttcctgagatgcatggtgcttatgataagcacacattatgtctaggtccctgcttcaagtgtggcactttggacacatgctttccacattccgattttgtgccaaaacctatgagatgattgcaatgtgggaatcatggatggctgtggaaaatcctaacacattcgtagtagacaggcagaatcatggaatgaaaaggcatggcgttcagactgagggagatgtgactatgaatccctgttgtgcccccctttctttctctccacagaaatggcacagggtgaagcccagtggtttcaagaggcaaagaatctgaatgagcagctgagagcagcttataccagcgccagtttccgccacatgtctttgcttgatatctcttccgatctggccacggaccacttgctgggctgtgatctgtctattgcttcaaaacacatcagcaaacctgtgcaagaacctctggtgctgcctgaggtctttggcaacttgaactctgtcatgtgtgtggagggtgaagctggaagtggaaagacggtcctcctgaagaaaatagcttttctgtgggcatctggatgctgtcccctgttaaacaggttccagctggttttctacctctcccttagttccaccagaccagacgaggggctggccagtatcatctgtgaccagctcctagagaaagaaggatctgttactgaaatgtgc

SEQ ID NO: 1149 - DNA, 6000 bp, Homo sapiens
agcctctaatttagaaaaacacagaggctaaataaaacttatcttcagtccaccagttgacaaactttggcctggcctgtctcttttctatcgtttatcatcagggcagataatcttttaagtttcaggtgttacactttcctgggatatactcctcttaggggataatttatttactttttgtttttgtttttgtgacagagtcttgctctgtcaaccaggctagagtgcagtggcatgatcttggatcactgcaacatctgcctcccgggttcaagtgattctcctgcctcagcctcccgagtagctgggactacagtcatgtgccaccatgcctggctgatttttgtatttttagtagtgacgtggtttcacaccatgttgaccaggctggtctcggaactcctgacctcaagtgatccacccaccttggccttccaaagtgctgggattacaggtgtgagccaccgtggccagccttaggggataatttaggttttttgtgtttctgttttaaatttaaatttttgtttttttgaggcagtatcactctgtctctcaggctggagtgcaatggcacaatcaactcactgcagccttgaattcctgggcacaagtgatcctcccaattcagcttctcaagtagctaggactacaggtgtgcaccaccatgcctggctgaattttttttttaagagatggactcttgctgtgctgtccaggctcgtgtcaactcctggcctcaaatgatcctctctcctaggcctcccaaagtgctgggattacagacgttagccactgtgcccagcctagttcaagttttaagcattaagaattgactctttggaggaatagggatcttttaaggatctctacagtcagtgactctaaatgtagtgtttggaccagtaagtagcattagcatcacccaagaagtcattagaaatgcaaattcttggccaggcgcggtgcctcatgcctgtaatcccagcactttgggaggctgaggtgggtagatcacgaggtcaggagttcgagaccagcttgaccaacatggtgaaaccctgtctctactaaaaatacaaaaattagccggccgtggtgaagggcatctgtaatcccagctactcaggaggatgaggcaggagaatcacttgaatccaggaggcggaggttgctgtgagccaagatcgcaccactgcactgcagcctgggcaacagaatgagactccatctcaaaaaaaaaaaaaaaagcaaattcttgagccccatcacaggcctgttgaatcagaaactctgaggatgggtctagcagtccgctttaacaaatcctccaggtggttaccataaatgttgaagtgtgagagctactgcctgtaatcccatttagagaggtacataggtaacttaaaaacaggtcctgataaaagaattctactaaacttaaaaaacaaattcaggtaactttataaacaaacaaatctcggccgggcgcggtggctcacgcctgtaatcccagcactttgggaggccgaggcgggcggatcacgaggtcaggagatcgagaccatcctggctaacacggtgaaaccccgtctctactaaaaatacaaaaaattagccgggcgtggtggcgggcgcctgtagtcccagctactcgggaggctgaggcaggagaatggcgtgaacccgggaggcagaaatttcagtgagccgagatcacgccactgcactccagcctgggtgacagagcaagactccgtctgaaaacaaacaaacaaacaaacaaaacaaatctcaaacatggaattattttttcacttctctcttttgttttgttttttttttttttttgagacagagtctcgctctgtcacccaggctggagtgcagtggcgcgatctcggctcacactgcaatttctgcctcccgggttcacaccattctcctgcctcagcctcccgagtagctgggactacaggtgcccgccaccacgcccagctaattgtttttttgtatttttagtagagacggggtttcaccgtgttagccaggatggtctcgatctcctgacctcgtgatccgcccgcctcggcctcccaaagtgctgggattacaggcgtgagccactgcgcccgacctttttcacttctcttaatgctctgtaaacattaatgtatttatatatgtacttagaattttaaaaaatcaattttattgagttataattaacatacagtaaaaatgctcccatcttgagtaattccatgccttttgacaagtgttctgtacccatgccatgaccaccacaatcgagagagaacatcttcatcactccagaagggctcctttgcagtgagtactccctaggagttccagcggccggtgacattgatctgttttctgtcactgtagatgagatttgtctgttatatacaatttttaaaaattaaatgatatgtatggcttcttttgcttagcataatgtttttgagcttattcatttgttgcatatatcaatactttgcttctttttaccacctgtacttcatttatggatacgttgtttatccatgtgtttatccccaatggacattgggttgtttctgattttttggttattattatgaataaagttgctatgaacattattgtataaatctttgtgtgttcatgtgttttcatttttcttgggtaaatatgtaggaatggaattgctagattgtatggcaagagtatacttagctttccatgacaccagtgaactgtttttccaaagacattgtattaataccattttacattcccacaactaatgtatgagcttccagttgctccatatcctcaactaacagttgatattgtacaatacaaatgttaacttttagaatatcttcacaactttagagtagatagtgatttcttaggacacaaaaactatcaatcataacaaaaattaaaattggacttcatcaaaattaaaaacttctttttgaaagacaccattaagaaaatgaaaagatggttaacagactgagagaatatatgtgcaatgtaaatatctaacaaaggactagtatgcaaaatatataaagaatccttataatttagtaataaaaaggaaaacacgcaatttttaaatgggtcaagaatttaattacggccaggtgcagtggctcacacctgtaatctcagcactttgggaggccgaggtgggtggatcacgaggtcaggggttcgagaccagcctggctaacatggtgaaaccctgtctctactaaaaatacaaaaattagctgggcgtggtggtgggcgcctgtaatcccagctactcgggaggctgaggcaggggaatcgcttgaacccaggaggcggaggttgcagtgagctgagattgtgccactgcactccagcctgggcggcagagcgagactctgtcttttaaaaaaaaagaaaaatatttaattaccttaccaaagaagatacatgaatgaccaataagccattaaattaaaacttcagtgagtatacacatatgccctgaagtagctaaactttaaaacactgccctatgtgtgtgtactttttagctaaaaaagtgtttgaaaacagtattattttgaaactcaaaattccaaatcctctcttcaaattaggtagtagtgtcactggaagtaaaagagaagttactttaactgctaaagagtatccactaagaatctacatcaaacatcatgtttaatgctcaaactttagaagaatttataccaaaagtcaagaataagataggatatctatcttcattattaagcaacattatattagaggacctaatcaatgcaacaaggcaataaataaaagacaaaactgtcataatcagatactacaaacatctaagaaaattcagggggatttacagtcatatattaaacagtccagaaggagtcctatacatcatcaatgaatattgagaataaaaaatagtttttaaaacccctccaatttataagggcaacaaaatgtacaaggtactaaaataaatgtaatgtgtatttgggtataaatacagcaacataatgaaaaggtttattggggaaaaaattacagggagaagggtcaacaacgtgaagaggttcccctgccatctggacttctggaaaaagacctgctggtctaggcacagctggatgcaccatggaaagtggttccaataaacactggcactgtaacaattgtgtatgttgatacaaaaagagggagccaatgaatacttggtcgattatttaacaattgcttctctgctgaagaaatggccttgttggactagagcttaactgtggttcacatactaatgctgctataacagctagaagccttactaagaaatttgctaaaccaccaaaaagaggaaatgaaccttctaggatatctggattgccttttcttaaaaatctagtcttggctgggtgctgtggttcacgcctgtaatcccagcatttggtgaggccgaagtgggcggatcacgaggtcaagagatcgagaccatcctggtcaacatggtgaaaccctgtctctactgaaaatacaaaaattagctgggcgaggtggcatgtgcctgtagtcccagctgctggggaggctgaggaaggagaatcacttgaacccaggaggctgggtttgcagtgagctgagatcacgccattgcactccagcctggcaacagagcaagactcagtctaaaaaaaaaaaaaatatatctagtctgtatggcagcacaacatcaggtaaaagtacagactagccagatcactggttaaccttaacccctatgtgcttgagtttccttatctgtaatatggagatgatatagcaatagctgattttggactgttaaaggaattaagtggacacatgtaaagtgcttagaattgtgcctggcaagtagtaggctgcaatattgtgatataataaatatatatatttgatcttcatccagttcctggcacagatctccagaaacccttgtaatttcctgagtgacaggggtgatagaaacatcttttattagaatacttggtcttggttcctgacacaagagcttctaagacctttggaatctccaagtgataagagtgtatgacagtgagctaactggtggctgggatcctttagacaacttcaggatgggggctatcccctgaaagactaaggcatgattagaggtctgggatttgcagccccacgcctcgacctccagagagggtaaaagggctggagattgattaaccaccagttgccagtgatttaaccaatcatgcctaagtgatggcacctccattaaaaaataaaccacaggtttggagagctttcggtttggttaaccccaaccacataccaagaaggcgatgcacctcaaactgcatgaagacaaaaggtcctgtgctcacctgggacccttctggacgttgccctgtgtacctcttcgactgcctgttcatctgtatcctttataataaagcagtaaacataagtaaagtttctgagttctgtgagccattataagaaacgatcgaacctgggattttcctttcggaagccgctctctctcacaagggagagagctgttctcctttttcttttgcgtgttaaacctccgctcctaaacccactcttcgtgtgtatcgtgtccttaaccttgttggtgcgagacgacgaaccccgggtattgaccccagacaacaatgccacttcatattggggacttcgtctgggattccaaggtgcattcattgcaaaggtgagtaaaggggcggacctcaactctgtcctttgatttcgaggctcttggcctccattttagaatcaaaccaaaccaaatactgggcccccttctgcttctgtgaatgagaaaactctgccttcaccaattagccatttaaaaattatgagcgtggctgccagccttacaagttttgggggacaggcttgctggggagaaca

SEQ ID NO: 1150 - DNA, 6000 bp, Homo sapiens
agactcctgagtagctgggactacaggcacatgccaccaagcctggctaagtttgttagttttttatagagacaaggtctcactatgttgcccagtctgatctcgaacacctagccacaagcaattctcctgccttgtcttcccagagtgctgggattacaggtgtggaccactgaacccagcaggtcttgctttttttttgagatggaggtgtgagccaccacatccagccaggttttctctttttttttttttttgagacggagtcttgctctgtcgcccaggctggagtgcagtggcacgatcttggctcactgcaagctccgcctcctgggttcacaccattctcctgcctcagcctcgcgagtagctgggactacaggcaccccgccaccacacctggctaattttttgtatttttagtagagacggggtttcaccgtgttagccaggatggtctcgatctcctgacctcatgatccacctgccttggcctcccaaagtgctgggattacaggcgtaagccaccacgcctggccaggtcttgctttttaagagtctgacaataactgctttctaattggaatgtttagaacgtttaaatttaatgcaattatgaatatggttggatttaaacctattttaccatttgctttctatttatttcatcacttctttgtttctttttcttttcctgacttcctagggtttagggtttttttttttttcttttttctaccccctccttgagtatttttttttgtactccattttatttctgtcagcttattagctattaatccttattttacctttttactacttgctctagagtttaccatatgcctatttaacatatcatagtaatcttcaaaaatattataacagctgggtgcagtggctcatgcctgtaatcccggtaatttgggaggctgaggcaggcagatcacttgaggtcaagagttccagagcaacctgggcaacatggtgaaaccccgtctctactaaaaatacaaaaaaattagctgggtgtggtggcgcacacctgtaatcccagctgcttgggaggctgaggcacgagaattgcttgaacccaggaagcagacgctgcagaaagctgagatcgtgccactgcactccagcctgggtgacacagtgagactctgggtcaaaaaaatatataacacttgacataaaatgtatgaaccatacaatagtatatttccatttctcccctctcatcctttgtgctattgtcatacattttatttccatgtactttaataaatcttacaatataatgttatatctttgctttaaacaatttaagtacatttttacaacggcaaaagtctttcatatttgccctcttagttatcttatcattcctggtacttttcattcctttgagtagaaccaaatttccatctgctatcattttccttttaaatgatgtgcttcctttcactttttttttttttttttttttttttgagatggagtcttgctctgtctcctaggctggagttcagcgccacgatctcggctgactgcaacctctgcctcccgggttcaagtgattctcctgcctcaacctcctgagtagctaggattacaggtgcccaccaccatgccaggctaatttttgtatttttagtagagatagagtttcaccatgttggccaggctggtcttgaactcctgacctcatgatctgcctgcctcagcctcccaaagtgctgggattacaggggtgaaccactgtgcctggtccctttcacattttttgtagtgcagttatgctggcaactgactttatttggcatttgtttgtatgaataagtttatattttaccttccttcatagttcttttccttgatgggcctattaaaatattttttttcttttgtaagccacttcaccccttccctatgggtttgtttttatttacctctacatggctgactttggacagaaacgttaaaagttctacttgttgttttcctgaagctatgcttctatttctggactcatcgccaagtcacctgaaggcaatacaaatgaagtatctgggccacatgcagtggctcacgcctgtaatcccagcactttgggaaactgaggtgggaggataccttgagcccagaaaaaaaaaaaattagcctggcatggtggcacgtgcctgtagtcccagttacttgggaggctgaggtgggaggatcacttgagcctgggagttggaggctacattgatccttggtcgtgtcactaccctcaagcctggacaaaagagtgagaccttgtctcaaaaaaaaaaaaaaaaaaaaaagtgtccctttgctttactcctgctctccagtgattctacagcatggaataggccactgacttactcacatgtatagttctcatctgtccattttaataattgcaactagagctctttttgaactttctctcttgttcttcaagcatacatcaaacctgagtttagagggtatttgcgtcctagtttcacgagattggcaagtagtttttagagagtatgtttgtggccattcttttcttttgatactgacggagggtttcttttttaattttttgtttgtttaagacagggtcttactctgtcacccaggctggagtgcagtgatgcaatcacggctcactgtagccccaacctcctggcctcaagtgatcttcttgcctcagcacccccaagtagctgggactatacatgcatgccaccctgctagctaatttttagaggaggtctctctatgttgcacaggttggtctggtcttgaacttctgacctcaagtgaaactcctactttggcttcccaaagtgctgggattacaggcatgagccattgcacctggcaatggagtggtttgtggttggttagttttttgtttgtttgtttgtttgtttttgagacagagtttcactcctgttgcccaggctagagtgcaatggtgcgatctcggcttacttcaacttctgcctcttgggttcaagcaattctcctgcctcagcctcccaagtcgctgggattacaggcgtccgccacaacgcccggctaatttttgtatttttagtagaggtgaggtttcaccatgttggtcaggttggtctcaaactcctgacctcaagtgatccacccgcctcagcctcccgaactgctgggattacaggcgtgagccaccatgcctggccttgtttgttttttgttttgttttgagacagagtctcactccattgcccagactagagtgcagtggcacaatctcagctcactgcaacctccgcctcccaggttcaagcgattcttgtgccccagcctcctaagtagctaggactacaggtgtgcgccaccactgcctggttaattttggaattttctttttaatagagacagggttttgccatgttggccaggctggtctcaaacttctggcctcaagtgatctgcccgcctcggcctcccaaagtgctgggattttgggtgtgaaccaccgcactcacagagtttttttctttttttaataaatttttatttgaaattatttagatttgcagaaagtgcaaagtaatacaaagagttcctatatattgccatacccaatttaccctaatgctaacatcttacactagcatatttgtcaaaatcatcagtgtaccaattcatatactgtacattactatttactaaaatccagagtttatttggatttcaccagtttttccactatgttgttttttgttccagaattcataaatagagggttttttttttcctatttttgattctttaagttcatttttgttggttgcatggaggagtgtcatatacgcactcattccaccaaattcccttgatatcctttaccgttactttataaaccatttacatttctcttgcagagagccacaacctaagtgccttacctgatgacactgacagagagaatcactggaaatgatagttttatacttaattcttgtcactaaaactctaatagtgtttttaaaaacctaatacaaggccaggcctggcggctcacacctatcatcccagcactttgggatgcctagggaggagaattgctcaaggccagaagtttgaaaccagaacagcctgggcaacatagtgagaccctgtctctgaaaaaacaaaacaaacaacaacagcaacaacaacaacaaaaatacctaacacaaatacttaaatgcatacaactatttttataacttttaacttttacacttagttgtccatttctccaaaatatgaagtcctctgcggaagtgactccagaccttcagagccgtggtgaactttgtgaattactggtaatgaacaccgtcatcttgtctgttttaccagcacatgatcatataattgaaaactgttttgaacaggaatgtctcatcataaataagttaataaattctacaaacatctactaaacatctgttatgttctaggtacagattggggaaatcacaataaaccagtcgggcacaatacctagcttcatgaaatgtatagtcaatctcttctacttcaaggcccagactctcttagactttgttgattagcatccaggctaaatggatcctctctggatcttcatgtggagggcaataaggctggatttgctacttggcctttttaggggttgagaagatgttactttaacaaaagcaagtgcccaacaaaatcataaacccaggtaataggctgaccactttaagctgagaaatcctacctagttctctgggatataagccactactaatttaatgcacacatataccaccttattttgaggctgtgtgttaggtatgttatgtttgtcatccccccacccccaacacacacaaaaaccaacttgctattcacgtgattcattttctatatgaattgaaaaatggcactaaagaaaaaagtttggggatatagaaatagcttattttttaaggaagaaacataacctttctaagtactggatgtgtaatattaaaaatgtagttaaccaaggacagaggctgcacctaatgacttttggaggaaccttcttgctcaagacactatgattctcgttacctggatagtatcacccatggattgtatcatatatgaaccactgaggaacacacattcctgcagatgtttgcagattattaattgctttatatttggagcacccctcccttcaatcagcataaatatttgagggtgggctgtgtttagaagatgtttagtctccaatgattacaacatgatgcaccactctcctatacaaattttgatttaagaaaagattttatttttcaaaggaaaccacaagtgaaagcaatcttgaagattcaatagcagttggtcctatagtgccaggtaagaactttgaagtagcacgtgggattatatgtatttgtaaatatatttgtatacagggcagttgcaaaaaaaagagtatttataattgtccaaagagcttccaaagaggagcagcattgcaacagtgtcgtgtatgagcaaaagtcaagattcttgtggcttctccagagtgcaggcaggaccaaactgatagtaggcaacgtgtctcaggtacaagcaaaccagtccttagaagcaccaatcagtaaacttctttcctgagatttttatttttattcattttattttattttattttatttgagacagggtcttactttgtcacccaggctggaatgcaatggcaagatcatggctcactgcagcgtcgacctcccaggctcaagtgatcctcccatctcagcctccccagtagctgggaccacaagcatgtgccaccacacctggctaatttttgtattttttgtagagacagggttttgccatgttggccaggctggtcttgaactcctaggctcaagcaattcgcctgcctcggtctcccacagtgctgggattacaggcatgagtcactttgcctggcctctttcc

SEQ ID NO: 1151 - DNA, 6000 bp, Homo sapiens
tcctttacttctaccatgaggtactatcatatataggagccaggcaaagaaaggaaaatacataaatgtgcctggtcagagtaaaataataggtaaagaaaaagagactagaaatcatgaaggaggaaaggttctgacaaaaaataatgaagtatctgcaatataaagacaaaataggaataaagtaaaaaaaaaaaatatatttttctattattttatattttaagagatatttagatctaactgttctaatcttctttactcatatattggtttgaatgttttgagagagctctggataatttaccttgtaatttattttacagcctcagagatcatcacacagttcttcaatttctctatggtatttataattttcataaatcttagttattataccacatattgtaatctctgcagagttatttgccttttcatcaaagtatttcctttaacctgtatctcctcgatgttattttctcataagatctttgtaataaaaaaatttgtgctctggagggttttaagataaagtcaataaatgcagtggggacattagggttagaagtaaaggctttctttcaaaattattgggtcaatgaaaccttttgatactatttaggtaaatttggaaggctatttgtgtaactcaatatgtactagggcatggaacacaatttggcattcttcaaacacagcagtaagctctttattacttcttggttagtcctcccatcagaaactattcttacctatgctctaaggtcctctaaaattacagttatgttactgagttagaattacctttccacatactcaagatatcaaaactataaaatattttggaacgtagtacattcatatttctttttcttttttttttttttgagacagagtcttgctctgtcacccaggctggagtgttagccaggattgtctcgatctcctgaccttgtgatctgcccgcctcggccttccaaagtgctaggattacaggcgtgagccaccgcacccggccacattcatatttcagttgccaatgaaaccagaatgagccaacttcatttcttaaattttcagtttcttttcatacacaagtttttgtccagcactttttattatttagtcttcattaaatactatgtttcaagatccagagtaacttttctaaaatcacagatataatagcttattttactaaaggtaaaatatattttgaattttctttcttttgtgtactattctgtttttcaatacctccctgtttaatatctgtgaatttaattaagatagtttacttccctttgttaactgggcagaaagttaaggtgggtagaaaagaaaggcaatggacaaaaattaagtagaaacattaaatccttttggaaaaaatgaaaataaagatagacaacgtatttgagattcagaaagtacacaagcaatagtaaagattagagcctagatctatccaataataggaatatattaaatatctgaaaatacctcataaaaatatgtggcaatttctttggaggaaaagaacagggctaactctaaggctaaacaaaaactaggtaagatattggtataaggctgatttacaaatagacatagtagttatttcctactggttaagaaattgatttccaaagatgggagctgatcaaatttggtatttgttaaaaggatgaagatctgttcaaagtagcatactgaggttgcctaggactgggctaggcagtagaatagaccacaggttgtatttgcagtacagttttgtaggtacatacacctaaaagtctagaaaacatttaattgagcatttgataggtgttagactgcattaaatattgacctttacaagtgctaaagaattgtcaaaaaggaggaggtaattctgcagtaagagtagtgagcctcacctggactcccaggcaacatacagagggtgtgtgaacatttagaaatcagtgataaccaagagccggtgataacctgccagttcaatgtcctgcattcaagggctgacagtggtgactgggacaggaatgttggaggattgggatgctaacacactggaggttttcaagcacaggctatattaagatttgttgggattgttgcacttggtgttcacacagcagacagtaagtagagtaggtattttgatagtcttgtctaactgagggtctaagtttaaaagaaaactgttctcagggaggccaccataagtagtacttcattattaagtattatggaactacttcattctcatttctagaacagcacagagcttggcaactcaaaacccgcctattttacctacccacctaatgaatgacatttattatttctttcagaaccgtttttaggtattgcatacctccttcttgattagtatactatacattaatatagtggttctcaaacttaagtgtgcaaacaatcacttggagggtttgttaaaatggatcgctgcatattttctgattcagaaggtctgaggtggcatttctgaattcctaggatgttgcggcctgaattcactttgagaactctagctcctgtgactggtccatcttccttctcccaggtagcacactgctaagagatatgcgtaatggaggccccaggactactcctaatcaagttggattgttgtcattgactaggtaaataggcctgtgcaaacttacaaaggcaatgcattgcctgtatcttgtcacgtcttttagtggtcttttctctttttcctgggtttctatcacagccacttgccatcctgagtgttagtttgatcatccttagcacagaaaatattgatctcaaagatcaatatccaatggtatttaatgtgggatcactcctgggagaatttaacaatattgttaatttcaaaccatgggaagctccctctacatgaatgcatagtttgtatacattttagtgtaaaagacaaaataacacccttctccttaattgtattaaaaatgagttttcagtttattgctacttttgaaacgatatataattataactagcattctgggacattcttgacatttgacttgttgaaggtgcttgcattgtggatcacgtcctgcagtcttttgcacacaaaccaggacaaaagtgcattgattagtgttttctgtggcacctcctcctcttcatcagtatccaacagacttataatggcataggtaagtatatgagacagttgataaagaaaaacgtatgcaaatactggtagaaatcttacttcataaccactatttctactcaaattcttcacccttctcatatggtgccctttatttcgttttggagtttcagaatctattttaactgtgtgtgtgtgagatagtcatagtgatttatagcatgcaacgaaaaagaaaacattaatagtactgccccgatcttcaaagctacctgacccctgcccggtttctgcgctgctggttaaggctgttttttccactggtcaggaagtacggaactagtttctgggcattttcctttccctttccccctccttcctctccaccgcctcctggtccccctctggtctctccggctttaacagcgccaagcacccgcgtgctcaggtacccttccctcttctcccgcccatcaaacaaagccccgggagacaggcgcgcgccgccggccacgccaacaggagatgcggccgcgccgccacacgcttggaaccggaggaggacagcaagcgcgaccacgcaccgcgcgtccccgccgcttccttccctctggactcttccttttcctcccggcccggccccccgcccccgctccgggaacgcgcctgcgcacaagctgccctctcccttctccgcccttccttccctccgtccctcctcccctgccccgccttcctttctctctctcccgtttcactcactgagagctccaggtagtgagcagttcagtcgatttcctcgttaccccgcccccctttctcttgcccccccacccctctcatctgcctggtggaggatgaagcggctgcagtggccccagcctcagcagcggcaccggcggtggctgcggtgtgggtggccggaactggggtggtgaagaagcggtggtggcggctgaaggagcggtagcagcctcagcctctttccctgtgcttcctttcctctttagtgcagcgaggaagttttcgcttctgtacatgtgtttgtgtgcgtgagtgtgggtgtgtgcggtgaggtttgggtggcgtttgtgcaggcgttgggttttttgcccacttggcttcccgtaacccaggcagctggggagcctgggctgtggccctaggagggggcgcggcggcgggctctctccttttgttgttgtttcctcagcctggggagctgaaggggagacgcgtctgggtggggctgctcggagcccgggcctggtggcccctggggctcccgggcgggcagggtagggcagagtagagcgggcttcaacatgatggcggccgaggccggcagtgaggagggcggcccggtaacagccggagctggaggaggcggcgcggcagcgggctccagtgcctatcccgcagtgtgtcgggtgaagatacccgcggccctgcctgtggcagccgccccctatcctgggctggtggagaccggagtggctggaactctgggtggcggagccgctttggggtcagagttcctaggagccgggtctgtggcaggggcactggggggagctggactgacagggggaggtactgctgctggcgtagctggtgctgctgctggcgtggccggtgctgctgttgctggacctagtggagacatggctctcaccaaactgcccacttcgttgcttgctgagactctcgggccaggcggcggttttccccctctgccccctcccccttacctgccccctttgggggcgggcctcgggacagtggacgaaggtgactctctggatggaccagaatacgaggaggaagaggtggccataccgttgaccgctcctccaactaaccagtaagttaagactgctgttcaggaatttgggaagctggctccagaaaagaagtggaaatgaaggggtaaatcatactttgtccttttcatctgtggtttgttaggaaaagtttttgaagtttcaggtttcttgggtaggaatttaatctgatcacttatcttccttacaggcatactacctggcgtcttcctacatttattgctcctctgggaaagtgtaaagtctttaagatggaaagcatgagaaaatgtgtatctaatgagaaccggatatagttctgtcccttccaagttgaggtggtgtcccagaatttagtcaaactgcggctaccaaggcagtcatagtgtatattaacttgtgtgtgttacttgataaagctagatgattagtgagaagctttgaatacaggtgtttaaacgagtactatagtaataatttgaaaaatgtattggttagaatgtttttatttcagtgcacagcccagcttctgattagagaaagcatagtgatgcagaagagtctttgggtcacttaatgagaacttgggtcagagagaaaggaaaggaatcctgtgtattataggtgtgattaagagcctatattccaacaatgtatcttcttccataggcttgccacttaatattaacgcactgcttttatagtggagactttggaagtacaacagtgaggcaaaacaaaatcaatagagcttcccttaaacattttttgttggtggccagtatagtattctatttaaaaattaagttttacagtctgtaaaatatacaggacaatgacttttttaaaatgtaagttaatacctcctcctcacttgtcttaattgaacttaggtgtttattcttaaaggtggaccttgatgaaaatgttgagatgggaagtgttattaggcaaaacttgttatagatttctcatataacccttaattgacccttagaattttaacaaccggcc

SEQ ID NO: 1152 - DNA, 6000 bp, Homo sapiens
ttattacctaatattgtacttacatatcaaatgatttgaaataatactaaaggaagacaagaacatttgttgtacacaactgttcacttaaactctagaacaagcatatgtatgaagagatgatgtttccattttaacaggtgaagaaaaatgatcagtttagaaaaatttgaaaatacagaatcacctacaatctccttagagataattacttagaacatttttggtctaagaacatttctagtctttttccagtgcatataaagcttttcaaattagctgtgtgcagttctagcagttcagcttcaatctgtttgtaactttatttctaatgtattttacaattaattgaaatttctttagtttacactttgaaatactgataacattttaatagtgctgacataaagttttctaaaatatatatagctgacttttttttagtaatgatctggtacaatggagtattatttctttaagaattataattttatgttaattatttattgtgagtgttttggaagctggtataaatattttgctactttttattaagcttcctaataatttttgtttttattttaaaggccaaactgttttcagatagtagttcagcactttagtgaagaacattacatcttttactttgcaggagaaactccagaacaagcagaggtaagattactgtttctcaaactacagtatacttttatgttagcccatgttttcttattaactggaatagaaaatgatcgcattcaagataaagtgacagaacgcctgaaatctaatcatctcttattttaaggaatgagatttcatatgtaaaaagttttctgaaagaaatgcaaaaacaaacacagtgaagggttattaggaatgaaaactccattttaaattgacctttaaatactctatgatgttgaggccaactgagaatgctcatttaaaatcctctctgcataaaggttataggtcatctcagtataatccaaaggtaagccagttaaccagttagttttgctaacaagcattattcttcactggttgaactccatgtctgaaaataaaagtcagtcaacacaaggaaagatattttaggaatctattctctaagccaagtcgagatataatgtctactttagattagctattaatccatgtgcagtgtccttcttatagcgtctattaagtaattgtgtgaagaaataatattttttaaaaaacactctttaaaaaatattttgcaacaaagggagaacccacctctataacaaaagtaaaaaattagctaggtgttctggcttatgcctgtagtcccagccactgggtagaatgaggcaggaagattgcattagcacaggagtttgagttacagtgagtaagatcgagacactgtaagccagcctaggcaacaaactgagacactgtctcttaaaaaatttttttgctttctttgaaccctaatatttctggagtatatggttgtattttatacaaatacagctaaatttctgcttatattctaacgaaggaacttaaaggtggttaagaagtgaaagtggctttgttggaaatataatttgccaaccctagatatgaggaagatgctcttaaaactagatcctagcgtgagactcacagaataaacctgaatgagcttacaactgaacgtcatatttcacatctttatcaaatatctcatttaatgctcatttcacatgtaatgcacataaaattttacggctatgtatccctaatttttagatgagaaaggtagtgctcaaaacattttggtaacttacatgatttttttaaatgttagaaattgagttagaaatttaaacttcagtatcctattttctaagtattttaccatggtccctctttctgaataaaatgtcacataccataatgacatttcagcatgttttgcaagcctaacatagaacattttttaatgtatttatacataatatttctgtatttccataaatggtatttccagtttttgttgatttattgggctgtgggggtctctggttattctcttctatttcaaaaagctatggtaactgatttggttttaatttgctgtaatataaagacagtctctagatattaataaagttcagcttcattgaaatagccaacaaactaaagacataattgaataaagcaatagtacacagctttccagaaatatgtaaaaaccaaagtgaatatttagatttgtttttaataaaccttagttctctccttttccccaaagcactagataaacattttaaaaatatggctgcaatttgatttgaatattaggctaaaatgatttttaaaatctaatgttatatttgagaagcttaaaaataacccaaatccccttatacatttctacctgtatcatggtctaaagtatagattaatatgcttgtcatgggatcggtcatcacattatcagttggttttacaatcagcactctccccctctcacaaagtgtatcaagttaaattccacctaagcttgcctcaagtataacagcttaattatacagttaatttccccaaggtagtatctgtttgggagaaatagtttctttaatgtaaatttgattttttggctaattaatggccactcgatgtgtttcatacataaattcaaacaaagatttatacagaattacaattgttttggttgttttattattgttattgttatgttattgttattttattattggttattgttatgaagtacagtatagtctgagaatagaaatggcagtctagagaaggaaaaaattgttgaatttgaaaaaaaaaacctaactgatgatttggaagccaaataaactagtgtatatttctttgaagtgctgtttttctttgcaggattggatgaaaggtctgcaggcattttgcaatttacggaaaagtagtccagggacatccaataaacgccttcgtcaggtgaagcttaattttcttggatttttaattgtcacattttgctctaacactttgctctttttattttatttttatctgaactgttttggacatcatatggggttaagccatgctgccacttgcttcagtagcaggaaaacgttacttctttatgaaagagaatgttctttcttagtccatgccaactgttaaaaacataagaaagattattcttccactttaaataacaacactaaaccaacacagcagaaacggttctgttgggcacttaattttccttcaaaaacttattttggcctctttcaaaaaagtagaacattgaaaagatcatcagatttatagcactaatcccaataaacttttttgggattttcattttgaagaacagcttttaaaacctactgcttaactcttaggaaatatttaatcttatttgaaactgtaacatgccctatactttgagatttgtggagagttaagctaggctttctcttttttttgcctttacaagggtaactttataacctccatttcttggcttttttctttttagtaatccctgtataattggaagaagttaggcaaattttgacattctcaaggtttaaagaaagtttagtacaatatttatttactaaccaaagtgtctcctgttctctttgtgcgaatatctgataagctgagtgattaacatactgttctactgggagtggataatggttgatatttaggtgactaaatagtccctgtaacccaaagtctggctcttccccagggaaatttaagtatacacacaatcgccatgtcttcataacattgtaacattttgtaagctatcaaaaatcagattggatttttgctaataagagcaagttgtattttgtgtgaaacttgagccattaaaatgacatttgcaggtttaatataatcatagctaacatctctcaagcactttttatgtatcagtgggcagtgtgatttagtgatttacatatactgtcagccctttctattcatgggttctgcatcagtggactctaccaaccatgggtcgaaaaaatacaataaaaagatacagtataacaactatgtacatagcattcacattgtattaggtattacaagtaatctagagatgatttacggcatacaggggggcatgcatagattttatgcagatactatgtcattttctatacgggacttgagcatcttgggcttcgttagctgccaggacagagaggtggagggtcttggaatcagtcccccacagatactgagggataactagtttgtaatacttattacaacctgtagtgtagactttatacttacatattagaaagatgaggcttagagggacggatttgtgcaaggccacacaagtagtatatggcaagagagaaagagaacctgatactagaaggtggatggtctaagttttggcatccaaactaacaaataacttagtttctttaggtttgtatcctttcctgtaaaataagaaggtaaagtcagtgttttaaaaatttttagctgtggaactcttttatagaaatagaatcttccagataagtattatataacatacgggattttaatttgagtagtgacagttgtttacttatattaataaagaattttcttcttaacttcattttctctttatcattgttttatggtagaaaaggtgtatttcattatttctccaggaatatactgggagaaataacttgtaaaataaaattgcattgtttttatcttttaggtgggaagaattattttaaatgtctgaatgttttaagtatgtcatatacaaatatataaccaaagctcacattttctgaaaaaaaaggggaaaataagtcattatttttggctttgtatcttagagtaattgcttttgaaatgtagtgcaattctagaaatctggggtaatatatatatatatatttttttttttttaggtcagcagccttgttttacatattgaagaagcccataaactcccagtaaaacattttactaatccatattgtaacatctacctgaatagtgtccaagtagcaaaaactcatgcaagggaagggcaaaacccagtatggtcagaagagtttgtctttgagtaagtcttattttatcattacattaatcattttcttttaccatattgcatttctttctgtttttttggtctctgtatctaaaccatcagaacaaggtaccatatccaggtgttctaatagcatatatatatatatatattttttttttttttttctgttgtttgttcacctttatttgtgaagtgctatgcccttggtttttccacttagttattaacatgaattagcaagtcaaaaaacatttactaacccacaaatacaaaacatttactagggtttccagtacttatttgaatgaattattagtttaggaggttaaagatggtaggaaaagtgtgtaatctgcgtgtcttctgtataccaaataataaaatatgttgtgaatctggttttaggtctagcacactgtttttttttttaaagcagaaatagggggtttatttgatactagaactaaagaaataaggtagtttgatgccaaaacattttgttaattctttttctccttgctcctttagtgatcttcctcctgacatcaatagatttgaaataactcttagtaataaaacaaagaaaagcaaagatcctgatatctgtaagttgatacagaaactttctaaaatagaaaaagcatgttttatatactttcaaaattcacaatgaaagtcttaaaatagaaattaaaaaaacagaaatgcaagtagtataatttgagatagtttctttctgtacttcttaaagtattgattatcaagaaagaatatacctaagatagaaaaagaccaatatggttcaactgtacacactgttaagcaattaagattaaaatatttagccaccctcctttctccaatgaataggaagaataaggaaatgattacagtggtctttttgtagggcttgc

SEQ ID NO: 1153 - DNA, 6000 bp, Homo sapiens
attaagtagttctttagtaggaagataaagatcatgtgttctagatgcgttcattccaggagtaaacttgaataaaatgacctctgatcttttggccccaatatttaatacctaaagaatggagcaagaagggtgtaatagaatagagttaactttagggggcagcaatacactgttttgctttcaatgtgtcttgctttttgactgtagatttttttttttttttttttgagaggatgtctcagtctgtcacccaggctggagtgcagtggcttaatctcggttcactgcaacctccgcgtcccgggttcaagctattcccctgtctcagcctcccaagtagctgagattacgggcatgcaccaccacgcctggctaagtttttgtatttttagtagagatggggtttcaccatgttggccaggctggtcgtgaacaagaagttggaaggggactgggccctcttgaactcctgacctcaagtgatcctcctgcctcagcctcccaaagtgtggagattactggcgtgagccaccgcgcccagccagatgtatgtttgttttgttttagcaaataactttatgtctgagagacagattcatagggtttgggtttgcatatctgtgttttggatcgttgaaaccttaagatttctctttctgcaacttctttttggctttggttgttctattgttaataacttattgctttcctttattaaaaagtttattacagaaaatttggtagttacaaacagcataagtaaatccaagtaatcattgcctacaatgtcactactgagaaatatcattttgttgcatattcttccatatttatgtgaatgtgtttgtgatggtttttaatgaatttaagatattatacatgctgttggagagattaaatatccacatatatacccagcaagtggcagagccaggattcgaaccccaggcagttaaaagtgtatgcggtttactacattctatttaatcagtcacctccaaatatcctttttgggtatttaggtttaccagtgtttcatataaaaataaatgcttaaatggaggtgaaatctttttaagtgaattttcacacatctcatattttcttacactggattcctagaagtattattgaatcaaagtatacctttattaggatctgtattaccatactgcattccacaaagggtataccattttacattctcaaaagtagtatcatctacactggtaattactctaattttaactagtttggtgggtgaaaagggacatgacattattttactttgctttttgtgaacttaaatattgtttgtgtattgatcatttgtatttcctctctttggaactgcctgttaagataaaaggcattttaaaaattagtcctgttgggagaactttgtaggatcaagaaaaaaatgatggaaaagaatctaacatttttacatctctcacatatcttcagtatcataaatacgtaagatggatgtagattaaatatttctgatttctaagtcttttatattccattctctttagatgtttcagtgtaattgtcagtaaattttattcttcttttacagttgacattttgctaaaggctgtgggagacactcctattatgaaaacaaagaagtgggcagtagagcgaacacgaaccatccaaggactcattgacttcatcaaaaagtttcttaaacttgtggcctcagaacagttggtatgaaaccaatggtgatgttttcctacaaaaatttgcagtagttcctaggcaacagtgaattaactgttgtttatagaaatgcatatggagccacatatgtcgcttttgttatgcccttttatccctttatttttatttattcattttttttttttgagacagtctcgctctgttgcccaggctggagtgcagtgacacactgcaaccttctcctcctggttcaagcgattctcctgcctcagccaccctagtagccaggattattacaggagtgcaccaccaagcctggctaatttttgtgtttttagtagagacggggccgcctcagaagtgctagaattacatgagtgtgccactgtgccctgccttatctcttgttagtggagtttatgtactttatcaaaggattctctggggaattctgaaatgaaatgttttagatttgttttacaatgtgaaccagtttatgtatttattttttgcctcctgtattgttttcctcagaaagtcacatgaaagtatgcatgaatacccatgcataaaaatctatcatagagcattgcaatatctgtacattactacagaagttttggattttttcagtttgttttgatagcagttacttttttcctatttttcttgaggtaagcaatgtatctttgccatatattgtgaaagaactaggaaatacttcatgttaacagtacacgttaagcacttcacagtggcagttgtagtaaaggttaattctttaaatgccactgcattttaatttggcatttgactacagaaatttaaatgtctacatgtatttggcacattaagtgttttttatatatacataattatatgtatgagacacctttatctgcaaatagatcacaatcttggatagtattaactcagatagcatgagtggataggtaattgaagaattgctaagtattttttaaataaaatcaggaatttttgggggcactgggggaaatatttgcttctgaacacaggcgtgtgcatgggtaaaacaagtgaactatcattaaagcaggacatgttggaatttctttttgtcagggaggagcaaaaaactgactctgatctaagagtttggctgcaagtgctctcacaaaagtgaagctaaatggaaaagtcaggggaatgaggacatacacttgagagaaatgagcagaggctgcatctttgctaaagatgcaacatgaagagttggtaaaataagagtactgagtaatttaatgcattagtttagaaatacatggagatttaagaaaaatgaaatgatactgtgttctgtgttaagagtcttgaaattttgtattgcctgtattcattcagtaacctgaaaggacttgattgataccaatacatagtaggttgaaccatataaaattgccatcattcagccattttaccctatgaaaacaatttcataagggttaaattaaatcctctgtagtgaatatgattatcctttcccatttaagcaataggaaacataagaattattttgtcattttcctagattaaactaaaactgatacctcctgaattttatctagcaaaatggatgttaaaggaaaaaaagtaatgctaggaattctgggaagatggtggaatcagaaggtacacgtgaatctctctgaaattctcacaaaacttagtcaactagatagcaaaaccaaaaacccctgattagtatttgtaacaaaactaggtgataaggtatccccatgagccccaaaacacatgttggtggggacaaaccaccagcaaccacaggacctgcatggtatcagcatctgtgctgaaagaagcagtaagaaacagggttggcatctgacggcactgagaaaagtagaacctcaaaaacgctaatagatcctgaccgggaagtaaagtgagccaatttaagaatagaagctgactaaggagttttgccctcttctgtagcacgtgatgacaatacatttgcactaaggacttgaagggctcaaacaatctcaaaatggacccaggagggctctgggaccccatactgaggagaaatttcaggaagtgaaatgaaaattgaaaagggtagggacatgagaaaggaaggaaagagaaagaccagatcaaaatggtggggaacagagcctggaaagctcaaagcaggcctccatcgttttgaatagtatacaaaaaacaacaaggggagctctgtgaagttagaaaaactaccctaattcacctcattctaaaagttgaggaaaactaatttcacataaaaacaataacaggaataacaaggtcaaatcccgtacagtgttacaagaaaaacgagatgcggaaaagaacagcatccctagagacgatgaaatcaagccagaaatatacacctataagacaagtcgaaaattgtaaccttgtatttcaaaatgagctaaaaacaataagatggtataagacatgaaagaaaaacgatcagcattagtaaaactaagaaatgaagctcaggaaaagaattagaaataaaagaaaattatttcagaaatggagactaaagtaggaggaacataaacaacggataatatgttaagaaaaatagaagatgaaaaaaatttaaaaagtgagtcaacctttggacaagagtctgtgaagaaaaccagagcaagggaacagaaaaaatactgtaaaaatgtcatttaaggtaagagatttgaaactacatattgaaaaaacatctgaagtacctgagagtatcaacccagaataatgaacatcaggatgcattctgttaaaattactggacttgaaatcatttggaaatgtaggggacgggaaagagggcatgacttagaaagttaggctgtcgtcaaactttgacagcaaagatgcttaaggaaaaagtgtgaaataaggctttcatatcctgcataactgacttaatcggggcacagactattagcagaaaatgctattccagtgaaccatgaggaatccactagacagagagctttataaccagaataactagagacatcaatttaaagactgctgatttaaaagcagaaagaaaaaaaagctgatttaaaggcaaagtaattaataaaactaactaattttgtctgcccaagttcttgcagtttggaaataatacttccatggaattttactttcacaaacctggagtaactacatgtactttaaagtaacaaattatacgccacttagcgattctgcagtggaattgatgatgttaacctgttacttatatagagctttatagtatgcaaacagatttatgtctttctgtcttttgaactaactgaattgcttttttaaaatttccagttaacacctgttacaaaatcacattgaatgcctttggttggttctctgctccatcgagtctgctgttttctgtgaacacaacaccatcttactctttgtctcctttgcctgtgaagtcctgattactgctttcttcacctggttaaatcctgcttatttcttatttcccacaaagccatcactgacccttttgctaggctagagtagtgtacatttctgtacgctacatacttcattagatgtacttttctcacccgtatttattcatgtgtgtctctgcctctcctacagattataagctcattgagggaagagatcacattaatcttcatagttccatgtacaattctcagcacatcatagacactgataaactaagctgttattgagagcccttcccctcatttataatgtacaagagtaaaatctggatttgctcataaattgtcaggcactgaacacaaattatatctgtattacaaaaaattcacattataatgcacattgttttctgttacagttctgaaatttttgtgccagaactctactcagccataaccacaaattgatatttcagcatgaactatttaaagataatttaacaataacgtctattgagtacatataccaggcactgaaagttagtgtattatctcattttgtctttcctaacagacccaagaggtataggtcctattattttccatatcttacaaataaagaggatgagagattatttgtaaagccaggattcaaacccaggtgtgtctcagagcctatacacttaatcaccacactatattggctaagagagatgcaagcaatattgatggttcatggttggtgatcaaaatagtatctgtcaaccaactattctgatacttttttttttaaatactaagtttaatccaggacatttta

SEQ ID NO: 1154 - DNA, 6000 bp, Homo sapiens
ctgcaaggctgcctttcttacctccttcaagtctttgctcaaatgccaccttctcagtgagaacttaccagactaccctattttaaactgtcatcctctcactctctaagactcttacccgctttatttttttttccacagcacgtaatactatctggcatgctataatacagcctactccttaatagtgctatgttcctcacacaagagcgaaagttatctgttcatcttcagattttaaaacagtgcctgcacatggtaggcataaattaaatttatccgttgacaaactgatggaatgaatgactgaaaaaaaataactgccctcaaaaaggttatggtctagtggaggaagcaaatgtataaataaataatcttaaattattcctgaaagacaaaaaaacactcggcaaaacccaacttatagaaacttaaaacacagaaacaacttctcatactccacctataaacggccagtgaccaccagattcttctttttatatcttctagctctgtgccctcagtggcactgtcactcatacaatggccaaaaatgccacctgagctgccactcctgccaaaactgccacttcccacattaaccgtcactgctacctagtaagtgatggtaaacaatacttctgttcccacttttggacaagggaaagacagatttctgagtttctaaattaaatgcatttttcaatagatagttaaattatacactatacgagtagtatacaccgattacatggattagccaggaaacccactatttttaatattgcttaagtttagatatggaaaaataattttttgaattgttttactattgcaacataccttttttacactgcaaatggatgacactggcaaaatggttatgacaaagactccttcaataaaggctggtactatattttaacaaacaggtaaagttaatggcattttttcccattcgggaggatcaactagaatttaatctggattaaagaatgatgtagaatttttaaacagaccattagtattgaagttatactaaattaaaaccacacacgagtagcagaaaatattctttatagctagcaaaagcaaaacaactgaaaaaaatgaagaataagctcaagatttctcacttcaactaacacctccagactgcattatcattttaggcaaactgacattttcacatttactttgtaatggcaagattgatttccatctgggacttatctgcataaaagtgttagccttggcacaatttcaaaattgaattgaaagctcatttcttgctataagcaaagtgccacaataccacacaacagttatacctcacattaatcctaccactgggagtccaattttatgtgtttcagctagcgaattctgccctcaggtaagcacataactctataaaacccttcctcgatcatcaacaaatcacttatctctactaccttaatgcctcctgcacttgtccatactaaacagtatttacacgttaaaagagaagttctacaaatgctactattcttcataaatagaaaaaaactataaatgagggcaaattcccatacgtggaaaaatgccaaaccagaagctgaaatcataacttttaggtatagaaccacagctccaatcagtcaactacaaacgtcgccggttacttcgagggtaaataatttgcagccagctggtaaaaagcctgataaaaatattaggtcctcacatatcttccttttcaataaggagacacctgaaagtcacactgggcagtctgtcacgtatcgaaacatgcagaagagagactgtacagaacgtgcagttatcaaacgcaggaagccaaagttcctgtgctatgagaggaccacagtgaaaaacggtagcccatctgtccaaagaacagaaagaagtccacctggaaaggatgggagtcggcggaggggggcgagaagaacgagttccacgccgtcttcctcctcccgggctaactgcagccgcgggcggcaggaaggcagccgcgcggggtgggctcttggggactgggcgcagggctccgcggcgcggctgggctgcggctgcccgatcggcgagggccgggccccgggaagtctccagggcctcgcccgcgcagccaggaaagcatgcagcccaccgacgggcggaggaaccgcccgggcaaagccacgtcggtggctgaccgcgcggcagggaggtgggcaccctgtccacacccaccaggaggctgacagctggcgagcgccaggcggccgggacgggacaagggccgcagcgcgccggagggggtcgctctgagaaagccgcgctgggcgctgcccgtcgccaacgactccccctcgcccggatcagcggcggctggatactcacgtagggctggtagaacttggagagccgcggcttcccgtggttgttgaagattaggatcgccttgatcatggctgtgccgggccgaccgggtgggcactgggggccagggcgggggcgggcgcgcgagcctcgcctcgtaatctcgcctgcgatccttccccacccgccccctcccgcacgcgaccgcgcgcgctcccgagccgtcgggcggggcccaaggggcggggcctgggcggggcaggcactaaggaaagcggaaacatttctaggtccgagccagcggcctaactggagtgtgcgcattcgaccgagcacagacacgttgcccaccgctcctctcccgaggtctgtagtcgcggagaaacacatgttgcgttactaacgttcagaggtctgcgacagcttcgatttgaatgactagccgggaacaccaagtttcactgtgtaattgcgtccccctactccggcgcctcctttgcgacgctccctggagaaaagcacgcccactgcacgcgctcagtcgctacttccgctctcgagtgtctccaagcaagatggcggaggagccgcagtctgtgttgcagcttcctacttcaattgctgctggaggggaaggacttacggatgtctccccagaaacaaccaccccggagcccccgtcttccgctgcagtttccccgggaacagaggaacctgctggcgacaccaagaaaaaaagtaactgaatttatttccgggcagagaggcgggaggttcagattgcatccgagtaggggtggcggccagtaaagaagcaaaatttagaggagcgcctgtcctagacctgcattttgaccagtcatcagaagaaaagaagtgtactttttgatttttaaggcctttaagttgagtgttaaaataccatctctgtctatcggtgtagggcctgatacttggctgccacacttatttttatactgtatttttttgagttggccagactgcgagctctttgaaggagggagggagctgagtggggcggggggaggggggtctcggtaattccaggtacttaacacaggagctaattatttgagtaatgttttatggtggtaggggtggtcattggcaaagcctggattagaattcatgccttccaacttaactcgcttttgcttttttccccctcccagttggttgtgaattcactccttaaaccaaaaaccaaattcttatgcagaatgaagactgctaagggaaagctaaaggcatagatgttacctttttaagaaacacattttggaacctttgtgagttatttcattgcttgagtcagctatcctcaaccctttattgcttgagaatgtttccctttgtaaaagagattgctaaaattacgtgttctaaagcactctgtttagagttagagttgcctatgggaaaagcagcatataagcatcctcgattcagagaggctgatttcgtccttagacgttttccccgttctgtcttaagatgacagtggtctctggccgggcgcggtggctcactcctgtaatcccagcactttggtaggctgaggcgggtggatcacctgaggtcaagagttcgagaccagcctggccaacatggtaagactccatctctactaaaaatataaaagttagatgggtgtggtggcgcgcgcctgtaatcccagctactcgggaggctgaggcaggagaatcgcttgaacccgcgaggcggaggtggcagtgggcggaggtctcgccattgcactccagcctggacaacaagagcgaaactccgcctcaaaaaaaaaaaaaaaaaagacattggtctcattgctttttcttcaacttctgctactgtggaggataattctctcccaagactgccccccttcccactttaaatcagactcccatttccacctgatgcactataagtatttccatggatagccactggaatctttcttcaaaagaattccgcaggttttacagtgttttgttgcattttttcttccaatttactataggcaagagcggacgttcggagattcgttttaaggtctaacagtcttagtcaaaacttgttacttgactctgatgatagctgtgcaaaacaaaagctaaaaaaaatggcttacaatctaaatattgcccgagggcatattttcttggtctggacagtatttttttgcaaattgaactgtcatttaaggatgagatttttattttctggctcttgttagcatttgagtttgcctctccaatataaaacttagtttctaactattcctaccttgtgcttgtcattatttgttgaggataatatgatgaaagcagcttaactgttttgtatcctcagcctttgttaatctacagaagaaagattgttgaaacagaccaaggttttggcactggaggtatgttaggtttcctggggagtaagtgtttccctagttgattctaatgtgtatccgggttcagaactacaagcaaatcacctttaaaattaaaaagagagggcagctataattaaattattttccttctctggtttctcactgtcttacacttcatccttggtagcataactcatgatatttcctgcttcactttctggaaatgtttaattgaattaatcgatttattgatagccccaggggatttgagggagcagtgaaaggaggtatgaaagataggctaactaaaatcccacgttatctccaaattcattcctattcctaagataactggacctaggataattaagtagttctttagtaggaagataaagatcatgtgttctagatgcgttcattccaggagtaaacttgaataaaatgacctctgatcttttggccccaatatttaatacctaaagaatggagcaagaagggtgtaatagaatagagttaactttagggggcagcaatacactgttttgctttcaatgtgtcttgctttttgactgtagatttttttttttttttttttgagaggatgtctcagtctgtcacccaggctggagtgcagtggcttaatctcggttcactgcaacctccgcgtcccgggttcaagctattcccctgtctcagcctcccaagtagctgagattacgggcatgcaccaccacgcctggctaagtttttgtatttttagtagagatggggtttcaccatgttggccaggctggtcgtgaacaagaagttggaaggggactgggccctcttgaactcctgacctcaagtgatcctcctgcctcagcctcccaaagtgtggagattactggcgtgagccaccgcgcccagccagatgtatgtttgttttgttttagcaaataactttatgtctgagagacagattcatagggtttgggtttgcatatctgtgttttggatcgttgaaaccttaagatttctctttctgcaacttctttttggctttggttgttctattgttaataacttattgctttcctttattaaaaagtttattacagaaaatttggtagttacaaacagcataagtaaatccaagtaatcattgcctacaatgtcactactgagaaatatcattttgttgcatattcttccatatttatgtgaatgtgtttgtgatggtt

SEQ ID NO: 1155 - DNA, 6000 bp, Homo sapiens
acagtttaattaaatacagtttattaaaaaaattgaggcaactcatataggttaatttgaaatttttcctgcttgcacttaatatgtgtgtggtgtgtacacacacatgcatacatacacacagtattttatatctgaagaaacaactaagataattcacacaaaagaaagacatttccactttataaaagtaattcacaggccaggcatggtggctcagatctgtcatcccagcactttgggaagccaaagctggaggagtgtttgaggccaggaggttaagaccagcctgagcaacatagtgagaccttttctctataaaaaaagaaaaattttttaaaagtaattcaccagaggatacactatggaatcacaaccgaagggatttttttgtttgatagctatgtaaaaatatatttagtttataaaatataagtctcattagttatttacagtaatgcacaaatactgtcaggtaagtattaaaagactaaaggttactgttgtcaagtcgctgaagctaagtatcaacttaaaaagacaaaccaagcaaaacatttgaatttgtgcagtcatagaccaaggatatagaaggcaaaaacgaaaagggatgcattttgagtccagacttgaattttttttttttttttttttttttttttttttttttttgagatggagtctcactctgtcacccaggctggaatgcagtggcacgatctcagctcactgcattctccacctccccaggttcaagcaattctcctatctcagcctcgagcgagtagctgcacttataggcgtgcgctaccatgcctggctaatttttgtatttttagtagagatggggtttcaccatgttggccacactggtcttgaactcttgacctcaggtgatccgcctgccttggcctcccaaagtgctgagattacaggcatgagccatggcacccagcccacacttgaattcgtaatgtctgactctagcagaatgaaccaaaacttctgtttagcaaaacaggtgcgcaacttcctatttctcacatataacagcttggagccacaatcgaatctaacaatctattacagcatgaaatggaaatgtgcactgttaaagggcagagatgaatatgtaagttgttatatttgagggagataaatgaggaatgaaaatgaagtgcagtaggataaacttgttggcaaatggttaaacattttttaaactgctcagtgttaaacgattactgttggactcaaacctcagcatcctgccagtatatggaattgttagctcagtcacacctctagatattgtttaataaattaaactcaatatttttattcatattggacatatacttcttagagaccccttaaaacagaaacagctgagtaacacatatgccatcattacttttatgctaaaggcagagattcttaaaacctctagttagtgaaggactacattttaagagatagaaggaaactcagcaagttaactaatcccaactctatcccaagctaggagattctaaataaatgcatttagcaaagagttagagagttttctatgttcaagactcagtgttgactgcttagaatgacaaaaatatacctaaaatctgatacgttccttcaagtattctataggatggctgccacgaggaattataggctgtgaacgagaatactgtgtcataacaaagatgaaaaaaatcctaaaaaccaggaggaggctttgagcaagatcaaaggcttcacggaatgtttaggtgatgtttgtgctgggcctagaacaaggggttgaatttgtacacgtggcaatggaaaggaaggacattccaggcagcaagaatagaatgacgccctacacaaacagacacttccaactaatgttcccttacacagtctgctcctgctatgtacaagttcctggggttcttcaaacaggcgctctcctcagggtttttgcatttgctgctccttctacccgggatgctcttcccccagatatctgcaaggctgcctttcttacctccttcaagtctttgctcaaatgccaccttctcagtgagaacttaccagactaccctattttaaactgtcatcctctcactctctaagactcttacccgctttatttttttttccacagcacgtaatactatctggcatgctataatacagcctactccttaatagtgctatgttcctcacacaagagcgaaagttatctgttcatcttcagattttaaaacagtgcctgcacatggtaggcataaattaaatttatccgttgacaaactgatggaatgaatgactgaaaaaaaataactgccctcaaaaaggttatggtctagtggaggaagcaaatgtataaataaataatcttaaattattcctgaaagacaaaaaaacactcggcaaaacccaacttatagaaacttaaaacacagaaacaacttctcatactccacctataaacggccagtgaccaccagattcttctttttatatcttctagctctgtgccctcagtggcactgtcactcatacaatggccaaaaatgccacctgagctgccactcctgccaaaactgccacttcccacattaaccgtcactgctacctagtaagtgatggtaaacaatacttctgttcccacttttggacaagggaaagacagatttctgagtttctaaattaaatgcatttttcaatagatagttaaattatacactatacgagtagtatacaccgattacatggattagccaggaaacccactatttttaatattgcttaagtttagatatggaaaaataattttttgaattgttttactattgcaacataccttttttacactgcaaatggatgacactggcaaaatggttatgacaaagactccttcaataaaggctggtactatattttaacaaacaggtaaagttaatggcattttttcccattcgggaggatcaactagaatttaatctggattaaagaatgatgtagaatttttaaacagaccattagtattgaagttatactaaattaaaaccacacacgagtagcagaaaatattctttatagctagcaaaagcaaaacaactgaaaaaaatgaagaataagctcaagatttctcacttcaactaacacctccagactgcattatcattttaggcaaactgacattttcacatttactttgtaatggcaagattgatttccatctgggacttatctgcataaaagtgttagccttggcacaatttcaaaattgaattgaaagctcatttcttgctataagcaaagtgccacaataccacacaacagttatacctcacattaatcctaccactgggagtccaattttatgtgtttcagctagcgaattctgccctcaggtaagcacataactctataaaacccttcctcgatcatcaacaaatcacttatctctactaccttaatgcctcctgcacttgtccatactaaacagtatttacacgttaaaagagaagttctacaaatgctactattcttcataaatagaaaaaaactataaatgagggcaaattcccatacgtggaaaaatgccaaaccagaagctgaaatcataacttttaggtatagaaccacagctccaatcagtcaactacaaacgtcgccggttacttcgagggtaaataatttgcagccagctggtaaaaagcctgataaaaatattaggtcctcacatatcttccttttcaataaggagacacctgaaagtcacactgggcagtctgtcacgtatcgaaacatgcagaagagagactgtacagaacgtgcagttatcaaacgcaggaagccaaagttcctgtgctatgagaggaccacagtgaaaaacggtagcccatctgtccaaagaacagaaagaagtccacctggaaaggatgggagtcggcggaggggggcgagaagaacgagttccacgccgtcttcctcctcccgggctaactgcagccgcgggcggcaggaaggcagccgcgcggggtgggctcttggggactgggcgcagggctccgcggcgcggctgggctgcggctgcccgatcggcgagggccgggccccgggaagtctccagggcctcgcccgcgcagccaggaaagcatgcagcccaccgacgggcggaggaaccgcccgggcaaagccacgtcggtggctgaccgcgcggcagggaggtgggcaccctgtccacacccaccaggaggctgacagctggcgagcgccaggcggccgggacgggacaagggccgcagcgcgccggagggggtcgctctgagaaagccgcgctgggcgctgcccgtcgccaacgactccccctcgcccggatcagcggcggctggatactcacgtagggctggtagaacttggagagccgcggcttcccgtggttgttgaagattaggatcgccttgatcatggctgtgccgggccgaccgggtgggcactgggggccagggcgggggcgggcgcgcgagcctcgcctcgtaatctcgcctgcgatccttccccacccgccccctcccgcacgcgaccgcgcgcgctcccgagccgtcgggcggggcccaaggggcggggcctgggcggggcaggcactaaggaaagcggaaacatttctaggtccgagccagcggcctaactggagtgtgcgcattcgaccgagcacagacacgttgcccaccgctcctctcccgaggtctgtagtcgcggagaaacacatgttgcgttactaacgttcagaggtctgcgacagcttcgatttgaatgactagccgggaacaccaagtttcactgtgtaattgcgtccccctactccggcgcctcctttgcgacgctccctggagaaaagcacgcccactgcacgcgctcagtcgctacttccgctctcgagtgtctccaagcaagatggcggaggagccgcagtctgtgttgcagcttcctacttcaattgctgctggaggggaaggacttacggatgtctccccagaaacaaccaccccggagcccccgtcttccgctgcagtttccccgggaacagaggaacctgctggcgacaccaagaaaaaaagtaactgaatttatttccgggcagagaggcgggaggttcagattgcatccgagtaggggtggcggccagtaaagaagcaaaatttagaggagcgcctgtcctagacctgcattttgaccagtcatcagaagaaaagaagtgtactttttgatttttaaggcctttaagttgagtgttaaaataccatctctgtctatcggtgtagggcctgatacttggctgccacacttatttttatactgtatttttttgagttggccagactgcgagctctttgaaggagggagggagctgagtggggcggggggaggggggtctcggtaattccaggtacttaacacaggagctaattatttgagtaatgttttatggtggtaggggtggtcattggcaaagcctggattagaattcatgccttccaacttaactcgcttttgcttttttccccctcccagttggttgtgaattcactccttaaaccaaaaaccaaattcttatgcagaatgaagactgctaagggaaagctaaaggcatagatgttacctttttaagaaacacattttggaacctttgtgagttatttcattgcttgagtcagctatcctcaaccctttattgcttgagaatgtttccctttgtaaaagagattgctaaaattacgtgttctaaagcactctgtttagagttagagttgcctatgggaaaagcagcatataagcatcctcgattcagagaggctgatttcgtccttagacgttttccccgttctgtcttaagatgacagtggtctctggccgggcgcggtggctcactcctgtaatcccagcactttggtaggctgaggcgggtggatcacctgaggtcaagagttcgagaccagc

SEQ ID NO: 1156 - DNA, 6000 bp, Homo sapiens
aatgtacagatattgcaatgctctatgatagatttttatgcatgggtattcatgcatactttcatgtgactttctgaggaaaacaatacaggaggcaaaaaataaatacataaactggttcacattgtaaaacaaatctaaaacatttcatttcagaattccccagagaatcctttgataaagtacataaactccactaacaagagataaggcagggcacagtggcacactcatgtaattctagcacttctgaggcggccccgtctctactaaaaacacaaaaattagccaggcttggtggtgcactcctgtaataatcctggctactagggtggctgaggcaggagaatcgcttgaaccaggaggagaaggttgcagtgtgtcactgcactccagcctgggcaacagagcgagactgtctcaaaaaaaaaaaatgaataaataaaaataaagggataaaagggcataacaaaagcgacatatgtggctccatatgcatttctataaacaacagttaattcactgttgcctaggaactactgcaaatttttgtaggaaaacatcaccattggtttcataccaactgttctgaggccacaagtttaagaaactttttgatgaagtcaatgagtccttggatggttcgtgttcgctctactgcccacttctttgttttcataataggagtgtctcccacagcctttagcaaaatgtcaactgtaaaagaagaataaaatttactgacaattacactgaaacatctaaagagaatggaatataaaagacttagaaatcagaaatatttaatctacatccatcttacgtatttatgatactgaagatatgtgagagatgtaaaaatgttagattcttttccatcatttttttcttgatcctacaaagttctcccaacaggactaatttttaaaatgccttttatcttaacaggcagttccaaagagaggaaatacaaatgatcaatacacaaacaatatttaagttcacaaaaagcaaagtaaaataatgtcatgtcccttttcacccaccaaactagttaaaattagagtaattaccagtgtagatgatactacttttgagaatgtaaaatggtataccctttgtggaatgcagtatggtaatacagatcctaataaaggtatactttgattcaataatacttctaggaatccagtgtaagaaaatatgagatgtgtgaaaattcacttaaaaagatttcacctccatttaagcatttatttttatatgaaacactggtaaacctaaatacccaaaaaggatatttggaggtgactgattaaatagaatgtagtaaaccgcatacacttttaactgcctggggttcgaatcctggctctgccacttgctgggtatatatgtggatatttaatctctccaacagcatgtataatatcttaaattcattaaaaaccatcacaaacacattcacataaatatggaagaatatgcaacaaaatgatatttctcagtagtgacattgtaggcaatgattacttggatttacttatgctgtttgtaactaccaaattttctgtaataaactttttaataaaggaaagcaataagttattaacaatagaacaaccaaagccaaaaagaagttgcagaaagagaaatcttaaggtttcaacgatccaaaacacagatatgcaaacccaaaccctatgaatctgtctctcagacataaagttatttgctaaaacaaaacaaacatacatctggctgggcgcggtggctcacgccagtaatctccacactttgggaggctgaggcaggaggatcacttgaggtcaggagttcaagagggcccagtccccttccaacttcttgttcacgaccagcctggccaacatggtgaaaccccatctctactaaaaatacaaaaacttagccaggcgtggtggtgcatgcccgtaatctcagctacttgggaggctgagacaggggaatagcttgaacccgggacgcggaggttgcagtgaaccgagattaagccactgcactccagcctgggtgacagactgagacatcctctcaaaaaaaaaaaaaaaaaaatctacagtcaaaaagcaagacacattgaaagcaaaacagtgtattgctgccccctaaagttaactctattctattacacccttcttgctccattctttaggtattaaatattggggccaaaagatcagaggtcattttattcaagtttactcctggaatgaacgcatctagaacacatgatctttatcttcctactaaagaactacttaattatcctaggtccagttatcttaggaataggaatgaatttggagataacgtgggattttagttagcctatctttcatacctcctttcactgctccctcaaatcccctggggctatcaataaatcgattaattcaattaaacatttccagaaagtgaagcaggaaatatcatgagttatgctaccaaggatgaagtgtaagacagtgagaaaccagagaaggaaaataatttaattatagctgccctctctttttaattttaaaggtgatttgcttgtagttctgaacccggatacacattagaatcaactagggaaacacttactccccaggaaacctaacatacctccagtgccaaaaccttggtctgtttcaacaatctttcttctgtagattaacaaaggctgaggatacaaaacagttaagctgctttcatcatattatcctcaacaaataatgacaagcacaaggtaggaatagttagaaactaagttttatattggagaggcaaactcaaatgctaacaagagccagaaaataaaaatctcatccttaaatgacagttcaatttgcaaaaaaatactgtccagaccaagaaaatatgccctcgggcaatatttagattgtaagccattttttttagcttttgttttgcacagctatcatcagagtcaagtaacaagttttgactaagactgttagaccttaaaacgaatctccgaacgtccgctcttgcctatagtaaattggaagaaaaaatgcaacaaaacactgtaaaacctgcggaattcttttgaagaaagattccagtggctatccatggaaatacttatagtgcatcaggtggaaatgggagtctgatttaaagtgggaaggggggcagtcttgggagagaattatcctccacagtagcagaagttgaagaaaaagcaatgagaccaatgtcttttttttttttttttttgaggcggagtttcgctcttgttgtccaggctggagtgcaatggcgagacctccgcccactgccacctccgcctcgcgggttcaagcgattctcctgcctcagcctcccgagtagctgggattacaggcgcgcgccaccacacccatctaacttttatatttttagtagagatggagtcttaccatgttggccaggctggtctcgaactcttgacctcaggtgatccacccgcctcagcctaccaaagtgctgggattacaggagtgagccaccgcgcccggccagagaccactgtcatcttaagacagaacggggaaaacgtctaaggacgaaatcagcctctctgaatcgaggatgcttatatgctgcttttcccataggcaactctaactctaaacagagtgctttagaacacgtaattttagcaatctcttttacaaagggaaacattctcaagcaataaagggttgaggatagctgactcaagcaatgaaataactcacaaaggttccaaaatgtgtttcttaaaaaggtaacatctatgcctttagctttcccttagcagtcttcattctgcataagaatttggtttttggtttaaggagtgaattcacaaccaactgggagggggaaaaaagcaaaagcgagttaagttggaaggcatgaattctaatccaggctttgccaatgaccacccctaccaccataaaacattactcaaataattagctcctgtgttaagtacctggaattaccgagacccccctccccccgccccactcagctccctccctccttcaaagagctcgcagtctggccaactcaaaaaaatacagtataaaaataagtgtggcagccaagtatcaggccctacaccgatagacagagatggtattttaacactcaacttaaaggccttaaaaatcaaaaagtacacttcttttcttctgatgactggtcaaaatgcaggtctaggacaggcgctcctctaaattttgcttctttactggccgccacccctactcggatgcaatctgaacctcccgcctctctgcccggaaataaattcagttactttttttcttggtgtcgccagcaggttcctctgttcccggggaaactgcagcggaagacgggggctccggggtggttgtttctggggagacatccgtaagtccttcccctccagcagcaattgaagtaggaagctgcaacacagactgcggctcctccgccatcttgcttggagacactcgagagcggaagtagcgactgagcgcgtgcagtgggcgtgcttttctccagggagcgtcgcaaaggaggcgccggagtagggggacgcaattacacagtgaaacttggtgttcccggctagtcattcaaatcgaagctgtcgcagacctctgaacgttagtaacgcaacatgtgtttctccgcgactacagacctcgggagaggagcggtgggcaacgtgtctgtgctcggtcgaatgcgcacactccagttaggccgctggctcggacctagaaatgtttccgctttccttagtgcctgccccgcccaggccccgccccttgggccccgcccgacggctcgggagcgcgcgcggtcgcgtgcgggagggggcgggtggggaaggatcgcaggcgagattacgaggcgaggctcgcgcgcccgcccccgccctggcccccagtgcccacccggtcggcccggcacagccatgatcaaggcgatcctaatcttcaacaaccacgggaagccgcggctctccaagttctaccagccctacgtgagtatccagccgccgctgatccgggcgagggggagtcgttggcgacgggcagcgcccagcgcggctttctcagagcgaccccctccggcgcgctgcggcccttgtcccgtcccggccgcctggcgctcgccagctgtcagcctcctggtgggtgtggacagggtgcccacctccctgccgcgcggtcagccaccgacgtggctttgcccgggcggttcctccgcccgtcggtgggctgcatgctttcctggctgcgcgggcgaggccctggagacttcccggggcccggccctcgccgatcgggcagccgcagcccagccgcgccgcggagccctgcgcccagtccccaagagcccaccccgcgcggctgccttcctgccgcccgcggctgcagttagcccgggaggaggaagacggcgtggaactcgttcttctcgcccccctccgccgactcccatcctttccaggtggacttctttctgttctttggacagatgggctaccgtttttcactgtggtcctctcatagcacaggaactttggcttcctgcgtttgataactgcacgttctgtacagtctctcttctgcatgtttcgatacgtgacagactgcccagtgtgactttcaggtgtctccttattgaaaaggaagatatgtgaggacctaatatttttatcaggctttttaccagctggctgcaaattatttaccctcgaagtaaccggcgacgtttgtagttgactgattggagctgtggttctatacctaaaagttatgatttcagcttctggtttggcatttttccacgtatgggaatttgccctcatttatagtttttttctatttatgaagaatagtagcatttgtagaacttctcttttaacgtgtaaatactgtttagtatggacaagtgcaggaggcattaaggtagtagaga

SEQ ID NO: 1157 - DNA, 6000 bp, Homo sapiens
ttcttatgaaattaaagatggaataaattctcctaatcatttatgaagttatttttatatctgttcaacatttgcaaaattcaagacaaaatcattctctctggatgatattccctgccctggatgatgttcccacactgcagggcacccgtgtctcttgtcctgggcgctcttgccatgtaatgacccactatctcaaagcctgattaaaactcttggccagctggtgcctgtaatttatttgatcaaaatcaaggagcaactctagtcaaaaacaaatgtgggtccaaatgtaaactgtgcacccagatgaatgaataattcattccttcccatcattgattaaaaaaagaagcctaagtccttccaggggtgccaggcaaggatataattataggtggagctgatggccattattgttatttatcactttataaagtactttatttgcaaagtgatggcattttagaaacttaaattgtttagtcttacgtaagtaatcaggaaggtaaaaatttaaatgtacagagactaacataaaatttgtgtgggtttccccacaaacatattctcacaccctaagttcttggctcgaaaaaccaaattcaaagaagcaatatgtggacaatgggagagcatttttgtttcaaattttcaccaatattagtgacacagaacgctctccagagacttcagagaggtcattaactgataattagtaccagggaattcatgaaacttctatcactagctcaacaattcttcttttataaataaaatcagttcaagaagcaatgtagacatgaagagtttttttcctctctgtgagcttcctataactaccccattctttaaggcaactgatgcaaatttgattgagagaaatattttctttgtgtactaagatcccttatatttatagtgtccaaggtatgaactttaaatttcatttgctgtaccaggaaagtttctctggagtatgttccaaaccacatgcataaccattgcatgagtaacacttgatgtgaaatatcatgttgtagcatccctgggtctgcagtctgtgcctatgacatgcttgacattgccagtgtttttactgggagattcaaggaacagaagtctcctgattccacctggacaccagttcctgatgaacgagttcctaagcccaggtatgtgcaaatattcatatggctattttaaactttagaaatggcaaagcttgcacctctgataatgaacatcctatgaactgcgcaccagtgccttccatgccagccaagcagattgccttcatctcattaaccaaaacccaaagttaccttctcatatactcaaaccaatgttcctctagtcttctgcttaacctccatatatgttatttatccaacgtaacactacaatggtggaaaccatctgaggtgtcactggcttatagttgggaaaactgaggcctggagaggtaaagggtattgtacaagttcaatagcgggggttgggggtggtgatttccgctgcttctttatgcttcctttcaattttatagagacccatgtctttaaacccaaataaaatatgaaatataaatagtgttttccggatttgtgaccaagctggatcagagctcagtctaggactctagaccgagggtgagaagaatccagcgggtacagtggaccattaagatgtctctggtctgccaggttttggtctgttttgggtccaaatacagtgcagtgtcctcctccccaaatcatggcttagaattcttttcatgggatactatggtccagaggcaacccagagacctctcagtcctatgtagtctcttcccaaacaggctaattcatcctaactgggacaggagggaagtccccgctaagccctttgcgtgcctctcttctgtggcacgcactcacacctccattgcagcatttgcactccaagtttcatagaaacaacccatggtgtctgtcttccccaggagttgtgtgcctctggaaggaagcccaatgtcttactaatttttttgtttttcaactctcttccgcaacctccagtcctccccacaacatacctagccaagtacacttacatgaactaacttagataatacgaaccacttaaacccagaggagaaactcatccatcttcattacctgaattatctggcatgttgatattctgttacttatggagagcagactaggtgtgaaaagcacaccccagcaacctcagacagatagtcttaagtcattgcctgggattgttaactaccttctagatagttctagatagttccttctagcaggaaggggagttcagcctgagggatcaggtttcagtaagttcttatgtaataccctctccttggtatgtaaagatggtgtcactcaaccaataccagcacacatactttaagtgattttctactaatggcagtgagtttaattaaacatccttccacatgcctgcctcgtccctcttgcagcagtcaggatgctctacggggctggctgggttagtgccttgagacagtgtggacataggagtggttcatgctggtgtcgtgagggtccaatctcctcttctgcaccacccaggcaaaccaggtgtctggacaagatgggtttcagtgtttccctaatctgactttgctgggatgacccttgactcctgaaaccatagaatttcttgtagaagcaaatttttatggtcgtcattcaatgacaagaaatgacctttcaggaaagaatctgatataattggcttttcatacctgccaaaatcaaacaaaaataaaaacaacaataagaaacaaaaccaaaatgttctctgagcgagccccaggtaatgaaacatgattacacggagtcttgctggcacataccctggtgagttttggagagtcttttctttctacacttgcgaaaacgtcaacctaattctttccctctgtagagtaaatgcatgaggaatctctagcagcctttttggataagtaaaaccatccccgagatatgtgcaaaccacactcactcacttgtttcaagctccatcactgtttactgaggtttgtttgtgcttctgggaggaagccagcctgcccccagctgaggctgaactgtgctggctgaggctcctcagaaatgaggaggcggctcagaggaaatctcagcatattgtgcttggtggcattctgcattgttcaacttcctcctctcaggctgcagtacattctcctccattccagatgcttagagaagcagttcattcaaagaatttgccataaggcagaaaataagctccctccttcctcaccctttgtttcattttaggccaggttgctgtgctggctcatcctccttagaaagatatgcaacctccaatgagttccctgatgataccctgaacttcatcaagacgcacccgctcatggatgaggcagtgccctccatcttcaacaggccatggttcctgagaacaatggtcaggtgggtgtcaaacaaaccgtgtcctgatggatttcctaacttcatctcatgtcggagaaccaatcagtggatcatgctttgaaatgccacaaacatcttctgctatcctgggcattcattcagctgtgaaatggtggccgattggttggataccactaaacccctatacacacattcccagggagaagagttccaatattttcaggctagttggacacatgccagcaattagaggaaggaaatacctttccttctggattagcccattgatccaatctgtgcaaaaatagaggagcagtgaaggagaaccagtgaatggatgtggatacctgattggttggaaatgattacaaaacttgcagcagattccacctgagcatggctcatggattgtttgctgtcacacagagcacagataccacatttgctggtgtgaaggattcatagtttaatattctttttctgaactggtggccaacagcgaagggacagccaattagagatctgtggtagtattaaaaaactcttccttgtatttattcagagcttatttccaagcagttcaacaggctttcccaagtaccatcccactgtggtagccatcaaacaaaatgttaattaactttaccactatttttatactatgactttattaaaacatattaaagcactgtaatagctctggcacacaaaatggaaaccatggtatataacttgcaggagggtctatgttttctggttccagctatggtgcttaggacaactaggtccccatggagtgtcaaatgtccaagggatttcagagaaagcaaattgctagtaggacttatcccaggtatgcccttcacctttagctttaaatggatattgtttggcttgcaggtccttacagtttttagtagtgccattagcaccctacctcctcatccttcagaaagctttccaatcaaacattttgttgatgaaggccttgtatctcagaggaagagtatggagaaatcgcagtcattgcttttcaatgttaaattaaaggttaaatgaatttcttattacttcttaccctcctcataggagacattagtcttttccttgttcatgaaggggattattgctaagtggtttcaggtggttttggctattatagtacttggcctgcaaacacacacacacacacacacacacacacacacactctctcacacctccttcctcccctttggagccacactagtgctctgcaaatggaaataaagggccagaaccacttgagaacattatttatatgcatatatttttcttgaggttattactagaaggctatgtcgcagctgtttgaagtggaacagggaacactttaatgatagaccaacaaagagataagaaatgtggtcctgtcattttagataccgccttaccaaaattgcagtggacacagctgctgggccatatcagaatcacactgtggtttttctgggatcagagaagggaatcatcttgaagtttttggccagaataggaaatagtggttttctaaatgacagccttttcctggaggagatgagtgtttacaactctgaaaagtaagtggaatatttggttctttcttagtaattatttgttatgctattatggcccctttcattcagagaaaatcatgaccgactgaggttttatgcatttttagatgactttttagtgctgtttgtaaaaatttaacacctaaaaagcattattttctccttgccaatgtgtgtgtgtgtgtttatatagatacatatatgtgtgtgtgtttatatagatacatatacatgtgtgtgtttacgtgtgtgcaagagcagaagggtttgtttgtttcaccgccagttagattaagagattgccttgtgggctgggaagtgggatgtgagggtggggccgagaaaaagagaagagtctattaatgatattatcttgcctgatgaaattagatgcagctatgatggagtcgaagacaaaaggatcatgggcatgcagctggacagagcaagcagctctctgtatgttgcgttctctacctgtgtgataaaggttccccttggccggtgtgaacgatatgggaagtgtaaaaagtatgtattttgcctcattgacaattagaaagtccatggtggctaggaaacagtcctaggtagctcatggtcatcctcttcctgcagaacctgtattgcctccagagacccatattgtggatggataaaggaaggtggtgcctgcagccatttatcacccaacagcaggtaggcagcctgaggtgtgggagagggtgaagtggcttccagccaaggtgtattctagatgtaagatttgctctgctcacacacaccaccacacagctttctgtgcaaactccagcaacgggactgtcagcctttctcctaccctttcccatttcatagagcctcaccacatcacatgtggcagatttccaattgattaatcatcctcggactgattaaaaacacag

SEQ ID NO: 1158 - DNA, 6000 bp, Homo sapiens
tggtggcaggtgcctgcaatcccagctacttgggaggctgaggcaggagaatcgcttgaaccaggaggcagaggttgcagtgagccaagattgtgccattgcactccagcctgggcaacaagagttaaactccatctagaaagaaaagaaaagagaagagaaggaaaagaaaagaaaagaaaagaaagaaaggaaaagaaaaagaaaggaaagaaaagaaagtaaagagagaaagaaagaaagaaagaaagaaaaaataatgagtacagaagcaaaaatgttcccttctgatggactgcgtttttttcagggaagtacgaggtatgaagtgtgagatatctgattacggggagaaagttagaaacgaactgagataaggcggtgctttggatgagattgaggttgataacaatctatctacatttttttttccagcaggcttcagctgcccagttcagaagcagagacggctgatgtttacatacttcagaactagcttttagtcagatagatgttgaccaaagatagaggagcaacagaattgaaagtatttgcaagagagagggactgatactatgaagctatgctagacatagagaggaatgaaataaggagggaataggtgatcgagagagaagcaaaactcaaaatctggaggtcctcaagaaatcagtgaatgcaggggggtgcatgagcaaggaagattgaaggagaagaagtgattggaaagcaggatgtcagaattagtgatttggaagatggggcatttttgataataaggcccagaatgaagcctggagtaggtggaggaggggagtagaaagacagcatagatgaggaaggcaagaaatggaaaagccagagggtcagtggttatatggatgttaacactaccatgagtcatgacaggtggagggacacataggaggacaataagtctttgaagaatcggataaaatgagaccacaaatgtatttgtagagtttagctaccaaagtcagccagaggtttttagaggaggagaaatggcctgaaagcagcatgaggagcaaggatacggacctttctttgtgaagaggaataaacggacaagaagaagaaacagcccccacaagaaaaaggctagggaaaagtaattggtctagaatacagccaggatttattgtggcagtggttctcatccctggctgcaaatgagaatcatctatggagttttaaaacctacccatgccgaggtcccagtccttactgatgaatgagaatcttgagcttggggatttgcatcactgaagagctcccctggtcatctaatgtgcaagtggattttaaaaccactgacttaaggcaaagaggtggagggaactttggagaaggggctgagggtacagatagatttcttgattataaattataatggcctgaatgtacaaactgtgctccccaagtgtgcccccatgaaccctcaaggaactgtgagtagcagcagccccttcttctcccaagttcattactcctttttgtctcaaagcagagattctgatcaaacagctagatgtggtctttgcagagaacctgagtttatctttctgctttattttaatcttccgccacacttttccaggtgatctgaggaaagcgggaactgtcatgtagttaacaagggcagggggtggctgggcgcggtggctcacgcctgtaatcccagcactttgggaggctgaggcgggcggatcacgaggtcaggacatcgagaccatcctggctaacacggtgaaaccccatctctactaaaaatacaaaaaaattagccaggcgtggtggcaggcacctgtggtcccagctactcgggaggctgaggagagagaatggcgtgaacccgggaagcggagcttgcagtgagctgagattgcgccactgcactccagcctgggcaacagagcaagactccgtctcaaaaattgaaaaaaaaaaaaagaagaagaaggggagggggagttgttacaggtagctcccagccctgacccaatcgctgacacaggtcaagccacttctgtccgctgtgcttccatgtgactcctgtaaaatgtgatggtaggactgatgtggaggatggcaaggatgacaatgtgacacttaatctttataaagcagtgtcagccttagactccgaatttacgaagatcatctaatgtaatccacgagctcctcgggaagtgagtagaataagaatccccatttacaggtgaatccactgggacttcacagagataagtgacttgcccaagatcaccagctaagttacattaaccgcagatggcctccagagaccagggcctcaaacactccattttacgtcactttaaaaaaaaccactgaagtcaccttctcatcactctgtgattctttaactctttggctttcttttcctgaagggacagggtataaattgcagacttcaaaggctttgaaggggcagtggttttactgaaaacttactgcaggcttctggaagtgagtctgaggcgcacttatggggaaatgacatcatgaggtttcatagcctggcttccccacaggtgctcccctgggggtttcgggagcctgacaatagctggcttttcttccagctccgggagcatcttttctggcaggtggaaatgtaatatcacgtggtcagaaggaagggctcctacttggatggtgagactaggatctagtaattgccaggaagattctgggtggtatttcttcactgtgaaaagtagactccaattctttaactctcgtattctataattttaaattaggtaaatttaatcgctcgcttcttggctcagcgttactacaaattaaacatgcaagtattaatattgaatataatgtccctttaaacaatatcctgaaactcgttgtggggcatttccaatatatccataaagcaaataaaacaacttaattgtttgtttctctaagggaaggagctaaacccgaaattaatttagttcggcctgtgaaacaattcgtttgctctgcctaattctgccaatttaagaacttttcccagacacaattagcatgtaaatcggcggcggggagcgaagaaggagcctcggcgaccccggttgggtggagcgcgggacaaaaaaccccggaggccgaagggtccggagcttcgaaggggctgcagtaccgcgcctggggcgcacggacgagccaggggaccagctcacactgaccctgcagtcatcagccaaaatctgggtgttaaatagcgcagccggggatccagccgtcttggccgccagatccttctcctaaccccgcgggattctgaggagacgtcctggagccggcccccacccaacccgcgggaaagcgcaatcctacccaccgccccacactccccaaccccctcccgaggctggctcttgaagccgcgggggctgcgcgcgcacctagggccgcgccccccactaccccaggtctatagaggcctttgcccgagaaaggtggggatagcggcccctgctgacagctctggagaacagcaggggtactgattttttctttttttcctaccattctccctaccttttccaggtggtggtagtggtgcggggggaatgggtgttgacccatgtgcatttattcttcgtgaagcctcttaagcagatgtctgtacttagagaagcgaccaaagagggaacgtggacttattagtggtcttagtcccaattagggaacaggtacagtttccaatataaagaaactcggcctaagtgggactgagaccccgatctccgcacttgcttttctcagccaactccatgactagtaaatatctctccgagaactgctgggccgcccgatgttactttgtttaaaggttgcgactaggatccgtaccatctgcgaagcccccttggggagcaagagccgcggcgcgcagttgatttcggggcgcagcggcagggggaggggaacgtggtgtggcccgacgagttggcacaagcctgtaactgcaagactttgtagctattgaaagttcaagtggtgaaagaaggctgtgcctgccattcttcatgtgatcataacaatagcgccttggaagtggttgcgattttcttcttccataaaccttttgggttctcactggaattgtatgcgtgttatttctgaagtttacttatttctaagaccagtccacaaaatgtgaacttcattaagttttaaaatagatcgccgtcgttaaaaacgccattctctgcactgtagtttatttgcttacttcacatgctttattaacgtgtgtatgtgcgtaattaatagctgtgttcttatcttccaagtgtatttttaaccgcaccggcttctatccaattcatctaactacgtagagcgtccatcgcttctggaatctacctcttgataacagtaatcagaatcagaaaagctcgccgttcacttaccctcatcctttaaaacttttccatttaagaaaatcgatgaacaaaacctttcttgtaactcgctcctgcactacgtctatttttatttatttttctgatttggcaggactcagcaatgctgtccgggattttttttttctttttttttttcctagctagagcagatgtgggggtgggggaggtgagggctgggctccagccagagtcgcccccgctgagcctccgcctagcgcgcggtggggccaggaatcctggtggaaggaagcggcgctggccagttggtccaaggctccacctgcagccacaccgcgtagtttctccgcctctgcctcgctcactcgcactcacatacaccacagctctcctttgggtcggaggagacgccagccaaagtaggcggagttgcggaaggagagtccgatctgcgcaatccagtccgggacttggctccgcccgggagcggcggcctctccggtgacagaggagtagtgagcggcacggggtgaggctgcagccaactccgctccccgcgcactcggctgcccaggcgctcggaacccagcagcggcgctcctccgcggtgccggtcgcccgcgatgcccgcttagcagcgtgtagcagcggccagcatcaccacacccgcggcaccgcgctgccggccgcagagccgggccagagccttgcacccctgccccagcccccaccccgccccccgccctgaaatgacttgttaatcggcgcagacaccaccaaggggactcaccgaagtggaatccaagtggaatttggatttggagaagagtttcttgaacatttaccctcttccttgttggttttctttttctttttcttctttttttttttggcttcttttttcctctccccttctccgctcgtcattggagatgaacacatcgcgtttgcatcccagaaagtagtcgccgcgactatttcccccaaagagacaagcacacatgtaggaatgacaaaggcttgcgaaggagagagcgcagcccgcggcccggagagatcccctcgataatggattactaaatgggatacacgctgtaccagttcgctccgagccccggccgcctgtccgtcgatgcaccgaaaaggtacgccccgggcgcccgggcgcgccccacctcccgggcagctggactccagcctgagggtcccggggccgtggctagcgcgtgctgtcggctttgtggtgcctgcgttttattttgtcttgtgtctctgtttcccgagccttgcccggtcctgggggagcagccgtgagccctgcctgcctttcctctctgccctgcgccccagagtgcgtccggctccacgtcgagagctttcccacccgcgttgcgcacacgcccggcgccgccccgggccgcgacggcgcgtatggctgttcctcctgggggtgtgtgtgcgagacccaaggctcatcctcccgcgtgcccagcagggagcagagcgggccctaaatggtgggattctcggaagctccctggcccggtgtgtcgaaggc

SEQ ID NO: 1159 - DNA, 6000 bp, Homo sapiens
ggaaatctgaactttgacaatccctctcacagtggggccaaggaggaattaggcaagccaaaagaagtgaactttactcttctattgcctgtttgaattttgtatccaagcaagtgttacttaagtaatttaagagactggttcatcgaaaaaataaaactccccaaattcccatagctggtagactgtggtcacagccacagtgcactaagactatctgctcagcacttctggtgacccaaaagggtctgaggacaggagctcagagttgggtcagctgtccaggtactcagggttgtcacaggcaaaactgctggaactcagggcagcattgcaaatgccacgccgctctcagggccccttgcctgccgctggaattaaacccacccagatcttggaaactctgccctggacccttctcaataagtccatgagaaatcaaactctttcctttatgcgacactggattttccacaaagtaaaatcaagatgagtaaagatgtggtttctagatagtgcctgaaaaagcagagaccatggtgtcaggcgtcaccacttgggcctataaaagctgccacaagacgccaaggccacaagccacccagcctatgcatccgctcctcaatcctctcctgttggcactgggcctcatggcgcttttgttgaccacggtcattgctctcacttgccttggcggctttgcctccccaggccctgtgcctccctctacagccctcagggagctcattgaggagctggtcaacatcacccagaaccagaaggtgagtgtcggctagccagggtcctagctatgagggctccagggtgggtgattcccaagatgaggtcatgagcaggctgggcctggtcctaagatgcctgtaggtcaggaaaaatctccatggaccaaggcccggcccagccatgagggagagaggagctgggctggggggctcagcactgtggatggacctatggaggtgtctggcagactccccagggactacctgctctcctggcctggccttgtctgccactgccagctcctactcagccattcctgaacagaggacagcagagaagggccagcaccctcccagaaccatgtggcatttgccaactggattttgaccataacaatgcagccattctccccagcaccatcataggcccgcccttacaggaggattccttagtagagtccgctccttgccccactagtaacagctcacatgtctgagcactgcttacaccaggcctggtgcacgtgctttatgtgtcatttcatcactgccagccacctcaagaggcaggtacgatgaacccattctgctaaggttcagtgaggttaagtgacagaggctggattcaagccaggcctggccaacaccagagtgtccatgctcctaactgcagtgttccctcaccatcagaaggcagggcatttaatacaccagatccccaccgcctcccatctgatttgtcttggtcaacagtggcccaggccactcctacttcactcgtccccaccctggcccttcccgcaggcccctgtcctcctgccctgactatggcaagccttgcatgcagcttgtcccttactagtggtgtcaatttttttctctcagctccaagaccctaaacagtgggacctcacccctatgcctgctgttcaaagcagaaaacgaagctcaggaatgctgaggggctgccaggcctgcctctgtgccacaccagggatgcttgtggggcctgtgctggggcagacctggcctgggctgccagggcaggcccacaacccctgccagcactctgctcactgtcactttgctcccacaggctccgctctgcaatggcagcatggtatggagcatcaacctgacagctggcatggtaaggacctttgggtgcagggaggatggggcagaggctccaggccttgggcttatcttctctgagcctcccttccatggctggggttccaagcaagcttcaagtgctctcctccctcccgccataatctggccccttcccgcccaccacccagactcacctgcgccaggcatctcagccccatcttcctgcagactcacaaaaggcagctgcccaagcagggcctgacccctcggtgtcccctccccacagtactgtgcagccctggaatccctgatcaacgtgtcaggctgcagtgccatcgagaagacccagaggatgctgagcggattctgcccgcacaaggtctcagctggggtaaggcatcccccaccctctcacacccaccctgcaccccctcctgccaaccctgggctcgctgaagggaagctggctgaatatccatggtgtgtgtccacccaggggtggggccattgtggcagcagggacgtggccttcgggatttacaggatctgggctcaagggctcctaactcctacctgggcctcaatttccacatctgtacagtagaggtactaacagtacccacctcatggggacttccgtgaggactgaatgagacagtccctggaaagcccctggtttgtgcgagtcgtcccggcctctggcgttctactcatgtgctgacctctttgtcctgcagcagttttccagcttgcatgtccgagacaccaaaatcgaggtggcccagtttgtaaaggacctgctcttacatttaaagaaactttttcgcgagggacagttcaactgaaacttcgaaagcatcattatttgcagagacaggacctgactattgaagttgcagattcatttttctttctgatgtcaaaaatgtcttgggtaggcgggaaggagggttagggaggggtaaaattccttagcttagacctcagcctgtgctgcccgtcttcagcctagccgacctcagccttccccttgcccagggctcagcctggtgggcctcctctgtccagggccctgagctcggtggacccagggatgacatgtccctacacccctcccctgccctagagcacactgtagcattacagtgggtgccccccttgccagacatgtggtgggacagggacccacttcacacacaggcaactgaggcagacagcagctcaggcacacttcttcttggtcttatttattattgtgtgttatttaaatgagtgtgtttgtcaccgttggggattggggaagactgtggctgctagcacttggagccaagggttcagagactcagggccccagcactaaagcagtggacaccaggagtccctggtaataagtactgtgtacagaattctgctacctcactggggtcctggggcctcggagcctcatccgaggcagggtcaggagaggggcagaacagccgctcctgtctgccagccagcagccagctctcagccaacgagtaatttattgtttttccttgtatttaaatattaaatatgttagcaaagagttaatatatagaagggtaccttgaacactgggggaggggacattgaacaagttgtttcattgactatcaaactgaagccagaaataaagttggtgacagataggcctgattgtatttgtctttcattttggcctttggggacactggtctgtggtctgaagactctgaggagctcttcgggaggctggtgggttggaggaggggactgggatggattacagcgagggtagggtgcagtgacctgggctgaatgcaagctagctcccgagggtggggacatggcctgaaggaagccccaccttctgtctgctgcaccagcaaggacggagaggcttgggccagactgtcagggttcaaggagggcatcaggagcagacggagacccaggaagtctcacaatcacatctcctgaggactggccagctgtgtctggcaccacccacacatccatgtctccctcacaacccaggaggccgatgagaactgtgaggctcagaaagcgtgggcggtttgcctaaggtcacgtagctacttcctcactggggtcctggggcctcagagcctcatctgaggtaaaggagcaaagttgggattggggtccaaaattcactttaactccaaagcccacacacttaaccaccctgcctatttctgtccaaatgtcacctgtcctgaatggagtttttccccctgtacaactgtcatcaacctgttcgggccctctcactgacaggcaggtccctacctatatttgaggggcagcccattgcatttctggacagctctcgccattagggtgcacacacgcaccacctctgtgaacagggctctggctaggccactcctcagcagctcttgttccttccccatggccctggtcagcagctggagtgcagagaccagcgggccttaccaagccacagctccaggccatgcccgtcagcaacacttttcactgtgactctctgggaggtgcccagggcagagggtgactccaggatgggatgcctttgcagtgggtgatggtcttcaagaaccagtctcaaacttgtagtgacaggcaggtgccctccctggggagcccagagccctatgggaacaccacagtgatgctcagaagtccctgaaggcagccgccctcgactgctcatggctgtgtcattcacgcaacagcagaggacgtggcagggagttcgccagggggctgatgatggtggccagctactccagaaccactcactttccccagggagaggcgacggaagaaggcaaacctgacagtgcagggggcaggggacacttggcctagaggagagaagactgtgggggtgaagagggtgatggtgcaagagctgggtctccagcaggctgtcccgggcaggagacaggaccggctctctggtgccaagcctattaagtcctgccacgtttgctgaggaaatacctgcgggggaccaccccacagcagacacctgggctagtgacaaccaagacaccacatgcactcaagatttagcccctgaaagaactctgtagaaacaacagagggtcgggttgggggagctgtatgtcctccctcgggagggcctcccctctggaggtgagcagtggctgcttccgcaaaggacgagagagtcttggaagccaggggaggtgggtgggagtcagggtctcggcattcttctccatccagagcctagggtttaaggctggaaggatatttacggagggtaatgactttgtaaacaagacctagaaatctatctcccagtagcatcatctttgacccatgtcctctctgcccagccaaagtattgccctgcctatccagaaagatggaaacccttccagtgaaattccacgtgactccctcaagaacaaagactggaattgaggctgatgtggggcaaggttcctcgggatcctccaaggccgtgctctgagccacacattcaggacagcctgcgaggcaggtgcacagtgcggatggccgtcccgggccccactaggggtctgcagctcgccacttcctcagccaccgccgagctcctgtccctcacaccttccaggctgctccccaggaagggggacctgtggtcactggcagtgtgccctgggctggagagggcgtggggctctccagggatgagtgacaccttactgagccacagaaccaagctgcagctggtggcgacagggaaggggccctgtcaggaatgagaaaggaagacagaacaaggtaggtaagtgtcagcactgcaactgtggctgggaacctccctccctggggactgagccctggtggtgtttgctgggagttttctctaaccacgtggcctaagttctttcataaacaaggcaagccctcagcaggactcagagagaagggggttgagaagggagaagagtgcttggtgagtgggaggaagatgctggccatggggcccagggcggggagccccttggcacctcgggaaccccagcccaggaggtttcactggaagagaggctgggcttgagtgagaagtgagacacacgcgagtttccggtgaactcggcaccaaacacct

SEQ ID NO: 1160 - DNA, 6000 bp, Homo sapiens
ttcctgactaaagcacccacagctgtgtctgttccctgtaatgaatccagatactaaagtaggcgggctgcagtgtggagaccgtgacccaccagaaacaaggacggcaactcaaagacggaggaggcacatccaggaggaacctgtggggagggcccgtctggccagatctccactgccctgtccagacttgggcttgcctaatagatgaagcatcagtcatttcagcaactcaagataggagtcatcattatcatcatcacactcactgtgtgccaggcactattctaaatacttgaaaactttaaatgtattcattcctcagagcaacttcatgagacagggacagctatgacccctatttcacagatgaggctgagtagcgtgcccaaggtcacacagccaggaggcacagcagccaggcctgacagaccacctgggcccagcgtccgctctcttagccaccgtgtactatagcagcctctgttaacagaccccctttctggatgacacatgccaagtactttccatggaaccactcacttgctcctcacaaggaagagccacattattcccatttcacaggtgagaaaatcgagacccagagagagttaatgatctactcatggtcacagagttgataagggctcatttgctggactcccaaacgcagtgctcataactgctacgttccagggcctgaaggaaaaactctgcatccatggaggggccggcgctggttctcagctctcacacaggggaggggaaggggcctgtgaccgacacagccagagacagcagtattcaacctccctcctgaactttggtgtcaggcccaccacaccccgccaaggcactgcccatggccctgcaggctcggagactccttcgcagtggtggtagtggtggtgatcactgccctcctctttgtccctgacaatgcaggcacccaccttccccatctctacccacctgccgcacctgcagctgccatggtgctgtccctgcaggcgaggatggcccatcccccacttctgccctctggggagactcctggtcactctcgaatgttctggacagtttatcctttcatctttggcctcatttcaccattgaaacaaacaaaacaagctggattctgcttctgagctgaaggtgcccacctaatattcccttttcactcaccagctctgccctcagagcctcaagcccagggtctgccctttagtgggtgcttagaaaaacaccagatggacacataaatggctgttccactgcccccacagacgccccagaaccccgccctccccaccagctccccttctgcatccccgactctccttgagaacctatttggcagaagctctccacccagcaagtccgcagcttgatgagctccctcctgtgttaactggaaccgctgctgtacttcattccacataatagttcatcggatccaaagtccccacctgctttggaagcaaccacctgctcttctcataactctcctccagtttgtgcagtgaagaatcaacctttatccaagaagtctggcctttgtcctggctcttgggaggtcctaccagctacaaacccttggagtaaacaacgtggctagtccttgtcaccagttcccaggaggtagccccaaattcctagggatttcccaagtgataggagtatcttattattcatggtggtctctgagagtttatgcgagtgaagtgactcatggtgggccctaggtagtttttgctgacaatacgaccatggaggggctggccacgccactgaggttctgtgatatcagcctggcctcccggaaggagaccaggaagatgagttcaacccagtggccaatgagtccatcaaccacacctatatgataagactcaaataaaaactctggaccccaaagctcaagtgagcctccctgcttagaaatagtcagcattttgtcacacgtcaaagtgctgagaaggtgatgcctctgacgccacacggggaagacaatgagagctttgtgtttgggcccctcctccatctcgcccctgtgtctcctcttttggctggttctgatttgaatgcttttgttatgataaaactgtggccttacgtatagcactctcctgagttctgtcagtcatcctagtgcattctggaacctgaggggtagtggaaactcccagatttgcagccagtcagcagtgagggtgggctgggaacccctgaatgtgcagctggcgtctgaagcaagggcagtgttgtgggggaccatacccctcacctgtgaggtgtggctcatctcaggtggtttggcatctgaagccactgcatttagtttggtaaccttgctgcccagtcccaatggaaggatcctaaatatggtctaaggacctcctgatacaattatccagattctctccttcacagaacttgaggcactgcgataagatccaaaactatatatagacagtggaatactatacagccttaaaaaagaaggaaacgctgtcattcaccacaacatggatgaacctggaggacattatgctaagtgaaaaaatccaggcacagacagacaaataccacatgatctcacgcatatgtgaaatataaaaaagccaaactcagggaggcagagagtaggatgatggtcaccaggggctgggagggtggtgatcaggaagatgttggtcaaaggatataaaatttcaactgggaggagttaagttaaagagagccattgtacgacatggtgacaacagttgatatcaatgtcttgtatacttaaaaatcatgaagacaggccaggcgcagtggctcacacctgtaatcccagcactttgcaggggctgaggtgggtagatcacctgaggtcaggagttcgagaccagcctggccaacatggtaaaaccctgtctctattaaaaatacaaaaattagctgggcgtggtggcaggcacctgtaatcccagctactcgggaggctgaggcaggagaattgcttgagctcaggaggcagaggttgcagtgagctgagactgcgccattgcactccagtctgggcaacagagcaagactctatctcaaaataaataaataaatcacagagtagattttaaatgttcttaccaaaaataaatatgtgaagtattgtataagtagcttgatgtagcaattccataacatgcacatttcaaaacattatatcatacagcacaaatatgtgcaatacttatttgtcaatttaataataataataataagggaagaaaagatccaaaacagaggcaaaaccttggccgggcatggtggttcacgcctataatcccagcactttgggaggctgaggtgggtggatcattttgaggccaggagttcgacaccagcctagccaacatggtgaaaccccatctctactaaaaaaaaaaaaaaaatacagaaattagccaggcgtggtggcatgtgcctgtaatcccagctactcgggaagctgaggctggagaatgccttgagcccaggagatcaaggctacagtaagctatgatcaccactgcactccagcctgggtgacagagtatgggggcagggggtggtgaggggggggcggggaagtggaacagaggcaaaaccttagcaacacacatttttagatgatcttccagaataaattcatagggaggcccaggcacagtggctcacgcctgtaatcccagcactttgggaggccgaggcaggcggatcacgaggtcaggagatggagaccatcctggctaacacggtgaaaccccgtctctactaaaaatacaaaaaattagccgggcgtggtggcaggtgcctgtagtcccagctactcggggaggctgaggcaggagaacggcatgaacccaggaggcggagcttgcagtgaactaagatcacgccactgcactccagcctgggtgacagagcaagattccatctcaaaaaaaaaaaaaaaaaaaagaaattcatagggaaaagaaggtcagagaccaagggaagggaaggttctgggagaaaagcagggggcaggcagggcccaagaatcctgctgcccatgagcccttactgggaggtggggtggccttgcacagggcccaggcacctgagtgagtggtggggtccttacgttcactgctggggtgaggcaatgagcaccttattgtgtccacatgaattcaataaaaaacaagcagggcgggtggtggggcactgactaggagggctgatttgtaagttggtaagactgtagctctttttcctaattagctgaggatgtgtttaggttccattcaaaaagtgggcattcctggccaggcatggtggctcacacctgtaatctcagagctttgggagactgaggtaggaggatcacttgagcccaggaatttgagatgagcctaggcaacatagtgagactcttatctctatcaaaaaataaaaataaaaatgagccaggcatggtgcggtggcacgcacctactgctaggggggctgaggtgggaggatcacttgagcctgggaggttgaggctgcagtgatccctgatcacaacattgcatttcagcctgggtgacagagtgagaccctgtctcagaaaaaaaaaaaaaaaagtcattcctgaaacctcagaatagacctaccttgccaagggcttccttatgggtaaggaccttatggacctgctgggacccaaactaggcctcacctgatacgacctgtccttctcaaaacacctaaacttgggagaacattgtcccccagtgctggggtaggagagtctgcctgttattctgcctctatgcagagaaggagccccagatcagcttttccatgacaggacagtttccaagatgccacctgtacttggaagaagccaggttaaaatacttttcaagtaaaactttcttgatattactctatctttccccaggaggactgcattacaacaaattcggacacctgtggcctctcccttctatgcaaagcaaaaagccagcagcagccccaagctgataagattaatctaaagagcaaattatggtgtaatttcctatgctgaaactttgtagttaattttttaaaaaggtttcattttcctattggtctgatttcacaggaacattttacctgtttgtgaggcattttttctcctggaagagaggtgctgattggccccaagtgactgacaatctggtgtaacgaaaatttccaatgtaaactcattttccctcggtttcagcaattttaaatctatatatagagatatctttgtcagcattgcatcgttagcttctcctgataaactaattgcctcacattgtcactgcaaatcgacacctattaatgggtctcacctcccaactgcttccccctctgttcttcctgctagcatgtgccggcaactttgtccacggacacaagtgcgatatcaccttacaggagatcatcaaaactttgaacagcctcacagagcagaaggtgagtacctatctggcaccatctctccagatgttctggtgatgctctcagtatttctaggcatgaaaacgttaacagctgctagagaagttggaactggtggttggtggcagtccagggcacacagcgaggcttctcccctgccactcttttttctgagggtttgtaggaagtttcctcagttggagggagtgagagctgctcatcaaggacttctctgtccggttggaggttaactctgtctcttgctctctcatttctgcctggaccaagactctgtgcaccgagttgaccgtaacagacatctttgctgcctccaaggtaagaagccgtcccacggtctgttttagcaaatggggagatccatccccaaatgtctgaacaagaaacttgtctaatggaaaacgagcgggcccaaattaactctaaggtgttagatgttttcaaagaacgagaagtctgatctttactcttaagcatgttttggtctttctg

SEQ ID NO: 1161 - DNA, 6000 bp, Homo sapiens
gctgagtagcgtgcccaaggtcacacagccaggaggcacagcagccaggcctgacagaccacctgggcccagcgtccgctctcttagccaccgtgtactatagcagcctctgttaacagaccccctttctggatgacacatgccaagtactttccatggaaccactcacttgctcctcacaaggaagagccacattattcccatttcacaggtgagaaaatcgagacccagagagagttaatgatctactcatggtcacagagttgataagggctcatttgctggactcccaaacgcagtgctcataactgctacgttccagggcctgaaggaaaaactctgcatccatggaggggccggcgctggttctcagctctcacacaggggaggggaaggggcctgtgaccgacacagccagagacagcagtattcaacctccctcctgaactttggtgtcaggcccaccacaccccgccaaggcactgcccatggccctgcaggctcggagactccttcgcagtggtggtagtggtggtgatcactgccctcctctttgtccctgacaatgcaggcacccaccttccccatctctacccacctgccgcacctgcagctgccatggtgctgtccctgcaggcgaggatggcccatcccccacttctgccctctggggagactcctggtcactctcgaatgttctggacagtttatcctttcatctttggcctcatttcaccattgaaacaaacaaaacaagctggattctgcttctgagctgaaggtgcccacctaatattcccttttcactcaccagctctgccctcagagcctcaagcccagggtctgccctttagtgggtgcttagaaaaacaccagatggacacataaatggctgttccactgcccccacagacgccccagaaccccgccctccccaccagctccccttctgcatccccgactctccttgagaacctatttggcagaagctctccacccagcaagtccgcagcttgatgagctccctcctgtgttaactggaaccgctgctgtacttcattccacataatagttcatcggatccaaagtccccacctgctttggaagcaaccacctgctcttctcataactctcctccagtttgtgcagtgaagaatcaacctttatccaagaagtctggcctttgtcctggctcttgggaggtcctaccagctacaaacccttggagtaaacaacgtggctagtccttgtcaccagttcccaggaggtagccccaaattcctagggatttcccaagtgataggagtatcttattattcatggtggtctctgagagtttatgcgagtgaagtgactcatggtgggccctaggtagtttttgctgacaatacgaccatggaggggctggccacgccactgaggttctgtgatatcagcctggcctcccggaaggagaccaggaagatgagttcaacccagtggccaatgagtccatcaaccacacctatatgataagactcaaataaaaactctggaccccaaagctcaagtgagcctccctgcttagaaatagtcagcattttgtcacacgtcaaagtgctgagaaggtgatgcctctgacgccacacggggaagacaatgagagctttgtgtttgggcccctcctccatctcgcccctgtgtctcctcttttggctggttctgatttgaatgcttttgttatgataaaactgtggccttacgtatagcactctcctgagttctgtcagtcatcctagtgcattctggaacctgaggggtagtggaaactcccagatttgcagccagtcagcagtgagggtgggctgggaacccctgaatgtgcagctggcgtctgaagcaagggcagtgttgtgggggaccatacccctcacctgtgaggtgtggctcatctcaggtggtttggcatctgaagccactgcatttagtttggtaaccttgctgcccagtcccaatggaaggatcctaaatatggtctaaggacctcctgatacaattatccagattctctccttcacagaacttgaggcactgcgataagatccaaaactatatatagacagtggaatactatacagccttaaaaaagaaggaaacgctgtcattcaccacaacatggatgaacctggaggacattatgctaagtgaaaaaatccaggcacagacagacaaataccacatgatctcacgcatatgtgaaatataaaaaagccaaactcagggaggcagagagtaggatgatggtcaccaggggctgggagggtggtgatcaggaagatgttggtcaaaggatataaaatttcaactgggaggagttaagttaaagagagccattgtacgacatggtgacaacagttgatatcaatgtcttgtatacttaaaaatcatgaagacaggccaggcgcagtggctcacacctgtaatcccagcactttgcaggggctgaggtgggtagatcacctgaggtcaggagttcgagaccagcctggccaacatggtaaaaccctgtctctattaaaaatacaaaaattagctgggcgtggtggcaggcacctgtaatcccagctactcgggaggctgaggcaggagaattgcttgagctcaggaggcagaggttgcagtgagctgagactgcgccattgcactccagtctgggcaacagagcaagactctatctcaaaataaataaataaatcacagagtagattttaaatgttcttaccaaaaataaatatgtgaagtattgtataagtagcttgatgtagcaattccataacatgcacatttcaaaacattatatcatacagcacaaatatgtgcaatacttatttgtcaatttaataataataataataagggaagaaaagatccaaaacagaggcaaaaccttggccgggcatggtggttcacgcctataatcccagcactttgggaggctgaggtgggtggatcattttgaggccaggagttcgacaccagcctagccaacatggtgaaaccccatctctactaaaaaaaaaaaaaaaatacagaaattagccaggcgtggtggcatgtgcctgtaatcccagctactcgggaagctgaggctggagaatgccttgagcccaggagatcaaggctacagtaagctatgatcaccactgcactccagcctgggtgacagagtatgggggcagggggtggtgaggggggggcggggaagtggaacagaggcaaaaccttagcaacacacatttttagatgatcttccagaataaattcatagggaggcccaggcacagtggctcacgcctgtaatcccagcactttgggaggccgaggcaggcggatcacgaggtcaggagatggagaccatcctggctaacacggtgaaaccccgtctctactaaaaatacaaaaaattagccgggcgtggtggcaggtgcctgtagtcccagctactcggggaggctgaggcaggagaacggcatgaacccaggaggcggagcttgcagtgaactaagatcacgccactgcactccagcctgggtgacagagcaagattccatctcaaaaaaaaaaaaaaaaaaaagaaattcatagggaaaagaaggtcagagaccaagggaagggaaggttctgggagaaaagcagggggcaggcagggcccaagaatcctgctgcccatgagcccttactgggaggtggggtggccttgcacagggcccaggcacctgagtgagtggtggggtccttacgttcactgctggggtgaggcaatgagcaccttattgtgtccacatgaattcaataaaaaacaagcagggcgggtggtggggcactgactaggagggctgatttgtaagttggtaagactgtagctctttttcctaattagctgaggatgtgtttaggttccattcaaaaagtgggcattcctggccaggcatggtggctcacacctgtaatctcagagctttgggagactgaggtaggaggatcacttgagcccaggaatttgagatgagcctaggcaacatagtgagactcttatctctatcaaaaaataaaaataaaaatgagccaggcatggtgcggtggcacgcacctactgctaggggggctgaggtgggaggatcacttgagcctgggaggttgaggctgcagtgatccctgatcacaacattgcatttcagcctgggtgacagagtgagaccctgtctcagaaaaaaaaaaaaaaaagtcattcctgaaacctcagaatagacctaccttgccaagggcttccttatgggtaaggaccttatggacctgctgggacccaaactaggcctcacctgatacgacctgtccttctcaaaacacctaaacttgggagaacattgtcccccagtgctggggtaggagagtctgcctgttattctgcctctatgcagagaaggagccccagatcagcttttccatgacaggacagtttccaagatgccacctgtacttggaagaagccaggttaaaatacttttcaagtaaaactttcttgatattactctatctttccccaggaggactgcattacaacaaattcggacacctgtggcctctcccttctatgcaaagcaaaaagccagcagcagccccaagctgataagattaatctaaagagcaaattatggtgtaatttcctatgctgaaactttgtagttaattttttaaaaaggtttcattttcctattggtctgatttcacaggaacattttacctgtttgtgaggcattttttctcctggaagagaggtgctgattggccccaagtgactgacaatctggtgtaacgaaaatttccaatgtaaactcattttccctcggtttcagcaattttaaatctatatatagagatatctttgtcagcattgcatcgttagcttctcctgataaactaattgcctcacattgtcactgcaaatcgacacctattaatgggtctcacctcccaactgcttccccctctgttcttcctgctagcatgtgccggcaactttgtccacggacacaagtgcgatatcaccttacaggagatcatcaaaactttgaacagcctcacagagcagaaggtgagtacctatctggcaccatctctccagatgttctggtgatgctctcagtatttctaggcatgaaaacgttaacagctgctagagaagttggaactggtggttggtggcagtccagggcacacagcgaggcttctcccctgccactcttttttctgagggtttgtaggaagtttcctcagttggagggagtgagagctgctcatcaaggacttctctgtccggttggaggttaactctgtctcttgctctctcatttctgcctggaccaagactctgtgcaccgagttgaccgtaacagacatctttgctgcctccaaggtaagaagccgtcccacggtctgttttagcaaatggggagatccatccccaaatgtctgaacaagaaacttgtctaatggaaaacgagcgggcccaaattaactctaaggtgttagatgttttcaaagaacgagaagtctgatctttactcttaagcatgttttggtctttctggtttcacttgatttagaagacatgtaatagaaagcttacatgctgtagtcctgactcagatcctggtcaaagaaaagccctcttgggttttacttagctttggcatagtgcctggaacgtaggaggcactcaataaatgcctgttgaatgagagaatttttctggcccatacatttctgaaaaaccaaatactctcacagaaacagatattgagatgacaggttgagggagctttcattttgtctaagagacttcctatggcaacagaaaaggtatcgccagagcccctcctcttccacagcctggccacctaacagccctctgggttccggggctggccgtccagagctcctcagcttgctctggccggccga

SEQ ID NO: 1162 - DNA, 6000 bp, Homo sapiens
actctcgtggtgttacagttcttaaagatggtgtgtccagagtttgttccttcggatgttcagatgtgtccggagtttcttcctcccggtgggtttgtggtctcgctgagttcaggagtgaagctgcagaccttcacagcgagtgttacagctcttaaaggtggcgcctctggagttgttcgttcctcccagtgggttggtggtctcgctggcttcaggagtgaagctgcagaccttggcggtgagtgttacagctcttaaaggtggtacatccggagttgtttattcctcttgttgggttcgtggtcttgctggcttcaggagcgaagcggctgaccttcacggtgagtgttacagttcataaaggtagtgcggacccaaagagtgaggagcagcaagatttattgcggagtgaaagaacaaagcctccacagtgtggaaggggactccagcgggttgccactgctgccttgaggggccagcttttattcccttatttggcctcctccacatcctgctgatttgtccattttacatagtactgattggtccattttacagagtgctgattggtccatttttatagagtgctgattggtgcgtttacaaaccttttttggtgcgtttttacagagtgctgattggtgcatttacaaagctttagctagacacagagcgctgattggtgcatttacaaatgtttagctagacacagagcgctgattggtgcgtttttacagagtgctgattggtgtgtttacaaacctttagctagatacagagcactgattggtgtgtttacaatcctttagctagacagaaaagttctccaagtcccacccaacccagaagcccagccagcttcacctctcagtattttgggattttatttttattttttatttaaaaaaatttttttgagacagggtctcactctgttgctggagtgcagtggtgcaatcatggttcactgcagccttgacctcctgggctcaagcaatcttcccacttcagcctccggagtagctgggactacaggcatgtgccactgcacttagctaatttttaaatttattattttttaaatttttacttactattattttttgagacaggtctcactctgttgctcaggctggagtgcagtggcacatttcttggataactgagcctcaactgcccaggttcaagcaatccttccacctcagcctccctaataactgggtctagaggtgtgtgccaccatgcccggctaatttttgtattttttatagagatagagtttcaccatggtgcccaggcttgtctcagactcctgggctcatgcagttcacccacctcagcctcccaaagtgctgggattacaggtgtgagccactgtgcctggcctgatatttttattataataaaatattttctttgtttgaaatgttattaataactttatttttcttcagaatatcactgaggaggaatttttaaattttttgtagatatggggtctcactagattgcccaggttggtcttaagctcgtagtctcaagcaatcctcccacctcagccttccaaaatgctgggattacaggcaggtaatcctagcctattttggatttttttttttttttttttttgagacagtcttgctctgtcaccaggctggagtgcagtgatgagatctcggctcactgcaacctccgcctcccgggttcaagtgattctcctgcctcagcctcctgagtagctggaaccacaggcacacgtcaccacgcccagctaatttttgtatttttagtagagacagggtttcactatgttggccaggatggtctcaatctcttgacctcgtgatccgcctgcctcggcctcccaaagtgctgggattacaggcttgaaccactgtgctcggcctattttgggtttttatagcataggtcatctaaaatgctgtcataaacctgtatggtaatagaatgtaaaagatcatgataggacctttggagagtcactagtctgtgctgctatagcacaataccacaggctggataatttataaataatagaaatctatgtttctttgttttggttctggaggctgggaagtgcaagatcaaggcattggtagttttggtgtgtgaggtgggttactctctgcttctgcttctaagatgatgccttgttgttgtattctgcagaggggacgaatgctgtatcctcacatggcagaagggacagaaggataagagggcactctcttcgatatggagcccttttataaggatgctaatcccattcatgaaggcagagcactcatgaattaattacctcccaaaggctccacctcttaatactgttgcacttgggattaagtttcaacatgaattttggaggggataccatcattcaaacagcagagacaatgataccatcattcaaacagcagagacaaacttctttaggaatgaggaaactaaagctcagaggtgcttggtcatgacttgctcgtgatcaaccaacagttaatagcagagctagaactaagccccagattcttacctgcagttcagtcttctttctacactgctgtgccttctcttatatatctactttctgtgtctcattaatattgtcttaatattcacttgatccttttttcatctccatgaaaggagaaaaaaattattcttagctttttatttgtgcagtaagagaagtagatgaaataatatatgactatacattgtaaacagcaaataactactgtgtgataaactgatgattggtgctctttacaactttgatacctggggccagcactcctcctctgatagtagaatatagtggcttgacctgtgggctctggagtcaggctgcctctgaattggaattcaggctgtgtgcctttcagtgagtacttaacctctttagatttcaatttcttcatctgtgaaatggagataataaggccgggggcggtggctcacacttgtaatcccagtactttgggaggccaaggaaggtggatcccctgaggctaggagttcgagactagcctgaccaacatggtgaaaccctatctctactaaaaatacaaaaattagctgggcatgatggcgcacgcctgtaatcccagctattctggaggctgagacaggggaattgcttgaacctggaaggtggaagttgcagtgagctgagattgctccattgcactccggcctgggcaacaagagtgaaactccgactcaaaaaaaaaaaaaatgagatattaatgatacctaccttacaggtttattgagaggattaagtgagttagtatagaaatacagtgtttggcccattgtaaacaggcaaatattaactgctgttgctattttattatctgatgagggttgttatctttgctactgttttcattaagaactggttagttcttcaagagaacgtgttaggttatcatatgttccacatgaaggtttgattttctttgttttttcttggccacctgcagacccatggacttaactagcctgaagagaaatctctctaagggtcggattcgcaccatggcccaattcctgcgagacctgatgctgatgttccaaaatgctgtaatgtacaatgactctgatcatcatgtataccatatggctgtggagatgcggcaagaagtcctggagcagattcaggtactgtatgcagatacctgtagcctctggaatcttgatttcagaacgcctatgagaataaaggtgatttcgaggtgactgtgttctcagagtttatttttaaaggtgattaaggccctgaaggattgataatgtgcctgctggtttggaaaaccctgagcctcagtaagtccagctctgatagtgaagtagtctaggaatgcaggcagcagtgaagagctctcaagagagctgaggatagacaagtaatgggaattcccgcttccagagcctcaagtcaagggctaaactccaaagaggctggagtcactgtgtattttttggttgcttcatctgttgttattaatgtacgttcacactttcccatctttaggggataagatatagtagctagaagacatttgtgggtttcttttctgggtagcatcatactttaaagaaaaaagtatagttgagtctatttgccaaaaaaataaacttgcaatactttagtgtttaaggttcataatagcttgctatgtgttccttaaccctttaggtactgaatatctggttagacaaaagaaaaggctcaagtagtctggaaggagaaccagctaacccagtggatgatggaaaacctgttttctaacctggagctgctatcctgactttttctagagtttgaatctctcccggaactctgacctagagaggatcctggtacttctttgccatgtcctcattttcttttccaacaagaataataccttaactcacaaccaacgagtcaaagatgcatgtggacataatataaagaaaaaaaggggaagctgaggtttggatttatgccataaatgttgcccacatctttgttccatcggcttgatttaaagacaattccattagatcttttctaagccttttactctataaataaatgtatttacacaataggaatattgctttttaatgactagataagctgggcatagagggcacagcatcatctggtgaaacgaaggtatctgacacgggtcatttacatataccgcctggaaaggaatggttgggggaggggttcttatcatttatagagtagggataattgaagcatccttcaaacgggaagaaggatgaaataagataaattatgagtaaaatgtcagaaaacatctagtgctctaagattcacaaggagaataaaagtgactggctggctccctttggttaaaacgaactggccagaagctgcaaggttccttgctgggattggctctctgcagccaccgtccccacgctggggcttcaggtctcctagcaacaagttgtaccatatgaggacggccgctgaggtgagtacttagagagggtcaaattcagaatttgcaggtgcaacccggaaagtccccgcggacctagaggccctgcttttcaattagcctgaccctatgcacagagaggtccctgcgggacagggtcgcttcacagaggcagctggccgaggccgctcacccgccgctgtaatggtgtgtggttgcccaccagccaccgtcccctcgagcccccaccacccgctctaccgccccctcgagcccccaccacccgccccaccgccctctgctgcctggggctgttgctggttccaggccttcgggtcgccccttggcctctggttatgtgagcccatagtccttcctgccttggtgacatcgtatacgaaaagccggggctcgatttggacatagtaggaatcctattattgagaccctgtatatagaaaaacatggcagtttctaccttcatcagttaataaaatcaagtacctactattgctattcttaatcataattacattgaatttgcgatgggggtggggggaaatgcatgtcattgcagttgatacctgttaagaaactcttaatttgtgccctgaaaagccataatggagatatcaatgcctccacctcagatatatgtagaaaaaactctggccattatcaaaccagatattgttgacaaagaggaggagatacaagatattattcttagatccggattcaccattgttcaggtaacttctgggtatgatgattcatgcttttttcctctctgcccttaaaaaaaaaatgcttatgtaaatgtgcctacccatttaaacccttagtgttcagcattaaatttaagtttattcttctaagtataaaagttatatgtgatagtttttaaaaggatgtaaaatgagaaataaaatggacttttccttcacctgtcctcttttaccccaagtcccaggctccagagagaggcaaccacttaacactttctgttctt

SEQ ID NO: 1163 - DNA, 6000 bp, Homo sapiens
cagtgccactgcactccagcctaggtgacagtgagactctgtctcaaaaaaaaaaaaaaaagccaggcgcagtgcctcaagcctgtaatcccagcattttgggaggccaaggtgggcggatcgcctgaggtcaggagttcgagaccagcctggccaacttggcaaaaccccatctctactaaaagtacacacacacacacacacacacaaaattagttgggtgtggtggcaggcacctgtaatcccagctactcaggaggctgaagtaggagaattgaacccaggacagggagtttgcagtgagccgagatcgcgccactgcactccagtctgggtgacaagagcgagactccctctcaaaaaaaaaaaaaaaatagtagtttgaaagtaaagggctaaagataccttaactaaatatctactgttcattaactatcagcagtaaagcatgcccggtagtattgttgatgtgcatttgtttcgcaatttgggagctgtttctgtgtcttaaatgattgctgcaaacataccagtaataggctgggcgtattggctcatgcctgtatcgcaacacttcgggaggctgaggcgggcagatcacctgaggtcaggagttcgagaccagcctggccaaaatggtgaaacccccgtctctactaaaaaatgccgaaaaattagcttggtgtggtggtgcacgcctatagtaccagctactagggaggctgagacagaagaatcgcttgaacccaggatgcggaggttgcagtgagccaagattgtgccattgtactccagccttagcgacagagtgagactccatctcaaaaaacataccagtgataactacaaacttactctctatcacattttgggagtttaggtgctggagaatgccgaaggtgccagaaccaccccttcagttgtggcctttacagcagatggtgagcgacttgttggaatgccggccaagcgacaggctgtcaccaacccaaacaatacattttatgctaccaagcgtctcattggccggcgatatgatgatcctgaagtacagaaagacatgtgagtaacagcaaaagttttttgcaaaaagcagttatttgcaagggccacacagaagagcctcagcatgttgatgaggatccctggagcaccttactttagtaattttacttattgtccctaggggaaatctgtaccactgccaaaagggtaatccctttaaaaaattcatttttggccagtgcagtggctcacacctgtaatcctagcactttgggaggccgaggtgggtggatcacctgaagtcaggagttcaagaccagcctggccaacatggtgaaaccctgtctctactaaaatacaaaaattagctgtgcatgatggtgggtgcctgtaatcccggctactcaggaggctgagacgggagaatcacttgaacccgggagacggtggttgcggtgagccgagatcactgccactgcactccagcctgggctgctgagactctgtctcaaaagaaaaaaattcatttttgtctttacagattaggtctttgctatgtattgacatgatacatgaaaatttgcaaagcattcctaaaccacatagttcagtgttgaatacataaggcagaaatggcataggttctatcatgtgttgatccagtacagaaaaagacttgatttttcttttttcttcccccctcccaatagaaacggggctcactatgttgcccaagttggtgttgaactcctggactcaactgacccttccaccccagcctcccaaattattgggattacaggcgtgagccaccatgcccagcctgcctttttctaaaatagacatactagaggctcggtggggtgactcacacctgtaatcctaacactttgggaggctgaggtgagctcaggagttcgagaccagcctggacaacttggggaaaagccacctctgcaaaaaatacaaaaaagagccaagctcggtggtgcgcgcctatagtcccagctactagtgaggcttgagcgttgaggggcggaggttccagtgagctgagatcatgccattgcactccagtctgagtaatagcagtgaaaccctgtctcaaaaaaaaaaaaaactagaagcataggtagagtttcctgttgtatacaaaatgttttaggcctagagcagtggctcatgtctgtaatcctagcactttaggaggcagaggtggaaagactgtctgaggctgagtttaagaccatctaggccaacaaggcaagactgtgtgtgtctctgtctatatatatataaactaaatatttttaaaaatttaaacagctttattgagcttgagtagaatatgaattctgtatgcatggagttgcgtggacctctatgactggcttctttcacttagcatgttttcaaggttcatccatgttgtagcatgtgtcagtactgcattcctttttatggccaaataatactatactgtatggacatacagcacattttgtttatccatttgtcaagtgatggacatttgagctgtttctgctttttggctattagaaataatgctgccataaacatttgtgtacaagtttttgtgtggacataaatatttccatttgtcttagagagtagaattgctggatcatacagtaacggtttcatcaaattattctaaagtggctgcaaaaatcttctgcctggggcgctaaataaagaatgttgaggtttcatcataatgtttttatatgttagtgattgctttctttttatttatttatttcattttgccttgtaattctcataaaccatgttagtgattgctttctaaagaatttcacaaactgtcatttgttggccatgaatgagtctcttggggtggaagatggatgttcatggtatgtggtaattttgtcatggtaagttgttcaggtagttttctctaatagaatttttgtgtcttacagtaaaaatgttccctttaaaattgtccgtgcctccaatggtgatgcctgggttgaggctcatgggaaattgtattctccgagtcagattggagcatttgtgttgatgaagatgaaagagactgcaggtgagtgggtttagttcacatctgggaaagttctaagaacaatgattcctgtgagatcactagctccctgtgctccagctcctgtagatgaatctgtggtcccttttgtatagaaaaactaggaatggcaaaactgtgttatacttcatgctttccctgcagattgaattaatcttcaaatctcactaatggtggctggcttgtttctttttttccagtagggggtaatgttctatattgaaagccacaagactacacattaagcttttgtccctgttaggtataaattagaacttcctatttgaagtggctgttgtaagtctaaaggtcattgtagtttagtgaaccttcactaaaatgttgaaagagtgatcttaggggtttctgttttttggggtttttttgttgttgttttttgagacagagtttcactcttgttgcccaggctggagtgcagtggcacaatctcggctcaccaaagcctccgcctcccgggttcaagcgattatcctgccctctccctcccccccaacgtagctgggattacaggcatgcgccatcatgcctagccacttttgtgtttttagtaaagagatgggggtttcttcatgttggtcaggctggtctccaactcccgacaaatcaggtgattcatccgcctcagcctctcagagtgctgggattacaggcatgagccaccgtgcctggccggccgatcttgggtttgtttgtttgttttgagacaagagtctcgctctgtcgcccaagctagagtgcagtggtgcgatcttgtctcactgcaacctccgcctcccaggttcaaacaattctcccgcctcagcctcctgagtagctgaaatgacaggcatgcgccaccatgcctgaataattttgtatttttagtagagatggggtttctccatattggttaggctggtctcaaaactctcaaccttaggtgatctgcccgcctcagcctcccaaagtgctgggattacgagtgtgagccaccgtgcccggcctgatcttgggtttttaaccagtgtatttacttggagtgtttcctgcaaggacatattaggtcacttaccaaaagactgaagaatgttgtctgtggctgcaaaaggatgacacaggttgttgggctatattaataattctgttctgacagaattccatgattgaatttcattcttttccagaaaattacttggggcacacagcaaaaaatgctgtgatcacagtcccagcttatttcaatgactcgcagagacaggtgaggtcaattagcattcttattcacaaaaagtaaggtgcctgggatggaagggtacaaaaatgtttttctctttgttttctctaggccactaaagatgctggccagatatctggactgaatgtgcttcgggtgattaatgagcccacagctgctgctcttgcctatggtctagacaaatcagaagacaaagtgtaagtttgtgcagtaaatttctcacctggatgtgtgaaactaaagtgtcacttaattttttagtaattgagccttttacagtgcttttactgattttaagtctgtattgtctttgttttttcatttcaaaaccattcttttcttttcttttgggccatggtaatttaactagtacatatctcagggaaatagcttagattatctgtatttggttattgaaatttatatcctggtgataggttttgttcttaaggatttcttttcttttttttttcacaaatcatttacagcattgctgtatatgatttaggtggtggaacttttgatatttctatcctggaaattcagaaaggagtatttgaggtgaaatccacaaatggggataccttcttaggtggggaagactttgaccaggccttgctacggcacattgtgaaggagttcaagagagaggtgagttaccaatgtggttaatatgtagacgttgggatattgagaaattctttgttcagattgctctttgctttgtttacgagttcagttcaacccccttattctagacacagatactcttttcagaatattttttttccctacacattaagggtaataaaaagtaattcatgcttatatataaaggtatgactccattttgtgttgttccaccttattactgcagtttatttatcacctcactaatgctggtgtttggtgttcaatgtcttcactttatagacaggggttgatttgactaaagacaacatggcacttcagagggtacgggaagctgctgaaaaggctaaatgtgaactctcctcatctgtgcaggtgagacacggaaaattcgagcagtcttgatggatattttcagccggagcttatttaaaataaatagtattttctaattggcctaatgtcagttgagttttttttgtttgtttgttttttcagttttctggtttctagagacctttgccatgagcacagggacagtaaggtctttagtttctttatgagctgaaatttttttagccactcaaatcagttacatatactggagctaaataatgtgtgaatgatgtgctgggtgtacttgtttgcctttcagttaaagacatttattttaaaacctgctctggcagtgtttaaaactagaattactagcttggaaaaactgctgtcttaactgacaatattaaataacctctctccttgtgaattggagagtctctgagtgtcttttttttttttttttttttttttttgagacagagttttgctcctgttgcccaggctacagtgcaatggcgtgatcttggctcaccgcaacctctgcctcctgggttcaagtgatttctcctgcctcgacctcccaagtagctgggattacaggtgtgcaccaccatgcctggctaatttttgtatttatagt

SEQ ID NO: 1164 - DNA, 6000 bp, Homo sapiens
gaggcttcaaaagaaatagcctgctccaatgaacaacatgcattacttcagagatgaagctccacttctagtctgtctctgcacacccaactttgtttcaatttagaaaatgcagcactttggtggttaccagagtaaccaaacagtgcaagccattcccacccctcttaatagtaaattagtagtcctacctctataccacatttaaatccttttctgggaagttagatacatacaattatcagcactacaaaggttcacctgacaagagtcttaagcaaccaaagcagtttttaaaatgtaaatcagggccaggcctggtgggtcatgcctgtaatcccaacacttggggaggccacttgagtgtgggagttgaagatcaccctaggcaacatagcaaaacactgtctctacaaaaaattagccgggcatagtggtgtgcccctgtagtcccagctactctggaggctaaggtgggaggatcagctgaggctggcaggtcaatgctgcagtgagccgtgacagtgccactgcactccagcctaggtgacagtgagactctgtctcaaaaaaaaaaaaaaaagccaggcgcagtgcctcaagcctgtaatcccagcattttgggaggccaaggtgggcggatcgcctgaggtcaggagttcgagaccagcctggccaacttggcaaaaccccatctctactaaaagtacacacacacacacacacacacaaaattagttgggtgtggtggcaggcacctgtaatcccagctactcaggaggctgaagtaggagaattgaacccaggacagggagtttgcagtgagccgagatcgcgccactgcactccagtctgggtgacaagagcgagactccctctcaaaaaaaaaaaaaaaatagtagtttgaaagtaaagggctaaagataccttaactaaatatctactgttcattaactatcagcagtaaagcatgcccggtagtattgttgatgtgcatttgtttcgcaatttgggagctgtttctgtgtcttaaatgattgctgcaaacataccagtaataggctgggcgtattggctcatgcctgtatcgcaacacttcgggaggctgaggcgggcagatcacctgaggtcaggagttcgagaccagcctggccaaaatggtgaaacccccgtctctactaaaaaatgccgaaaaattagcttggtgtggtggtgcacgcctatagtaccagctactagggaggctgagacagaagaatcgcttgaacccaggatgcggaggttgcagtgagccaagattgtgccattgtactccagccttagcgacagagtgagactccatctcaaaaaacataccagtgataactacaaacttactctctatcacattttgggagtttaggtgctggagaatgccgaaggtgccagaaccaccccttcagttgtggcctttacagcagatggtgagcgacttgttggaatgccggccaagcgacaggctgtcaccaacccaaacaatacattttatgctaccaagcgtctcattggccggcgatatgatgatcctgaagtacagaaagacatgtgagtaacagcaaaagttttttgcaaaaagcagttatttgcaagggccacacagaagagcctcagcatgttgatgaggatccctggagcaccttactttagtaattttacttattgtccctaggggaaatctgtaccactgccaaaagggtaatccctttaaaaaattcatttttggccagtgcagtggctcacacctgtaatcctagcactttgggaggccgaggtgggtggatcacctgaagtcaggagttcaagaccagcctggccaacatggtgaaaccctgtctctactaaaatacaaaaattagctgtgcatgatggtgggtgcctgtaatcccggctactcaggaggctgagacgggagaatcacttgaacccgggagacggtggttgcggtgagccgagatcactgccactgcactccagcctgggctgctgagactctgtctcaaaagaaaaaaattcatttttgtctttacagattaggtctttgctatgtattgacatgatacatgaaaatttgcaaagcattcctaaaccacatagttcagtgttgaatacataaggcagaaatggcataggttctatcatgtgttgatccagtacagaaaaagacttgatttttcttttttcttcccccctcccaatagaaacggggctcactatgttgcccaagttggtgttgaactcctggactcaactgacccttccaccccagcctcccaaattattgggattacaggcgtgagccaccatgcccagcctgcctttttctaaaatagacatactagaggctcggtggggtgactcacacctgtaatcctaacactttgggaggctgaggtgagctcaggagttcgagaccagcctggacaacttggggaaaagccacctctgcaaaaaatacaaaaaagagccaagctcggtggtgcgcgcctatagtcccagctactagtgaggcttgagcgttgaggggcggaggttccagtgagctgagatcatgccattgcactccagtctgagtaatagcagtgaaaccctgtctcaaaaaaaaaaaaaactagaagcataggtagagtttcctgttgtatacaaaatgttttaggcctagagcagtggctcatgtctgtaatcctagcactttaggaggcagaggtggaaagactgtctgaggctgagtttaagaccatctaggccaacaaggcaagactgtgtgtgtctctgtctatatatatataaactaaatatttttaaaaatttaaacagctttattgagcttgagtagaatatgaattctgtatgcatggagttgcgtggacctctatgactggcttctttcacttagcatgttttcaaggttcatccatgttgtagcatgtgtcagtactgcattcctttttatggccaaataatactatactgtatggacatacagcacattttgtttatccatttgtcaagtgatggacatttgagctgtttctgctttttggctattagaaataatgctgccataaacatttgtgtacaagtttttgtgtggacataaatatttccatttgtcttagagagtagaattgctggatcatacagtaacggtttcatcaaattattctaaagtggctgcaaaaatcttctgcctggggcgctaaataaagaatgttgaggtttcatcataatgtttttatatgttagtgattgctttctttttatttatttatttcattttgccttgtaattctcataaaccatgttagtgattgctttctaaagaatttcacaaactgtcatttgttggccatgaatgagtctcttggggtggaagatggatgttcatggtatgtggtaattttgtcatggtaagttgttcaggtagttttctctaatagaatttttgtgtcttacagtaaaaatgttccctttaaaattgtccgtgcctccaatggtgatgcctgggttgaggctcatgggaaattgtattctccgagtcagattggagcatttgtgttgatgaagatgaaagagactgcaggtgagtgggtttagttcacatctgggaaagttctaagaacaatgattcctgtgagatcactagctccctgtgctccagctcctgtagatgaatctgtggtcccttttgtatagaaaaactaggaatggcaaaactgtgttatacttcatgctttccctgcagattgaattaatcttcaaatctcactaatggtggctggcttgtttctttttttccagtagggggtaatgttctatattgaaagccacaagactacacattaagcttttgtccctgttaggtataaattagaacttcctatttgaagtggctgttgtaagtctaaaggtcattgtagtttagtgaaccttcactaaaatgttgaaagagtgatcttaggggtttctgttttttggggtttttttgttgttgttttttgagacagagtttcactcttgttgcccaggctggagtgcagtggcacaatctcggctcaccaaagcctccgcctcccgggttcaagcgattatcctgccctctccctcccccccaacgtagctgggattacaggcatgcgccatcatgcctagccacttttgtgtttttagtaaagagatgggggtttcttcatgttggtcaggctggtctccaactcccgacaaatcaggtgattcatccgcctcagcctctcagagtgctgggattacaggcatgagccaccgtgcctggccggccgatcttgggtttgtttgtttgttttgagacaagagtctcgctctgtcgcccaagctagagtgcagtggtgcgatcttgtctcactgcaacctccgcctcccaggttcaaacaattctcccgcctcagcctcctgagtagctgaaatgacaggcatgcgccaccatgcctgaataattttgtatttttagtagagatggggtttctccatattggttaggctggtctcaaaactctcaaccttaggtgatctgcccgcctcagcctcccaaagtgctgggattacgagtgtgagccaccgtgcccggcctgatcttgggtttttaaccagtgtatttacttggagtgtttcctgcaaggacatattaggtcacttaccaaaagactgaagaatgttgtctgtggctgcaaaaggatgacacaggttgttgggctatattaataattctgttctgacagaattccatgattgaatttcattcttttccagaaaattacttggggcacacagcaaaaaatgctgtgatcacagtcccagcttatttcaatgactcgcagagacaggtgaggtcaattagcattcttattcacaaaaagtaaggtgcctgggatggaagggtacaaaaatgtttttctctttgttttctctaggccactaaagatgctggccagatatctggactgaatgtgcttcgggtgattaatgagcccacagctgctgctcttgcctatggtctagacaaatcagaagacaaagtgtaagtttgtgcagtaaatttctcacctggatgtgtgaaactaaagtgtcacttaattttttagtaattgagccttttacagtgcttttactgattttaagtctgtattgtctttgttttttcatttcaaaaccattcttttcttttcttttgggccatggtaatttaactagtacatatctcagggaaatagcttagattatctgtatttggttattgaaatttatatcctggtgataggttttgttcttaaggatttcttttcttttttttttcacaaatcatttacagcattgctgtatatgatttaggtggtggaacttttgatatttctatcctggaaattcagaaaggagtatttgaggtgaaatccacaaatggggataccttcttaggtggggaagactttgaccaggccttgctacggcacattgtgaaggagttcaagagagaggtgagttaccaatgtggttaatatgtagacgttgggatattgagaaattctttgttcagattgctctttgctttgtttacgagttcagttcaacccccttattctagacacagatactcttttcagaatattttttttccctacacattaagggtaataaaaagtaattcatgcttatatataaaggtatgactccattttgtgttgttccaccttattactgcagtttatttatcacctcactaatgctggtgtttggtgttcaatgtcttcactttatagacaggggttgatttgactaaagacaacatggcacttcagagggtacgggaagctgctgaaaaggctaaatgtgaactctcctcatctgtgcaggtgagacacggaaaattcgagcagtcttgatggatattttcagccggagcttatttaaaataaatagtattttctaattggc

SEQ ID NO: 1165 - DNA, 6000 bp, Homo sapiens
tataccactgttaattttccaattaaatattatcttccagtgactttggtctatcaagataacaatagctgtgacactgttctaaatgtcttacagatcagaagcaatcaagggagcagttgttggtattgatttgggtactaccaactcctgcgtggcagttatggaaggtaaacaagcaaaggtgagcatgattgataactagtaccttatccagaatctgtccagaattctgtgctcttttccttagttaaggaatttgagaacctgatttgcgctttttttttttttttttttttttttttggagacagtctctatagcccatggtggagtgcagtggcacggtctccgctcactgcaacctctgcctcctgggttcaaacagttctcctgccttggccacatagctgggattacaggcatgaaccaccattcctggctaattttttgtattttcagtagagacagttccactgtgttggccaggctggtcttgagctcaagtgatccgcccacgttggcctccaaagtgctgggattacagatgtgaaccactaagcctggcctcgaagtacttccaactaaaacagcaaaaacataactatagatcagggctgaccgggcataatggctcacgcctgcagtcccagcactttgggaggccaaggggggtggattacctgaggtcccaagttcaagaccagcccggccaaaatggtgaaaccccgtctctactaaaaatgcaaaaaattggccgggtacagtggctcacacctgaaatcctagcactttgggaggccaaggcgggtggatcacaaggtcaagagatcgagaccattctggccaacatggtgaaacctgtctctactaaaaatacaaaaattagctgggcgtagtggcacacacctgtagtccccgctactcgggaggctgaggcaggagaatcgcttgaacccaggaggtggaggttgcagtgagccaagatcacatcactgtactccagcctgggtgacagagcgagactttgtctcaaaaaaaaaaaaagaagagactatagatcaggtttttcatacccaatgttgggacaagaatctttacttccacatggagaattatatctacttctaagttttttggggggttggccacagatatcaggcatataggaaaaatgccaagaagcccaaattagggccaagagaaggaataatctcttggtgccaaacaagtgggataagaagaccatagacagttcaggttatttcagaagaggagattggggggaaaggaagtatgaaagcaaaagaggccatgaatggaagaagcaagagtcaagaattccaggtgttctaaatcttgctaagaacccggtgggaataaaggttgcatgtacagagtaaggaggcttcaaaagaaatagcctgctccaatgaacaacatgcattacttcagagatgaagctccacttctagtctgtctctgcacacccaactttgtttcaatttagaaaatgcagcactttggtggttaccagagtaaccaaacagtgcaagccattcccacccctcttaatagtaaattagtagtcctacctctataccacatttaaatccttttctgggaagttagatacatacaattatcagcactacaaaggttcacctgacaagagtcttaagcaaccaaagcagtttttaaaatgtaaatcagggccaggcctggtgggtcatgcctgtaatcccaacacttggggaggccacttgagtgtgggagttgaagatcaccctaggcaacatagcaaaacactgtctctacaaaaaattagccgggcatagtggtgtgcccctgtagtcccagctactctggaggctaaggtgggaggatcagctgaggctggcaggtcaatgctgcagtgagccgtgacagtgccactgcactccagcctaggtgacagtgagactctgtctcaaaaaaaaaaaaaaaagccaggcgcagtgcctcaagcctgtaatcccagcattttgggaggccaaggtgggcggatcgcctgaggtcaggagttcgagaccagcctggccaacttggcaaaaccccatctctactaaaagtacacacacacacacacacacacaaaattagttgggtgtggtggcaggcacctgtaatcccagctactcaggaggctgaagtaggagaattgaacccaggacagggagtttgcagtgagccgagatcgcgccactgcactccagtctgggtgacaagagcgagactccctctcaaaaaaaaaaaaaaaatagtagtttgaaagtaaagggctaaagataccttaactaaatatctactgttcattaactatcagcagtaaagcatgcccggtagtattgttgatgtgcatttgtttcgcaatttgggagctgtttctgtgtcttaaatgattgctgcaaacataccagtaataggctgggcgtattggctcatgcctgtatcgcaacacttcgggaggctgaggcgggcagatcacctgaggtcaggagttcgagaccagcctggccaaaatggtgaaacccccgtctctactaaaaaatgccgaaaaattagcttggtgtggtggtgcacgcctatagtaccagctactagggaggctgagacagaagaatcgcttgaacccaggatgcggaggttgcagtgagccaagattgtgccattgtactccagccttagcgacagagtgagactccatctcaaaaaacataccagtgataactacaaacttactctctatcacattttgggagtttaggtgctggagaatgccgaaggtgccagaaccaccccttcagttgtggcctttacagcagatggtgagcgacttgttggaatgccggccaagcgacaggctgtcaccaacccaaacaatacattttatgctaccaagcgtctcattggccggcgatatgatgatcctgaagtacagaaagacatgtgagtaacagcaaaagttttttgcaaaaagcagttatttgcaagggccacacagaagagcctcagcatgttgatgaggatccctggagcaccttactttagtaattttacttattgtccctaggggaaatctgtaccactgccaaaagggtaatccctttaaaaaattcatttttggccagtgcagtggctcacacctgtaatcctagcactttgggaggccgaggtgggtggatcacctgaagtcaggagttcaagaccagcctggccaacatggtgaaaccctgtctctactaaaatacaaaaattagctgtgcatgatggtgggtgcctgtaatcccggctactcaggaggctgagacgggagaatcacttgaacccgggagacggtggttgcggtgagccgagatcactgccactgcactccagcctgggctgctgagactctgtctcaaaagaaaaaaattcatttttgtctttacagattaggtctttgctatgtattgacatgatacatgaaaatttgcaaagcattcctaaaccacatagttcagtgttgaatacataaggcagaaatggcataggttctatcatgtgttgatccagtacagaaaaagacttgatttttcttttttcttcccccctcccaatagaaacggggctcactatgttgcccaagttggtgttgaactcctggactcaactgacccttccaccccagcctcccaaattattgggattacaggcgtgagccaccatgcccagcctgcctttttctaaaatagacatactagaggctcggtggggtgactcacacctgtaatcctaacactttgggaggctgaggtgagctcaggagttcgagaccagcctggacaacttggggaaaagccacctctgcaaaaaatacaaaaaagagccaagctcggtggtgcgcgcctatagtcccagctactagtgaggcttgagcgttgaggggcggaggttccagtgagctgagatcatgccattgcactccagtctgagtaatagcagtgaaaccctgtctcaaaaaaaaaaaaaactagaagcataggtagagtttcctgttgtatacaaaatgttttaggcctagagcagtggctcatgtctgtaatcctagcactttaggaggcagaggtggaaagactgtctgaggctgagtttaagaccatctaggccaacaaggcaagactgtgtgtgtctctgtctatatatatataaactaaatatttttaaaaatttaaacagctttattgagcttgagtagaatatgaattctgtatgcatggagttgcgtggacctctatgactggcttctttcacttagcatgttttcaaggttcatccatgttgtagcatgtgtcagtactgcattcctttttatggccaaataatactatactgtatggacatacagcacattttgtttatccatttgtcaagtgatggacatttgagctgtttctgctttttggctattagaaataatgctgccataaacatttgtgtacaagtttttgtgtggacataaatatttccatttgtcttagagagtagaattgctggatcatacagtaacggtttcatcaaattattctaaagtggctgcaaaaatcttctgcctggggcgctaaataaagaatgttgaggtttcatcataatgtttttatatgttagtgattgctttctttttatttatttatttcattttgccttgtaattctcataaaccatgttagtgattgctttctaaagaatttcacaaactgtcatttgttggccatgaatgagtctcttggggtggaagatggatgttcatggtatgtggtaattttgtcatggtaagttgttcaggtagttttctctaatagaatttttgtgtcttacagtaaaaatgttccctttaaaattgtccgtgcctccaatggtgatgcctgggttgaggctcatgggaaattgtattctccgagtcagattggagcatttgtgttgatgaagatgaaagagactgcaggtgagtgggtttagttcacatctgggaaagttctaagaacaatgattcctgtgagatcactagctccctgtgctccagctcctgtagatgaatctgtggtcccttttgtatagaaaaactaggaatggcaaaactgtgttatacttcatgctttccctgcagattgaattaatcttcaaatctcactaatggtggctggcttgtttctttttttccagtagggggtaatgttctatattgaaagccacaagactacacattaagcttttgtccctgttaggtataaattagaacttcctatttgaagtggctgttgtaagtctaaaggtcattgtagtttagtgaaccttcactaaaatgttgaaagagtgatcttaggggtttctgttttttggggtttttttgttgttgttttttgagacagagtttcactcttgttgcccaggctggagtgcagtggcacaatctcggctcaccaaagcctccgcctcccgggttcaagcgattatcctgccctctccctcccccccaacgtagctgggattacaggcatgcgccatcatgcctagccacttttgtgtttttagtaaagagatgggggtttcttcatgttggtcaggctggtctccaactcccgacaaatcaggtgattcatccgcctcagcctctcagagtgctgggattacaggcatgagccaccgtgcctggccggccgatcttgggtttgtttgtttgttttgagacaagagtctcgctctgtcgcccaagctagagtgcagtggtgcgatcttgtctcactgcaacctccgcctcccaggttcaaacaattctcccgcctcagcctcctgagtagctgaaatgacaggcatgcgccaccatgcctgaataattttgtatttttagtagagatggggtttctccatattggttaggctggtctcaaaactctcaaccttaggtgatctgcccgcctcagcc

SEQ ID NO: 1166 - DNA, 6000 bp, Homo sapiens
ttgtgaacaacgggcgggaccaaacaacaaaagtactgacgtcctcacttcacaaagccacaagacaagatggcgccgtcctccaggagcgggagctgggaacacgtccacgcccggggggtgtgcacgcgcccgggctcgccccagggaacgctggcgtgcactcgggcacccagtgagcgccgcagttagtctccacccatgttttccgccactccttgcgcacatgcgctctaggttcttagctggatgtctgttgcgccaacaggctcctcctcccgcgcaactgacgcaagaagactgtaatcggttcgcaatttatcccgtgtgaccttgagtctttcctgtcgccgaggaccggggctgtccgagatacggccttcatatccctcttcctcccctggactctttctgagctcagagccgccgcagccgggacaggagggcaggctttctccaaccatcatgctgcggagcatattacctgtacgccctggctccgggagcggcagtcgagtatcctctggtcaggcggcgcgggcggcgcctcagcggaagagcgggcctctgggccgcagtgaccaacccccgcccctcaccccacgtggttggaggtttccagaagcgctgccgccaccgcatcgcgcagctctttgccgtcggagcgcttgtttgctgcctcgtactcctccatttatccgccatgataagtgccagccgagctgcagcagcccgtctcgtgggcgccgcagcctcccggggccctacggccgcccgccaccaggtgaggaactgggaccttcccgaatggggtcacggcctcgggccttgggcctcgggcttcgctgcggcaggccgcgcgccctttagggtttgaattctccagtataggtcaggcgggaaggaaggtaacgggccttccatagttagcgctgccgggtcaagattttgcccaaggttttgcctccggcttgggccctgctgagtcacacccctcgcgatctagagtgtcatttcaaaattaccaggtagtggtcctcatggcctgttctgtggctgaatggaaaggtttggccttgggggtgagggatgcagtctattgggaaagccactattttcagttttatttttggctcctctacagaatacagagtgtgtaaggatcccgttgatacggtgaaataaaataagaaagctctgagtcggaactccagttttcgtgcttagcaacattttctcaaaatctgtggtgtaagattgtactcgtttgttacttcagaaaaaaaagcagatcgtggggcggagaaaaggctatggagtggttacttgttttctaaaataaaagacaaatgctttagagaacaggaattgtatgtgggcattaaggaaggcttggaaggagcctgaggttaagttgtaataaaggtcttttatcctagtgaaacgccactacttttcttttttctttcaaagacccttagtaactctagttcttttaaactaattgcacggcaaggtaaggggaagtgttttcccccaggggacatctggcaatgtctgtggatattttaggttgtcacttacttactggggtgcttattggtttctagggtgtcgaggccagggatgctgctgtatatcctacaatgcacagaacagcccccaccacaaaaatttcgcccaaaattaatagcgccacggttgagaaatcctactgtaatgtgattctaaggccatcttttatttaccttttttcgtcttacttatttgggaaactttaatatttactgttttagtagcttaatgtattttatatactaagtgagcccaagttttctctttttcctcccaggatacacactggttggtgactgagtcagttttttcttttttaggatagctggaatggccttagtcatgaggcttttagacttgtttcaaggcgggattatgcgtaagtataatatcatttcctttgagagggaatacatattaaacttcaaagcagtgttttctacatttgtgattattcttctctgtaattatttatctgtatttatttagagattatgtagtataccactgttaattttccaattaaatattatcttccagtgactttggtctatcaagataacaatagctgtgacactgttctaaatgtcttacagatcagaagcaatcaagggagcagttgttggtattgatttgggtactaccaactcctgcgtggcagttatggaaggtaaacaagcaaaggtgagcatgattgataactagtaccttatccagaatctgtccagaattctgtgctcttttccttagttaaggaatttgagaacctgatttgcgctttttttttttttttttttttttttttggagacagtctctatagcccatggtggagtgcagtggcacggtctccgctcactgcaacctctgcctcctgggttcaaacagttctcctgccttggccacatagctgggattacaggcatgaaccaccattcctggctaattttttgtattttcagtagagacagttccactgtgttggccaggctggtcttgagctcaagtgatccgcccacgttggcctccaaagtgctgggattacagatgtgaaccactaagcctggcctcgaagtacttccaactaaaacagcaaaaacataactatagatcagggctgaccgggcataatggctcacgcctgcagtcccagcactttgggaggccaaggggggtggattacctgaggtcccaagttcaagaccagcccggccaaaatggtgaaaccccgtctctactaaaaatgcaaaaaattggccgggtacagtggctcacacctgaaatcctagcactttgggaggccaaggcgggtggatcacaaggtcaagagatcgagaccattctggccaacatggtgaaacctgtctctactaaaaatacaaaaattagctgggcgtagtggcacacacctgtagtccccgctactcgggaggctgaggcaggagaatcgcttgaacccaggaggtggaggttgcagtgagccaagatcacatcactgtactccagcctgggtgacagagcgagactttgtctcaaaaaaaaaaaaagaagagactatagatcaggtttttcatacccaatgttgggacaagaatctttacttccacatggagaattatatctacttctaagttttttggggggttggccacagatatcaggcatataggaaaaatgccaagaagcccaaattagggccaagagaaggaataatctcttggtgccaaacaagtgggataagaagaccatagacagttcaggttatttcagaagaggagattggggggaaaggaagtatgaaagcaaaagaggccatgaatggaagaagcaagagtcaagaattccaggtgttctaaatcttgctaagaacccggtgggaataaaggttgcatgtacagagtaaggaggcttcaaaagaaatagcctgctccaatgaacaacatgcattacttcagagatgaagctccacttctagtctgtctctgcacacccaactttgtttcaatttagaaaatgcagcactttggtggttaccagagtaaccaaacagtgcaagccattcccacccctcttaatagtaaattagtagtcctacctctataccacatttaaatccttttctgggaagttagatacatacaattatcagcactacaaaggttcacctgacaagagtcttaagcaaccaaagcagtttttaaaatgtaaatcagggccaggcctggtgggtcatgcctgtaatcccaacacttggggaggccacttgagtgtgggagttgaagatcaccctaggcaacatagcaaaacactgtctctacaaaaaattagccgggcatagtggtgtgcccctgtagtcccagctactctggaggctaaggtgggaggatcagctgaggctggcaggtcaatgctgcagtgagccgtgacagtgccactgcactccagcctaggtgacagtgagactctgtctcaaaaaaaaaaaaaaaagccaggcgcagtgcctcaagcctgtaatcccagcattttgggaggccaaggtgggcggatcgcctgaggtcaggagttcgagaccagcctggccaacttggcaaaaccccatctctactaaaagtacacacacacacacacacacacaaaattagttgggtgtggtggcaggcacctgtaatcccagctactcaggaggctgaagtaggagaattgaacccaggacagggagtttgcagtgagccgagatcgcgccactgcactccagtctgggtgacaagagcgagactccctctcaaaaaaaaaaaaaaaatagtagtttgaaagtaaagggctaaagataccttaactaaatatctactgttcattaactatcagcagtaaagcatgcccggtagtattgttgatgtgcatttgtttcgcaatttgggagctgtttctgtgtcttaaatgattgctgcaaacataccagtaataggctgggcgtattggctcatgcctgtatcgcaacacttcgggaggctgaggcgggcagatcacctgaggtcaggagttcgagaccagcctggccaaaatggtgaaacccccgtctctactaaaaaatgccgaaaaattagcttggtgtggtggtgcacgcctatagtaccagctactagggaggctgagacagaagaatcgcttgaacccaggatgcggaggttgcagtgagccaagattgtgccattgtactccagccttagcgacagagtgagactccatctcaaaaaacataccagtgataactacaaacttactctctatcacattttgggagtttaggtgctggagaatgccgaaggtgccagaaccaccccttcagttgtggcctttacagcagatggtgagcgacttgttggaatgccggccaagcgacaggctgtcaccaacccaaacaatacattttatgctaccaagcgtctcattggccggcgatatgatgatcctgaagtacagaaagacatgtgagtaacagcaaaagttttttgcaaaaagcagttatttgcaagggccacacagaagagcctcagcatgttgatgaggatccctggagcaccttactttagtaattttacttattgtccctaggggaaatctgtaccactgccaaaagggtaatccctttaaaaaattcatttttggccagtgcagtggctcacacctgtaatcctagcactttgggaggccgaggtgggtggatcacctgaagtcaggagttcaagaccagcctggccaacatggtgaaaccctgtctctactaaaatacaaaaattagctgtgcatgatggtgggtgcctgtaatcccggctactcaggaggctgagacgggagaatcacttgaacccgggagacggtggttgcggtgagccgagatcactgccactgcactccagcctgggctgctgagactctgtctcaaaagaaaaaaattcatttttgtctttacagattaggtctttgctatgtattgacatgatacatgaaaatttgcaaagcattcctaaaccacatagttcagtgttgaatacataaggcagaaatggcataggttctatcatgtgttgatccagtacagaaaaagacttgatttttcttttttcttcccccctcccaatagaaacggggctcactatgttgcccaagttggtgttgaactcctggactcaactgacccttccaccccagcctcccaaattattgggattacaggcgtgagccaccatgcccagcctgcctttttctaaaatagacatactagaggctcggtggggtgactcacacctgtaatcctaacactttgggaggctgaggtgagctcaggagttcgagaccagcctggacaacttggggaaaagccacctctgcaaaaaatacaaaaaagagccaagctcggtggtgcgcg

SEQ ID NO: 1167 - DNA, 6000 bp, Homo sapiens
gcaccttctggatatgtgaaagtagaggtaaaagataagacctagcttggttattagacagcagagcctagtgtttagtagtgcaggttctggagttaagagagtttggcttcaaattctagtttcaccattcaattgctatgtaaccactctaggcctcagtttccacatctgcaaaatggtaataccaataatatttacttgagactattgttgtgaacatgtcagtaaataatgtatataaagcatttgtaaggcacttaaaatgaacgctcaacaactattggtgattactattctaatgacaattcctattaatgaatgagttatttaaatacttaaaagttgaaactagttacctgtcttcaaatatgctaaagtaacaatcatgccagttagaatattattaaaaatataggccaggcattgtagctcacgcctgtaatctcagcactctgggaggctgagccaggaggactgcttgaggccagaagtttgagaccagcctaggcaacacagcaagaccctatctctataaaagaaaaaataattatacatatataattatttcctgaataatatatatgtatggcatacacaggtattggacagccgcctgctctgtttggtaaacatttatctgcatgcagattatgcattagctccttccatttcccaattttgcactgagatgacaacagaaatgaaatacagcactgtgctgtagaagaattataccatttagctacggatctgtccattcttgctcatctgaacctttatgtttttagattcaggttcatttccttgagccttcaggctgtagcccatgttaatttgcaaagcagtccagtagcctgtccttcacgctgaagatatgataaagcttgtgctttgaatatctagcgctaccacatcccccttgtggtcgtggagagtatttgcaaggcgcctgagaaaccaccagaaacagcaaacacactggatgtacccataggatcgtagtttcctacacccttagataacaacatttgattccaggattcttttttttttttttttttagacggagtcttgctctgtcgcccaggctggagtgcagtggctggatttcggctcactgcaagctccgcctcccgggttcacgccattctcctgcctcagcctcccgagtagctgggactacatgtgcccgccaccgcgcaaggctaattttttgtatttttagtagagacggggtttcaccgtggtctcgatctcctgacctcgtgatccacccgcctcggcctcccaaagtgctgagattacaggcgtaagccaccgcgcccggcctaattccaggattcttttgattaacacttcgtggctttttaacgtatagagcaagaaaaaggaaagcgaactctcggccggcgcggtggctcacgcccataatcccagtattttgggaggccgaggaaggcggatctcttgaggtcaggagttcgagaccagcctggccaatatggtgaaaccccatctgtactaaaaatacaaaaaaaaaaaaaaaaaaagaagaagaaaagaaaaactcttaggagaaccagttaatacaacagagaagtgagaagtatgcagtttctccaattatttccacctgcccttctccgccccgtcatgtacaacgtaagaacataatgttttttattgcatttcaatgttcaatattatttgtcactcctctgtcttctttgcatcggtatattgttttagaatctaaatctctacaaacaggaatcatgagcctgtttggatagcctttaagaaagcctgccttctcatttttcttcctttctctctcttttttttttgggggggggggggggcggagtctggctctgtcacctggagtgcagtggtgcaatctccactcactgcaacctccgcctcctgggttcaggcaattctcctgcctcagcctcccgagtagctggggttacaggtgcccactaccacgcctggttaattttcgtatttttagtagagacgaggatttcaccatgttagccaggctggtctcggactcctgacatcaggtgatccacccgcctcagcatcccaaagtgctgggattacaggcgtgagccaccacgcccggccgcatctttcttttctctctttctctttccttcctttccttatttccttttctccttccttctttccctccttccctccctccttccttcctttctcctttctttctgtttttttgttttttgttttttttaatgtctcgctgtgtcacccagactggagtgaaatggcacaatcataatcacgactcactgcagcctcgacctctcttggctcaggtgattcttccacctcagcctcccgagtagctggtagctgggactacaggtgcaccaccatgcccggctaattttttgtagaaatggggttttgccatgttgcccaggctgttctcaaattcctgaactcaagtgatcctcccactccagcctcccaagtaggtgggactacaggtgcttgctaccatgcccagccaatttaaaaaaaaaaaaaaaaaaaattggccggccgcagtggctcacgcctgtaattccagcatttgggatgccgaggcgggcggatcccttgagttcaggagttggagaccagcctgggcaacaaggcgaaaccccgtctctacgaaaaatacaaaaattagccaggcgtagtgccgcatgtctgtaatcccagctactcgggggaggggggcgctgaggcggcactggaatcatctgagcccagagaggtggaggctgcagtaagctgagactgcaccactacactgcagcctgggcgacagaggctaaagatggagtctcactctgtcgctcaggctgatctcgaactcctgggttcaagtgatcctcccacctcggcctcccaaagtgctgggattacaggcgtgagccaccgcctggccacccctgccttctgagagaactaaaaacaagagaaatgaagtgttaagtaactagtgaggataatatagtaatagctgacagttaagagtgtgtgggaggctttttaaaaacttttagaatctatataatctataacccatgttacgttagacttttgtttattttcttactcccactgccatcctcctcagaatgtaaactcttcagttagcttctttccctccccaactttccccaacatttccttcacagttcctcacccaggggtgactacttaataatacagatcttcctgaagagatagggggtctgaaacatttctctttttttgaaagcgggcttccaggacaaattgcttcatctccaaaatcaagttcaatctgtcatcagccattcgttcgtgttttgctttcgctgtattcctaccacctgggagagtgactgacacacggtaggcatgccaaaacatatctgttgaatcaattaattcctcttcttaaaaatctaaaactgggttgggcgcggtggctcacgcctgtaatcccagcactttgggaggccgaggcaggcagatcacgaggtcaggagatcgagaccatcctggccaacatggtgaaacccggtgtctaccaaaaatataaaaattagctgggcgtggtggcgcgcgcctgtaatcccatctacttgggaggctgaggcaggagaatagcttgaaccagggagtcagaggttgcagtgagccgagatggcgccactgcactcaagcctggcgacaaagactgcctcaaaaaaaaaaacaaaaacctaaaaactggtcacagggtagtgaagtagttgacatcctgccaccagcacaaggtttaaaaagggccagaggagtctcaagtcaggcccagcacagtggggagaggaagagcctgaagctcagctatttttcttttttttcttgagacggagtctcgctctgtcgcccaggctggagtgcagtggcgcgatctcggcccactgcaagctccgcctcccgggttcacgccgttctcctgcctcagcctcccgagtagctgggactacaagcgcctgccaccacgcccggctactttttcgtattttcagtagagacggggtttcaccgtgttagccaggatggtctcgatctcctaacctcgcgatccgctcgcttcggcctcccaaaagtgctgggattacaggcgtgagcgcccggccaagctcagctatttttttttccctttgtgcaggctaattggcctaatgttctgtgtgaatcaaacgcttcgtagttggaaacccaagacccctgtgataaaacgcaacacgaaattgtttaacgtctgtctgcatatccaagtgtctttcaagttgtgaacaacgggcgggaccaaacaacaaaagtactgacgtcctcacttcacaaagccacaagacaagatggcgccgtcctccaggagcgggagctgggaacacgtccacgcccggggggtgtgcacgcgcccgggctcgccccagggaacgctggcgtgcactcgggcacccagtgagcgccgcagttagtctccacccatgttttccgccactccttgcgcacatgcgctctaggttcttagctggatgtctgttgcgccaacaggctcctcctcccgcgcaactgacgcaagaagactgtaatcggttcgcaatttatcccgtgtgaccttgagtctttcctgtcgccgaggaccggggctgtccgagatacggccttcatatccctcttcctcccctggactctttctgagctcagagccgccgcagccgggacaggagggcaggctttctccaaccatcatgctgcggagcatattacctgtacgccctggctccgggagcggcagtcgagtatcctctggtcaggcggcgcgggcggcgcctcagcggaagagcgggcctctgggccgcagtgaccaacccccgcccctcaccccacgtggttggaggtttccagaagcgctgccgccaccgcatcgcgcagctctttgccgtcggagcgcttgtttgctgcctcgtactcctccatttatccgccatgataagtgccagccgagctgcagcagcccgtctcgtgggcgccgcagcctcccggggccctacggccgcccgccaccaggtgaggaactgggaccttcccgaatggggtcacggcctcgggccttgggcctcgggcttcgctgcggcaggccgcgcgccctttagggtttgaattctccagtataggtcaggcgggaaggaaggtaacgggccttccatagttagcgctgccgggtcaagattttgcccaaggttttgcctccggcttgggccctgctgagtcacacccctcgcgatctagagtgtcatttcaaaattaccaggtagtggtcctcatggcctgttctgtggctgaatggaaaggtttggccttgggggtgagggatgcagtctattgggaaagccactattttcagttttatttttggctcctctacagaatacagagtgtgtaaggatcccgttgatacggtgaaataaaataagaaagctctgagtcggaactccagttttcgtgcttagcaacattttctcaaaatctgtggtgtaagattgtactcgtttgttacttcagaaaaaaaagcagatcgtggggcggagaaaaggctatggagtggttacttgttttctaaaataaaagacaaatgctttagagaacaggaattgtatgtgggcattaaggaaggcttggaaggagcctgaggttaagttgtaataaaggtcttttatcctagtgaaacgccactacttttcttttttctttcaaagacccttagtaactctagttcttttaaactaattgcacggcaaggtaaggggaagtgttttcccccaggggacatctggcaatgtctgtggatattttaggttgtcacttacttactggggtgcttattggtttctagggtgtcgaggccagggatgctgctgtatatcctacaat

SEQ ID NO: 1168 - DNA, 6000 bp, Homo sapiens
tccctttagaaaactctgcctaactctccactttctatggctgcaggaattctggtaatctgctggagtctcaaaatttacctcggcattctaagtttatctgaacaggatataattatagcaaaataattccctatgctttttagcataagaatcccattttaaggtaaaaagagttttaccccatataatagtagttcccattatatagaatattctttctgtttatagaatcctatataatagtagttctactttaagtagactttgagaaaaacacatgataaaaattcagcaacattaacaaattagaggatcccctcttaaaatttttttgaatagctagtacatgaacttgatataaaattcacgaggtacaaaaggaaataccatgaaaatatccttctttcaccccatccctcattcacacactgcccttctccagagcctcctattgtttcaacttctgctgtatcttttcaaaggtaaatttgcactacaaacatttacatatttcatcttaaaaaaagacaaaatggtagcatcttaccactcttcttcatcttgctttttttcacttagcaatatcttgttatattttgttgtactttaacatggatatgttgaaaaaaaaaggtggggagcaggtgtggtggttcacacctgtaatcccagcactttgggaggccaaggcaggaggattgcttgagcccaggagttggagaccagtctgggcaaggccctatctctaccaaaaaaaaaaaaagtaataataaagaaaagaaaagaaaagaaaagaaaactagctgggtgtggtggcatgtgcccgtagtcccagctacttaggaggatcacttgaacccaggaggtcgaggctgcagtgagccatgatggccccactgcactccagcctgggcaacagagccagatcgtgtctcaaaagaaaaagagagtccgggcgtcgtggctcacgcctgtaatcccggcactttgggaggctgaggcaggcagatcacctgaagtcaggagttcgaggctgctctggccaacgtggcgaaacccagtctctactaaaaatacaaaaattagccaggcgtggtagtgcgtgcctgtagtcccagctactcgggaggctgaggcaggagaattgcttaaacctgggaggcagaagttgcagtgagctgagatcacaccaccgcactccagcctaggggacggagactctgtctcaaagaaaaaaaaaaaaaaaaaaaagaggccgggctcaatggctcacacctataatcccagcactttgggaggccaaggcaggcagatcacctgaggtcgggagttcaagaccagcctgaccaacatggagaaaccccgtctctactaaaaatacaaaaaattagccaggcgtggtggcaggcacctgtaatcccagctacttgggaggctgaggcaggataatcacttgaacccgggaggtggaggttgcagtgagccaagatcacaccattgcactccagcatgggcaacaagaccaaaactctgtctcaaaaaaaaaaaaataagagagagaggggaaaataatatttttattcttcatgacatgtgctgttgaaaaattgtatcgccttttttttttttttttttttgagacagtgctctgttgcccaggctggagtgtagtgtcatgaggctcactgcaacctctgcctcctgggttctagcatttctcctgtgtcagcctcccaagtagctgggattataggggagcgccaccacgcctggctaattttttttttggtagtagtaaagatggggtttcaccatgttggccaggttagtcttgaactcctgacctcaagtgatccaccccactcagcctaccaaagtgctaagattacaggcatgagccactgcacccagccgcattttttaatatacagaaaatcctagtgaatatttttaatatacagaaaataaataccacttagagattctcagctcttagattgggaaccaccagtataagtaaaatattagtaatcttcaactttaattttggcccttactgtgcaccagacattgttctaagcactttacatattatctcacataatccacatcctcatcatccttctagtctcagcttaaatgttatctcctcagagaagccttcccttatccaagtagacctatcctctcccctttccattattctctagcatttcatcctgtttatttccttcaggacactcagcaatacaagtaattagttacccatttgtgtacttatttactgttgtcttcccagtcagagtatgagctttgagagcacagacatgtactattgaacagtttggttcaccacagtacatccagtaacatacagtgcctcagtgcttggcacagaggagccattcaattgaatatttattgaaagtacatactgagcaaaaaacagctttacgaagtagaccctattattttctccttcatactgataaggaaactaaggcctagagagtgaaatagactcatcccaaagttggtaagtcacagagttgctttaaaacccagctctgctgggctccagagcacaagctcttcactatgaccctggtctcaggaacagaagactgagttcagtcctggctgtgtgaaatgttgagtaagtcccctatcccctctgggactttttctttcattgtaaaatgaaagagtggatgtcgctatcttccttatggtgatgttttgtgatttatgaggtctgtgatctatgaaaatgaaatgggggacactgaaggagccaagaagattggcttgatgcctttaagcgtgccgattttcagttattttcttccttctctccttctttcactggagatttgctaatccttattttatgccaggcattgtgttggaggtaataggaatccaaagatgaataggatatatatagtccctgacattaacgtgcctggcctgatgggagatgcagacccattaaatggctgcttgaaatacggtatgggccagtatcccaacagtaatactatgtgtgaagctcatggcaatacagaggaggaagggattaattccatcatgtatgtgttggtgggagtagaggtggatatgtaggaagggggatgcggtataatgctgagctgggccttgggaaaataagttttccatgtggtcaaggtggaggtgaggctttctggacacaagagacatcatgtgcagaagcacaccaagaaagagcatgaagtgctgaggattgctagagtggggggttggctctcaggatatgaagctggctaggcaaagggagcccatgaagagccttgctgaggagtttgaacttaacttctgagagcagtagcatggccaaattgtacttacattttatttttagaaggatcactctggcattggtaggactggagataggtgatgaggtgaaaggagtggagaccagttagaaggcttagaagttgtccaggtgagagatgatgagggcttggacttaaggtatttgcagcagagttggagtggaagtagataaattggagattattttaaaagagagacccaaaggccttggtgattaattggatgaggaagaataaaagatgagatgaagggacttattgtaatggattgatgtagtctaaaagaataaaacagtggcattaataattataggggatttggagtgaagtggaagaaataatgatgttggctttggatgtattgagtttaagatgtctcttagctaggaggaaaggtgtagctctctctacttcctttccagaatagcagtcctagcctaagtcactcatccttggaccagtttcctgtggagcccagtgcggtataaaattccccaagagctcactggcattcctgagctccacatccttcaaggttaaaagctgggtgttgaaaactccctggaccctcattgataggctaatggattatggacctgtgtgtgtgtgtgtgtgtgtgtgtgtgtgttttaaatcagatgctggctccagtgcagcaaactcttctgcctcttgcaagcatcagccttggaaacaaaacaaaacaaaacaaaaaaaaccttttttatggagcagcctctggccctgacaggctctggctctctgttggctcccaagaagccccccacctttcttagagatcagatttttaaaagatgaggttgtacagtgctcagccagatccccacgtggccgctgaagaaagcccagagtgttggggactgggccctttctcagctaccacctctgcttgggtgtcctcaatgctaagacaagacaccttgtggcccaactctttccaaaatgacggggctgggattctcccccacctcaagtcgaatatccagcgttcaccaggcggtggcaggaccgagcacgtggtatcatttaggggctgggctccagggtcctcctaggaaagaggacagcccaagaggcgagaggctggccggccaccctggccatggcaacctctctggctcctacagctgctggccaaaggcagggggcacgccctgcgtcccattaccacgttcataggatggtgccaggagcccgttatctcttcttcgccttctcctcacgcaccacccccactgtcatgccgataaatcccgggagcaaagggtggcacgattcctcccgcgcccctgcgggctgaaggcgggcactaaagcagtgcagtcccaagcttcccctgcagaagccgcgctccctactcggtccgggggcagagggggcgcgagagagcaagtgggcgggcgtcccatcctccgcatcctcctccaggtcctggcgcacagggtgggagcgctgcgctgcgccgcgctgcgcatcgcggcccgcttgccgcctgccccctgccctagctgggccacctccccgggctgccggtggagggctaagaggcgctaacgttacgctgtttccggttttccagcgggctctgtttcccctcccaaggcggcggcggctgagcggcggagccccccaaatggcctggccagatgcggcaggtttgctgctcagcgctgccgccgccgccactggagaagggtcggtgcagcagctacagcgacagcagcagcagcagcagcgagaggagcagcagcagcagcagcagcagcagcgagagcggcagcagcagcaggagcagcagcaacaacagcagcatctctcgtcccgctgcgcccccagagccgcggccgcagcaacagccgcagccccgcagccccgcagcccggagagccgccgcccgttcgcgagccgcagccgccggcggcatgaggcgcgacccggcccccggcttctccatgctgctcttcggtgtgtcgctcgcctgctactcgcccagcctcaagtcagtgcaggaccaggcgtacaaggcacccgtggtggtggagggcaaggtacaggggctggtcccagccggcggctccagctccaacagcacccgagagccgcccgcctcgggtcgggtggcgttggtaaaggtgctggacaagtggccgctccggagcggggggctgcagcgcgagcaggtgatcagcgtgggctcctgtgtgccgctcgaaaggaaccagcgctacatctttttcctggagcccacggaacagcccttagtctttaagacggcctttgcccccctcgataccaacggcaaaaatctcaagaaagaggtgggcaagatcctgtgcactgactgcggtgagtcgccccctccctttgctggagaaaggggggaggggcgaggtggtggagaatgggggtggggcggggaggtgctgcaggtgcccgggcctggcagcgtccgggcgctgggggggtggggccgcccctgggcagggcgcctggcacgggtgggtgagggggttggggttggagagaagaaggatcaggctcaaagtgtgccaggggtggggggcggagggaggcgctggcctgtgccagcggggat

SEQ ID NO: 1169 - DNA, 6000 bp, Homo sapiens
tgatagctaaaaaggatcttctctggtattaggggctcaggagtagaggagctcagagatacctgatttctcttttactagacctgacgtataacctagggcttatttccagataggtattgagtgcttgtactctctcactgcagtctgcagccctggcactctggggaaagctaaggcctatctccaggggacccccccctgccaatgcgcccactctctcccccatcaccttctacaggcagctgagagacacagatcacacagctctgcccctggctttctcaagcacagatcgttgcctctatcctgagaaaagtatacctattccatttgtgggttctattcccattgagcatctcccgcttcccccaaaagtaaggagacttgcctccctcactcttagcccgagggacaactgggaatatgattgcccagcttcctagaaaagagtggactaacgatcaagaaaccaagagcaggctagggaataagccttgctgattcctgaaccctcaaagccccccttaccatatctcttcacctcctgaacaaacttgcctgctaggtattcacagcttcctttttctcttagaaagagccccattctactcagcattagctacttcagccctgggctgaagtttgcgacttcctactgaaaagaaacaagaagcacctggccaccaaggagcaaacaggcgctgtcctgtgcacccgtctcagaaccacccacctatgtccagtggtccctgaaatggctctctgaagggaaggctccacaccaagagataaaaacccagactttgggccccataaagaacttccccttatttgggaggcaacctctagtaccctgtagtactctttccgtgttgattttttctgcactccttcccctgtcccaaagtctattgagaaggggacacaggaacttttgaagcactttgaactgcacagaaatacacgtgtgaagaagcagtaactcctccaggctcgaacagtagcaatcaggactctggatagaccccagcgcctccagggacaaaaaggctcagtagcaggctctccacagagaatggagtgggacattatgtttcacttgtaaactgaggctaagatctggtacaatccgatctagaagggctgctgctcttcctcaagagtttaccttgcgtcaaaccaagcccctgctccctaatgaaaactcaaggcagcaacaaggccaatgagaatacgatgagggccccacccaccccccctgccagtccctgcctttcttccgtgctgattgctgcccccaggacagaagactaagactcgaaactgccccgccttcctatcccaacttcccgccttcgtatcccaacttcccgccttcctatcccgacttgcagtctaaattttcttgccctccgtcctagacgtctatatacagggattccgaatgatttgagtttggaagtgccctgtttttctgaaaaagtgactgccaccaagaactgacttcttagttacccagcgcagaggcaactgatgaagtttccagacagaacacaagttgaatctcatttgtacacttaaactgggaattttaaggtcaaatcagcaaattactgggacctagatctctccacataaatatgtacttgttttatgctattcattatatatgtataaaacttttgcccttatttgccagcttctctactttatatgtgtatctaaaaagcaaacaagattaacaatgcctttccaaaataattcaatgataaataggatttttagcatattttcactactgaaacgagagttaatttcagaataagcctttaagtgtgggctttttctcagactaaggaggtgaaaggcagctttctttgggctatagtgtacagtagccttaaaaggcaatctgggagaaatgaatataaacttccagaagtcttaaaacaaaaagtttaaactttaaataaaacttcacagttatatttgcattgtaacactgaaaagtcattagaaaataagtggattttaagacttctaaccatttgttaataatctaaacaatatactaacttggtgaatgaagtctgttctagtatccagctgtttgaatttgttaatgtaaaacaaatagttgtaaaactaaatgtataatttcattagaatgtaggaaagacaaagggaaaacgaaatatacagcaaattaatatgcagcaaaaatccatgttaatgaaaaacatcaaaaagtaaacatttcctttctcctcacaatatgcttacaaagacataatgtctctagatttcttgagcccttttattattaatacaacagacacattttaaagagaatagagactgctttatttttaatcccactgtctctatgtatttaacaaactcttaccaacaaaaaattgtgcgcaaagaaatacacattaggcagaacaaaaaagaaaaaagctttaattttcttcagcctgactacaggtgattctgaaataatctaattcagttttggttttataaagtaaaaatcaacacacatttataaaatagacttggaaagaggttgtctacctctgggtagtaaacccttctgattatagagttcctaatagaaacaatatgttgattaatattttacaaaatcacaaatttccaaaataaagaacattagagcttgtgttttcaagtgatacttagattaaataccagtcttaaaccagacaactatcttcaatacccaaatcattaaaactaactgggatgttgtactgtaaatgttcaaagtggaggaattagccatttcttctcatgactgtctaccaaaaaaattgagaaactctcaaataaatcttaacatttaacaacaacaatgactaatagtaacagcatttcccagatcgttctttaaaagcgtattccttttccatagctcacttaatcttgaaaatcatgcctcttcaatgctattttaatgtttcggattaaagatatgaagtaaacatttaatatatgaagagaacaatccacttgataaaaatcctcgcatttccaaaatgttttcattttaagcatttgcagaagttaaataaatgtagcagacattctaaattcgataaaaaattcagagaacccgacattttatgtaccccaaaggtccaaacagaaccgatgtaaatgtcaatagctgtctcccttccggctgatacttaaatggttttactagtactcaaagcaatgaaatcagcaactctctctccacactctagtcaacactccaatttccaaagccgcaattcgcaaacgtcagttgggcgggggcggtgggggatcttgaagtaatccaaaaatttcctttcccctttgacagtccaccaaaagatgtcaaaccaaatccagcctattgtaaagctctgggacctcccttccaaggacaccgaacacaagcttagacaccgctgcgaaaagctgtccaaaagcgcctggccggacagaaatgtaaggagcccaggccaaaacgaattagaacccccaacagagggtcccgcagacaccgcggaaaagaaggtggcatttattccggggtagacagctacgaaccagttaccccagccagtctctgggggctctccaacccaagttcaggtttatggcagatatattggttgggtgccttcccctacaaacatcacagcccgcctccggggcccaccgccgctcacagagaagacccctcagcttcacatccgttccttttgccctcggacaaaggcagaggagctgtggagctgacccagcgctgtggggcagtaaaaatgccttgttcgggccacccatctttgggcccggcttcatctgcgatgtcagcaccaaaggttttttttttttttttcctggttttgttttgtttttacaacgcatcctgggcgggtgtatgcatttggtggtagtggggtggggggaaccgaacagaggaggggttggcagtgaagcctgggttatagaactctccttcctctccctccttccagggttgccgtgcagggagtgtcagccacgtctagcgcacagtcccaggccccagggcgaaggcggccaggggaaatggggctcagggattgctaagcaaacgcatcactggtggtctccagcgcctgcggaggtaggatcgcctcttttcttaaggggcgtgttattttgttctcttttgaaagtaggagggggttcattcgtttctcgctgcggggggtgggagagaacgttgctgcaccgcctgggtctccaagagggagggtgcggggatgtctgcaatggtactataattattcctgggctgagagagcaagtaaaggggacggggcgagcgtcacctggagctgtggcagtggcagcagggaaggtcgcgaggggcttacccgggcgggcgggcgctgtcctgccgcaggtgagggagggcgcaggctggcgggagggagggcgcgcgcgagacaggcgcgaggaaggggggaggggaggagggcgcgcgcgcgcacacctgtcctggacagcggcgctagccgagctgcgcctcacttaggctctgcgggctgaggaggaaggagggcgggctggcgggcgggggcgggacgccgaggggaggaggaggaggcggctcggatggctggctcggctctcgctcgctctccctcccatgggcaagtccggctcacaccctgcttctcccgctcactcacagcccccttggctctccctcctcctcctccttcccctgcgggatccgctcgccgccgccgccgccgccgcagacggcaagtcgtggcagccagacgtcggcgcgtaacccggcgctccgtgcgtgactccaggcgacgtcagcgcgcgctccgcgttccccacccctcctcccaactccgtggctcgcgcccttcgctctcgcgtccctccgttttagctgccgccgcggcggccgccgagcgcgctctttccgcccccttctcgcgcgtgagcgcgccctatcggctcctggcgcgtcaacattccgcgggccaggccttggggcgcgtctgaggagggggatgtctgtggcctctccgcccacacttcctccacccaccgcccacagcgccccagaaggacctattactcgtttggcttctgaaggccgaagccaggctctggcggggatagaaccctgaagggcctgcgccagctccaacttagggccctgtgcgtcgttgcgacttctgctaccaccctatcacgcggcacccccgccccaactccgcccgggtctctgaagaggcaataggcctttcatctccggggaaagtctcaccttggccctcagacacccgccaagaggggtcggaaggacagaattagcatagagaagagtggctagagcacttttcaggctctggccccaggaatccttgacaggaagcgtggggttgctgcccagcctcccacgcagtgtaatatgttgaagccgggcccctttgagggaatgcgacttccttgggccgagggggaaagggtaaaagttaattttcataaaatgctatgcaagggctaaatgtgaaattataaaatgtcctttaagacagtcttcttgaaatcgtatcaagtttgacaagatttttggtgcacggtaacgcttttgctcgctttctacgctgtcacgtctccatcctgcaacactgaatacgtagatggaacgtggatcagctaataactgcagcaaaataaaaactgcatttatcatctttatcattatttaaatagacctccgagaagtcaaactgtgatttaggaaaacttaatcattgcctcaacctatttaactattttgttttgaagttactttgcaaatataccacaaaatccctctttgttaggcagtggtagacttttaaactcacttgttagagaatctttcccagaagcatatctagttgagcctgcgaggcaagtaggactaaggtataatta

SEQ ID NO: 1170 - DNA, 6000 bp, Homo sapiens
cttaaatttttgtcttacgttatttcaattattctcttttagctattttgaaccatacaataggttattataaactatagtcaccctactgatttatcattatcaaactgtatatttctatccatcaatcaacctctcttcatccctcctctcctctccccttctcaacctctggtaaccaccaatctactctctgtcttcatgaggtcagtgctgggattacttgcatgagccactgtgccccgccaggatttcattcttttttatggctgaataatattccattgcatatcaatcacattttctttaaccattcatccactgatgggcacttaggttgattccatattttggctatttcaacaggacttcaataaacatgagaatgcagctatctctttaatatgttgatttcctttcttttgaatatatacccactagtgtaattgctggatcacatggtagttctactttgttttcggaggcacttccatacagttttccatagtggctgtactaatttacattctcattgacagtgtacgagggttccccattctccacatccttccaccagtattcattattccctatctttttgataaaagccattttaactgggatgagatggtatctcattgtgcttacatttacattttataattaattttgagtatttaagtagacaagaaaaagtatgctcaaaatataaaaatgattactataacacaaaatattaaagaaataactgactttatatttttcacttggagtattgtcttgatttcttcccctgacacattttaatcaccacagaaagaaatcccaccgatcttcttcatctaattgcaaagtgctactgcattaggttataaaaatggcctggattagcttcagaaggcactggtgtctggttgtatgtaagcaagcagaggagttttagagctaccacaaaatatgcaacaaagttcaatagtgctatccagttcagatagatccactctttggaaaagcccagctttcttctccatctctaagttcatccacatgttagttctgacatctgaattacgtttaaaaacaaggaaagaaaataaaggtgcaaataagaatttaggtcacactctttgtaaaagtatcaagaataactaccattttcaaattgtcatacttgtagcctacaaatttacattttgctgattatggtaaatgtaagacaacagtatcatttcaacatctgttacttttactttggtattttattcttgccattactcttaaatgataaagaaaaatatgcttcaatagtacttaatcaatgactttcaaactgttatcccacattctataaggattttctgtaagaattacttgaaaaaaataatggaaattgagattgtatacattttctattggaagaggaacccttggaataaaacaaattagcacacacatctggctcaggtgctgttaaccaatgattccagaatgggaggagatgggttaaaaagatgaagccagacaactgatactaaaaaagatcagagactcatagttacataaaatttgacaaatgagatcaagtttaaataattactggtccctttgctctcaagttattgtttagtgagtttcatctggataaacacattttggtggtggtgtagttaggaggatgaggaatgattttccccagctttataccctcaacagagagggttctgcttacctgcttatgaaaaccaattcgataccatgttagcctttaaggagtaaactaaaggattcactttaataactccagtatcaacaaagaaaaagctgtccttgcttaaaccaaaaattcaagattgctactatatagtatgtttcagtgcacatatcaagtctacaagtctcacacttctgacccttgtcttcaagtccctaaactggaataaaactagataaatgcctgaggaaccacttcacaccctaaacacgtgcaaactttgttcaacagaacattttactgccaaaatggagttggcagaagtttggagcaaaggcccccaggctgcatgatttgttggcaccagacagcttaaaaatcttaacataatactgcagagtttgagtactaccaatttgcttgagactcctcctccaagtttgacttgagatagatggaagacgccataaagaaagactattaacacttcatcctctatccagaaatgcttttatttctcactcctgattgtcatacctctatattccttggtggttgtatttacacggtaaatcaaatggagtctattttgaaatgcatataaattcaattgtattgtgttgcttggataaagggacacagggagaactactataaatacataaaattaattatgacaaagttctacttagaaaacacttgatccaaataacccccatatatcacaattttttaccctaaaaatgtgggagaaattaagatacagaattacctgtaaattgctaccattttacatttggttcagcttgtcttctcacttctgtaagtctgaatgacggtagtttatcttgtatgtgaacaatttaggaaagccaggaaagaagccaagtagagttctcttcaacaagggtcaacaataaagtcttggaaatcttcataagcttgatgctgttaattaggaaaaactgcatcggaatttttaaattacagttgagtacaagcaactatataactagcaacttcgaacctgtaaatgcttgataaatatgcagtactgagaaaggatggtttgctttggaaggttatcttgtcctatgtttcaataaaagacaaggtttaaagagatgctacttgctcctcatacacctaaaaaacttttttcttgaaactttctaatgttttccctccgtagctccatgtattttattaatgtgtctgatagcctttgtttttcctcctctagaacctccaagttttctaattctcagctatgattttagatcattaaatcaccagtttctaatctccacaatacagttggaaacatttaggacagaatatcctttaggatattaagatgcagaagactgtacttcgaaggatatttatatagtagtgctgccacctaaagatgaggtgaatataaagaagcaattcaaaggaaatgacccatcacccttaagccagtctcattttctcacctccagctaggaattaataagcgtgttgctgttgttgttgtcattaacagggaagttgaactgtttcgcaatcacttatttctgagctttaatcctctgtgccagataatttcagactcaaaccttttctagtcctctgcgattcttctcagccatcaggcactgcctacaatacgtaagaggcagcaaaagatacttggaaaaaaacaattgagagatttctggtttagtgaataaagcaggcaataatagaccttagagttttccctttatcagtgatagactcctcacaatgctgaacaactgacttacattttgataactaaattttcatctgtaaaatgggagtaattataccttagtcctacttgcctcgcaggctcaactagatatgcttctgggaaagattctctaacaagtgagtttaaaagtctaccactgcctaacaaagagggattttgtggtatatttgcaaagtaacttcaaaacaaaatagttaaataggttgaggcaatgattaagttttcctaaatcacagtttgacttctcggaggtctatttaaataatgataaagatgataaatgcagtttttattttgctgcagttattagctgatccacgttccatctacgtattcagtgttgcaggatggagacgtgacagcgtagaaagcgagcaaaagcgttaccgtgcaccaaaaatcttgtcaaacttgatacgatttcaagaagactgtcttaaaggacattttataatttcacatttagcccttgcatagcattttatgaaaattaacttttaccctttccccctcggcccaaggaagtcgcattccctcaaaggggcccggcttcaacatattacactgcgtgggaggctgggcagcaaccccacgcttcctgtcaaggattcctggggccagagcctgaaaagtgctctagccactcttctctatgctaattctgtccttccgacccctcttggcgggtgtctgagggccaaggtgagactttccccggagatgaaaggcctattgcctcttcagagacccgggcggagttggggcgggggtgccgcgtgatagggtggtagcagaagtcgcaacgacgcacagggccctaagttggagctggcgcaggcccttcagggttctatccccgccagagcctggcttcggccttcagaagccaaacgagtaataggtccttctggggcgctgtgggcggtgggtggaggaagtgtgggcggagaggccacagacatccccctcctcagacgcgccccaaggcctggcccgcggaatgttgacgcgccaggagccgatagggcgcgctcacgcgcgagaagggggcggaaagagcgcgctcggcggccgccgcggcggcagctaaaacggagggacgcgagagcgaagggcgcgagccacggagttgggaggaggggtggggaacgcggagcgcgcgctgacgtcgcctggagtcacgcacggagcgccgggttacgcgccgacgtctggctgccacgacttgccgtctgcggcggcggcggcggcggcgagcggatcccgcaggggaaggaggaggaggagggagagccaagggggctgtgagtgagcgggagaagcagggtgtgagccggacttgcccatgggagggagagcgagcgagagccgagccagccatccgagccgcctcctcctcctcccctcggcgtcccgcccccgcccgccagcccgccctccttcctcctcagcccgcagagcctaagtgaggcgcagctcggctagcgccgctgtccaggacaggtgtgcgcgcgcgcgccctcctcccctccccccttcctcgcgcctgtctcgcgcgcgccctccctcccgccagcctgcgccctccctcacctgcggcaggacagcgcccgcccgcccgggtaagcccctcgcgaccttccctgctgccactgccacagctccaggtgacgctcgccccgtcccctttacttgctctctcagcccaggaataattatagtaccattgcagacatccccgcaccctccctcttggagacccaggcggtgcagcaacgttctctcccaccccccgcagcgagaaacgaatgaaccccctcctactttcaaaagagaacaaaataacacgccccttaagaaaagaggcgatcctacctccgcaggcgctggagaccaccagtgatgcgtttgcttagcaatccctgagccccatttcccctggccgccttcgccctggggcctgggactgtgcgctagacgtggctgacactccctgcacggcaaccctggaaggagggagaggaaggagagttctataacccaggcttcactgccaacccctcctctgttcggttccccccaccccactaccaccaaatgcatacacccgcccaggatgcgttgtaaaaacaaaacaaaaccaggaaaaaaaaaaaaaaaacctttggtgctgacatcgcagatgaagccgggcccaaagatgggtggcccgaacaaggcatttttactgccccacagcgctgggtcagctccacagctcctctgcctttgtccgagggcaaaaggaacggatgtgaagctgaggggtcttctctgtgagcggcggtgggccccggaggcgggctgtgatgtttgtaggggaaggcacccaaccaatatatctgccataaacctgaacttgggttggagagcccccagagactggctggggtaactggttcgtagctgtctaccccggaataaatgccaccttcttttccgcggtgtctgcgggaccctctgttgg

SEQ ID NO: 1171 - DNA, 6000 bp, Homo sapiens
gtgtccttggaagggaggtcccagagctttacaataggctggatttggtttgacatcttttggtggactgtcaaaggggaaaggaaatttttggattacttcaagatcccccaccgcccccgcccaactgacgtttgcgaattgcggctttggaaattggagtgttgactagagtgtggagagagagttgctgatttcattgctttgagtactagtaaaaccatttaagtatcagccggaagggagacagctattgacatttacatcggttctgtttggacctttggggtacataaaatgtcgggttctctgaattttttatcgaatttagaatgtctgctacatttatttaacttctgcaaatgcttaaaatgaaaacattttggaaatgcgaggatttttatcaagtggattgttctcttcatatattaaatgtttacttcatatctttaatccgaaacattaaaatagcattgaagaggcatgattttcaagattaagtgagctatggaaaaggaatacgcttttaaagaacgatctgggaaatgctgttactattagtcattgttgttgttaaatgttaagatttatttgagagtttctcaatttttttggtagacagtcatgagaagaaatggctaattcctccactttgaacatttacagtacaacatcccagttagttttaatgatttgggtattgaagatagttgtctggtttaagactggtatttaatctaagtatcacttgaaaacacaagctctaatgttctttattttggaaatttgtgattttgtaaaatattaatcaacatattgtttctattaggaactctataatcagaagggtttactacccagaggtagacaacctctttccaagtctattttataaatgtgtgttgatttttactttataaaaccaaaactgaattagattatttcagaatcacctgtagtcaggctgaagaaaattaaagcttttttcttttttgttctgcctaatgtgtatttctttgcgcacaattttttgttggtaagagtttgttaaatacatagagacagtgggattaaaaataaagcagtctctattctctttaaaatgtgtctgttgtattaataataaaagggctcaagaaatctagagacattatgtctttgtaagcatattgtgaggagaaaggaaatgtttactttttgatgtttttcattaacatggatttttgctgcatattaatttgctgtatatttcgttttccctttgtctttcctacattctaatgaaattatacatttagttttacaactatttgttttacattaacaaattcaaacagctggatactagaacagacttcattcaccaagttagtatattgtttagattattaacaaatggttagaagtcttaaaatccacttattttctaatgacttttcagtgttacaatgcaaatataactgtgaagttttatttaaagtttaaactttttgttttaagacttctggaagtttatattcatttctcccagattgccttttaaggctactgtacactatagcccaaagaaagctgcctttcacctccttagtctgagaaaaagcccacacttaaaggcttattctgaaattaactctcgtttcagtagtgaaaatatgctaaaaatcctatttatcattgaattattttggaaaggcattgttaatcttgtttgctttttagatacacatataaagtagagaagctggcaaataagggcaaaagttttatacatatataatgaatagcataaaacaagtacatatttatgtggagagatctaggtcccagtaatttgctgatttgaccttaaaattcccagtttaagtgtacaaatgagattcaacttgtgttctgtctggaaacttcatcagttgcctctgcgctgggtaactaagaagtcagttcttggtggcagtcactttttcagaaaaacagggcacttccaaactcaaatcattcggaatccctgtatatagacgtctaggacggagggcaagaaaatttagactgcaagtcgggataggaaggcgggaagttgggatacgaaggcgggaagttgggataggaaggcggggcagtttcgagtcttagtcttctgtcctgggggcagcaatcagcacggaagaaaggcagggactggcagggggggtgggtggggccctcatcgtattctcattggccttgttgctgccttgagttttcattagggagcaggggcttggtttgacgcaaggtaaactcttgaggaagagcagcagcccttctagatcggattgtaccagatcttagcctcagtttacaagtgaaacataatgtcccactccattctctgtggagagcctgctactgagcctttttgtccctggaggcgctggggtctatccagagtcctgattgctactgttcgagcctggaggagttactgcttcttcacacgtgtatttctgtgcagttcaaagtgcttcaaaagttcctgtgtccccttctcaatagactttgggacaggggaaggagtgcagaaaaaatcaacacggaaagagtactacagggtactagaggttgcctcccaaataaggggaagttctttatggggcccaaagtctgggtttttatctcttggtgtggagccttcccttcagagagccatttcagggaccactggacataggtgggtggttctgagacgggtgcacaggacagcgcctgtttgctccttggtggccaggtgcttcttgtttcttttcagtaggaagtcgcaaacttcagcccagggctgaagtagctaatgctgagtagaatggggctctttctaagagaaaaaggaagctgtgaatacctagcaggcaagtttgttcaggaggtgaagagatatggtaaggggggctttgagggttcaggaatcagcaaggcttattccctagcctgctcttggtttcttgatcgttagtccactcttttctaggaagctgggcaatcatattcccagttgtccctcgggctaagagtgagggaggcaagtctccttacttttgggggaagcgggagatgctcaatgggaatagaacccacaaatggaataggtatacttttctcaggatagaggcaacgatctgtgcttgagaaagccaggggcagagctgtgtgatctgtgtctctcagctgcctgtagaaggtgatgggggagagagtgggcgcattggcaggggggggtcccctggagataggccttagctttccccagagtgccagggctgcagactgcagtgagagagtacaagcactcaatacctatctggaaataagccctaggttatacgtcaggtctagtaaaagagaaatcaggtatctctgagctcctctactcctgagcccctaataccagagaagatcctttttagctatcaccgtccaaagactcactggttaattaatggtcagcaacttagctgtctgcataaaaaccagcgaccacttaatatgttacttttgggagtgggatctctccttgacacaagtttctgggaagagtaaaaggggcaagcgaacctgctttaatgaatcccgtaaggaactgcgtttcccaggaaattcctgacatttttagctcatgaatttccgaaagcctgcttggttttctcctccattctgggtccttccagaaaggaagaagagtgggctagggtctgaatgctcacagggcctggttcatccgcagagctggccagcaactcaggctgggctcagccctgagcagggtgccccccttccccaaatctcagaaggaggagggggaggcgggcgggcaggcagtcagtcgtggtcccaagggggactggctgcaggtttttgggtgagtgtggagtttctttttgattgttgcatgtggggaagggcagagtcgacgggaacagtcactgcgggcaccctagccctggtgcgtctactgtcctctgctcggctccccccatcggtgagtgcgcccgcccgcccgactgtgcggggctgcggttggggggaggggggagcgggatcatctgaggccagagccactgccgtgtgtgcggggagggggagcggcgggagagagaggggagggacaggctaggtgtctgctgctccacgccactgctgccggcgccccgacctcatccccagcagccccctctgcagctaagggttaccaccgcaccacctctcttctttgcctgcctcagcggccaaggctctgcggtaggagacaacccagccgggtggcgggtgggcctgtctaggtttgggtttgggtcttgctgaggcccgcatgagagggggtggccgtgactcggtgtcccctctttgcagggggctctgctgcgccgcgcaggcccctcctcctacatcctctttggggggtcactggaaagcagagcttaggcccactctctgtgcttagtatggcagactccttctcacccctagtcccctaactccccaggccgaggccgcctagggtctgcccaacagcgacagccacggtggtggtggtggtggtggtggtggtagcagtggtggcggcagcagcggcagcagcagctgcgacgctgcgcgtcctgctccctctcccccacccagccagggttgtagggtgagggccggtgggtgggcgccgcctggcgggcgggcggacggggggctggcagcggggagggggcgcaggtcacgtgccggcgggcgggtgggcgcgtacagtagggcgccctgctactgtactggggagtcagtgccctgttaccgggtctcgtctgtctcgtctctcccgcagatctcgcgagagtggctgactggctgtgggggttgcggcggcagcaggcggagccggggagggaaagcagcggcggctgaggcgactgaggcggcgggcggagcggcaggcggcggcggcgcggcagcggagcgcagcatcatggcggaccgagacagcggcagcgagcagggtggtgcggcgctgggttcgggcggctccctggggcaccccggctcgggctcaggctccggcgggggcggtggtggcggcgggggcggcggcggcagtggcggcggcggcggcggggccccaggggggctgcagcacgagacgcaggagctggcctccaagcgggtggacatccagaacaagcgcttctacctggacgtgaagcagaacgccaagggccgcttcctgaagatcgccgaggtgggcgcgggcggcaacaagagccgccttactctctccatgtcagtggccgtggagttccgcgactacctgggcgacttcatcgagcactacgcgcagctgggccccagccagccgccggacctggcccaggcgcaggacgagccgcgccgggcgctcaaaagcgagttcctggtgcgcgagaaccgcaagtactacatggatctcaaggagaaccagcgcggccgcttcctgcgcatccgccagacggtcaaccgggggcctggcctgggctccacgcagggccagaccattgcgctgcccgcgcaggggctcatcgagttccgtgacgctctggccaagctcatcgacgactacggagtggaggaggagccggccgagctgcccgagggcacctccttgactgtggacaacaagcgcttcttcttcgatgtgggctccaacaagtacggcgtgtttatgcgagtgagcgaggtgaagcccacctatcgcaactccatcaccgtgccctacaaggtgtgggccaagttcggacacaccttctgcaagtactcggaggagatgaagaagattcaagagaagcagagggagaagcgggctgcctgtgagcagcttcaccagcagcaacagcagcagcaggaggagaccgccgctgccaccctgctactgcagggtgaggaagaaggggaagaagattgatcaaactgaatgaaacccccacacacacacacatgcatacacacaca

SEQ ID NO: 1172 - DNA, 6000 bp, Homo sapiens
gcgttattcctaagagaaagaaaagaaagaaaggaaggaagaaagaaagaaagaaagaaagggagaaaagaaagaaagaaaagaaaagaggaaaggaggaagggaagagaggggagggggaaagagagaaagacattggtttgtgggacaacagaaaggcgggacaactcgaagtggggcggtggggggcttccagcttataggtagattttaaatttttctggttgacaattggttgagtttctctaaagacctgaaatcaatagaaaggaatgtctgggttaagataaaggattgtggagacccaagttcttatttgcagaggaaaccttcaaatcctaggcttcagagagaatgggttgtaaaatgtttcttatcaaacttaaagtctgtgttgatgttaacggtagagaggtataatgaggcacgttcaacccctacttcccatcatggcctgaaacggtcactcgggtttaattttgaaagagccctggctgaggaggaagtccattcagatggttgtggggggcggccttagaattttatttttgctttacagaatgttcaccacaatgaccattattctcattttatatgtgatgaaaatgagaaagatatcattatttcacttctctgcataaaactgaattcccataatttttaggataaaatctttcaccaaatgtggagtgccactagtctactaggcactgaggaaacactagtgaataaaaaaccgtgttcctcacattcaaaattggaattgtggccgacttagccctacatggtctaacccctgcatacctctccaatctggactcacctcttctgggaccttctctttgtcaacaagccctgttctttttctcctccaccctactcccactcttgggggaggctctcgcacaagctgttttctctgcctgcatccttcccttttctttctaccagcatccttccctcaacaccattctcaacatgtcaagtccagtgtcacctactcagaaccattgtaccaatgacccagcttcttcacaacccttttcacagctatcattaagttatagtgtaattatttgatgttgtctcctcccagacccccttggcagctccagaagattagggtcccggtggcacctaagaatttttacaggaaacctctaatttttaaaaagccatataacttaggcaaaggttcaattaagtacaaatctaggaaaaaggttattcttaaaaccaatttctttcccttgaacttaattctaccccttggagttaatcaatgaagtctgcaatctcttccacaaaacagcatgttaaaatatctacaggccatcattccatcctccatatcttctctcccagtatccatccagcccctggagagccatttactgagtacctgctgtgcaccatgctctggccagggatagggcctggatcttgagcccttcctcatgcaactgtctggcttctttttttaattttttaattaaaaaaaatttattttcttatttccccaagaaaaacttttttatttttattttatttatttatttttttttttgagccagggtcttgctcggttgcccacgctgcagtgcagtagtgcaatcatggcttatcacagcctggaactcagccttaaatgatcctttcagcttggcctcccaaagtgctagaattactggcatgagccactgcacctaacccaggctagcttctaagacccacacttggcccagcaaggtggctcatgcctataatcccagcactttgggagatggaggcaggtggatcacctgaggtcaggagttcgagaccagcatgaccaacatggtgaaaccccgtctctactaaaaatgcaaaattaaccaggtgtggtggcacgtgcttgtaatcccagctactcaggagactgaggcaggagactcgcttgaacccaggaggtggaggttgcgatgagccaagattgcatcattgcactccagcctgggcaacaagagtgaaactccatctaaaacaacaacaataacaacaacaacaaaacccacatgtgctccaggtggggaagatgaaaaaagttcccagccaaaagctatattctgcccagtgtctgctcagacagctacagctgcccaaattgcctttctgtatctacctgtctagcaacactgttaaccctgtaagaaccagccccatgtcctgtcttgtacagggctggctgttcctttctccagaccatgttcctcccctccacccctctcccccaacaacacaagcctttggtttctcttcttttaagagccctctgcactatggacggaagttctgggttcatgtttgctctacccacctcctggagcacttcagggacttgtctttgtcatgtctgtgtcccagggctttctaccaaccctagtactcggtagacaaatgatagacatttgttgaatcaagctgtgagttggagatctttgcagaaccatcactgcccctcttaacttggaactccccacccagagtgcctcccctaagatgatgaggtgtcagacttcagtggcctgagttctctgaaagcagagactctgagaaagaagactagtcatcaagaccacactaaaaagatgtgtttctgtgccaaagactttactcacaaacaggtaatactatcatctccattttacagaagggaggcccaagtctcataacctcagtcgtaaagctgggattccaagactggctatctgactttgagtcagatataatcatatcttggtcctcagggatatcacagaggcctggcatggcaccagggcatggcccagtgcattggggtatgcccaacaggacccgcagggggcagtgatgagccttcttgtttggattggggacaaatctgcagctacttctttctcaattaaagaggaagtgggaatttaaaaaagactttctgccgggcacggtggctcatgcctgtaatcccagcactttgggaggccgaggcaggtgaatcacctgaggtcgggagttcgagaccagcctgaccaacatggagaaaccccatctctactaaaaatacaaaattagccgggtgtagtggcacatgcctgtaatcccagccgctcgggaagctgaggcaggagaattgctggaacctgggaggcggagattgcagtgagctgagatcgcgcccagcctgggcaacaagaacaaaactccgtctcaaataaataaataaaagtaaaaaagactttcaggccgggtgtggtggctctcgcctgtaatcccagcactttgagaggccaaggcgggcggatcacctgaggtcaggagtgcctggtcaacatagtgaaactctgtctctactaaaactacaaaaattagccgggcatggtggtgggctcctgtaatcccagctactcaggaatctgaggcaagagaattgcttgaacttgggaggcggaggttgcagtgagccaagatcacgccactgcactccagcctgggcaacagagccaaactcagtctcaaaaaaaaaaaaaaaaaaaaagactttcatatagttctttccccagaggtctagggatgtggacctgtgagggctgttgtaaatgcgtagctccttattctctgggacatttgttgtttttttgttttgttttgtttgctgtttttttcattttgttttgttttctgtttttgtctgttttttgcgaaactggtgagttactaattaatcctcattcaacatagtcccatcccttccttcctagggcacagagattgtactgaggggagggcaggagagagcaacgtgcaagtgggaaaactgattcaaaataccttgcttcacaatttcaggacagaaaatggatagtgtaagtgacccagagacttggccaatgtgtctctgttaaatacatccacttttaagaaagttagtactgccaggcacagtggctcacgcctgtaatcccagcactttgggaggccgaggcgggtggatcacaaggtcaggagttcaagaccagcctggccaagatgatgaaaacctgtctctactaaaaaatacaaaaattagctgggtgtggtggtgggcacttgtaatcccagctactcgggaggctgaggcagagaattgcttgaacccaggaggcggaggttgcagtgagccgagatcatggcactctactccagcctgagcaacagagcaagactctatctcaaaaaaaaaaaaaaaaaagaaagaaagttattacttaatcaaaggagcaaggaaaaaaaaaggaagggggaatttttctttagaccaacttccttttcttgaacctaattctaccccccttggtgccaacagatgaggttcacaatctcttccacaaaacatgcagttaaatatctgaggatattcagggacttggatttggtggcaggagatcaacataaaccaagacaaggaagaagtcaaagaaatgaatcaagtagattctctgggatataaggtagggggattggggggttggatagtgcagagtatggtactggcctaaggcactgaggatcatccttttcccacacccaccagagaaggcttaggctcccgagtcaacagggcattcaccgcctggggcgcctgagtcatcaggacactgccaggagacacagaaccctagatgccctgcagaatccttcctgttacggtccccctccctgaaacatccttcattgcaatatttccaggaaaggaagggggctggctcggaggaagagaggtggggaggtgatcagggttcacagaggagggaactgaatgacatcccaggattacataaactgtcagaggcagccgaagagttcacaagtgtgaagcctggaagccggcgggtgccgctgtgtaggaaagaagctaaagcacttccagagcctgtccggagctcagaggttcggaagacttatcgaccatggtgagtgtagggtcttggggtcgaacgcgtgccactcgggagccacaggggttggatggggcctcctagacctctgctctctccccaggagcgcgcgtcctgcttgttgctgctgctgctgccgctggtgcacgtctctgcgaccacgccagaaccttgtgagctggacgatgaagatttccgctgcgtctgcaacttctccgaacctcagcccgactggtccgaagccttccagtgtgtgtctgcagtagaggtggagatccatgccggcggtctcaacctagagccgtttctaaagcgcgtcgatgcggacgccgacccgcggcagtatgctgacacggtcaaggctctccgcgtgcggcggctcacagtgggagccgcacaggttcctgctcagctactggtaggcgccctgcgtgtgctagcgtactcccgcctcaaggaactgacgctcgaggacctaaagataaccggcaccatgcctccgctgcctctggaagccacaggacttgcactttccagcttgcgcctacgcaacgtgtcgtgggcgacagggcgttcttggctcgccgagctgcagcagtggctcaagccaggcctcaaggtactgagcattgcccaagcacactcgcctgccttttcctgcgaacaggttcgcgccttcccggcccttaccagcctagacctgtctgacaatcctggactgggcgaacgcggactgatggcggctctctgtccccacaagttcccggccatccagaatctagcgctgcgcaacacaggaatggagacgcccacaggcgtgtgcgccgcactggcggcggcaggtgtgcagccccacagcctagacctcagccacaactcgctgcgcgccaccgtaaaccctagcgctccgagatgcatgtggtccagcgccctgaactccctcaatctgtcgttcgctgggctggaacaggtgcctaaaggactgccagccaagctcagagtgctcgatctcagctgcaacagactgaacagggcgccgcagcctgac

SEQ ID NO: 1173 - DNA, 6000 bp, Homo sapiens
gtcttctgtttcaaagtgctttcctgtctagggagtggacatttgcctgtttcttgaaacattcaaagagccttatgaatccaaaggcctgcccagaaacaagtgatgagggccctgggcagccaatgggatcgtgctggcctttctacctgcctggggagcccccccgccccacatcctgccccgcaaaaggcagcttcaccaaagtggggtatttccagcctttgtagctttcacttccacatctaccaagtgggcggagtggccttctgtggacgaatcagattcctctccagcaccgactttaagaggcgagccggggggtcagggtcccagatgcacaggaggagaagcaggagctgtcgggaagatcagaagccagtcatggatgaccagcgcgaccttatctccaacaatgagcaactgcccatgctgggccggcgccctggggccccggagaggtatgtgtgagcaccaggaaagggcacaccgatcctggactgcagagccgtgcgcatgtgctgggaagaagcaccggccaggagtcacaggaaagagggattcaggctctgactctaacattgactttttgggtgattttgagcaagtctttggcctgctctgggctccggctccctctcttgtcaaatgagggggttcctttaagagcaggagtttgtaactttccttgcatcacaccgcctccttctgaaaagcagaagagagcatgggttctctccctagagtttcacatgctatgcaggggctttgagatcccactaaagctgggctgtgaatgctaggttaaaggccttggaacaggctgtgcctggtggctcccgcctgtaatcccagcactttgggaggctgaggcgggcagatcagctgaggccaggagttcgagaccagcctggccaacatgttgaaaccccatctctactaaaaatacaaaaattagccagatgtggtggtgtacacctgtaatcccacctacttgggaggttgagacatgagaatcacttcaacctgggaggcagaggttgcagtgagccaagattgtgcaactgtaccccaccctgggtgacacagtgacactctgtctcaaaaaaaataaataaataaataaagaccttgcaccagattttgaaaatgttcaagatcccagtggagaaagagtttctaaaagaggatggtagaagcagttcttcacagaggagttccctcctaattaccacggatcaagggaatgatagttgcaggtgtctgtagagtagatggagacatctgccatcacaggagggattgtgagatgttgggggcaggcaagaaaggagggacaggctctggttaaatttctggagggggctcagggttgacgggggtcatgtccttgcctgtgcccctctcccttgcagccagaggccagcacagccatccaggggacaccaggcccccacttcccagccccaaaatagcctcacccatgtgtttccctcaaaaagggctagaaggctattaccccaatgcccctgctacccccagtctccaaaaagtaatttgcgatctacagggacttacagctaggtgtgatgtcagctgttgccaggcagaaaggggtttgggagaaccctgcagagatgttatgacaagctatgttctggggaacaaggtaacctgctgcagaccattagagctgtggcctgtgaaaaccccagggaatcccatggcaaggagggagactgttttgtgaggaatggattcaggtctaggccacgcgtgaccttggataaatcactgcctctccctgagtctcagtaataatataatagccataatagttctcatccactgtgtacctgtcaccaggcctcagccactgttagttagtactgtgattatttacatacgtaaaggctaaactcaattttaattcttacagtcaccctatgaatcaggtacttttgttgtccctttttacagaagaggaaattgaggtcatattggtaagtgacttacccaagtaatcatagctagtgagtggttggaggcagaatttgaaccaggactagtctgacatcaaagtgttagctcactccaccatttggccccctttcagaggtgcattttgtgggaaggggaggtgagacccctctgagctcagaccactcagtgatttacagacccaggtgggctcagtgttcagagtgcatgtccccttgtctaatccttgtctagttttccctttattcagttactgcttctaaagctggctatgtgtgcttaggccattccagactggagcctgttttggaggcttttgtgaatgcttctgcctggcaacatctgtgtcacgattcctgctagctctggttggctcctgactttggcttttttttttttttttttaattgcagaagaaggtagtgtaaatgaggaaataaagaggggggtgacaagagttggcactctaccagaaccaggggacaggcgttcaagatgcataaagaggaagaaaagcagatgctaaacttaactacgaactcccctgagaattgcactgagtgtaatttatttatagagtgctaacaatgtgctaggtgtggagccaagagctttaccctcatcatcttatttaatgtaacagcccttggagcagatgttttacccgattttactcacacagagggttaatcaacttagatggtcccagaactaaccgactccagagccaggattccaatccaggttatgtggtctcgtcttcagggtgaatctctaggttcttaggcctcctgaggaactgtggtgcagagaggggaaggtactgtcccatgtcgtgtgtgggaggtagagctggggctagaattgggtgtggggttgcagaagcactgaacaggtggaggatgaggctggagagcctgaacacaggctaggccacccgtgttccttgagaaggccaagaagtagaatttgttttcccttcctgtctggtctccccacttcccccccgccccccgcccaccgtcgggtttttgctgtttccttcccgaataactctcccttgggctgggccttatcccagaaagcacagactggcacgcagcaagccaatgagaatgagccagtctgtgatgtcatgagttaccaggcacaagggactcctggagcgtcctaaaccatccttgctggttgctggagtaggcagggtgcagcctcatccttgcagttcccaatgggtctgttttagtccgttttgtgccgctttaacagaataccacagactgcgtaatatacaaacaaacaaacaaacaaacaaaaaacacccagaaatttatttctcacagttctggaggggctttcttgttttttttttttttttttgttatgttttttgagacagagtctcactctatcccccaggatggaatgcagtggtgtgatcttggctcacagcaacctctgcctcccaggttcaagtgattctcctgcctcagcctcctgagtagctgggactacaggtgcccaccactacgcccggctaattttttcttttttttttgagatggagcctcactctgttgcccaggctggagtgcaatggcatgatctcagctcactgcaacctccaccttccaggttcaagggattctcctgcctcagcctcccgagtagctgggattacaggtgctcgccaccacgtccggctaatttttgcatttttagtagagacagggtttcaccacgttggccaggctggtctcgaactcctgacctcaggtgatctacctgtcttggcttcctaaagtgctgggattacaggtgtgagccaccgcgcccggcctagcttgctttcttttttttttctgagacagtctccttctgtcacccaggctggagtgcagtgacgtgatctcggctcactgcaacctccgcctcccgggttcaagtgattctcccacctcagcctcccaagtagctgggactagaggtgcacgccaccatgcctggctaagttttttgtatttttttgtagagacggggtttcgccatgttggccagactggtctcgaactcctggcctcaagtgatccacctgccttggcctcccaaagtgctgggattacaggcgtgagtcaccacacccagcctggtgaggggcttccttgatgtgtcctcatatggtggaaggcagaagggcaagagagaaccaactccttccatcaagccgtcttacagggcacctaatcccattcgtgagggagaaggccttgtggcccgatcacctcccaacaccttcacattggcaacacctggactagggtcttagtagtcccacccctggggtcgtcaaagaacagatcagaaactcctggggtgtaggggcaggatccttacatcccctgtactgtaacatatgcatgcaccccccagtcgcatccaagtcccacagatacaagggcttgctgaggtccgagggtctggatggtgagtccagggagcatgagaaattcatccaggccacacaggctcaggcacctatactcctgcccaccccctgcaggatggatattaccatttgaaatactttggcgcttgcagtgagatcttgcttaaaagaagaaacccaccaaattctagaatcgcagaggtgggggcacctatgtgacaaatgagggaacagaggcacagagattggcagggacatgctcaaagacatggagagcctgggcagaggatggccccagagtgggtggtgcctggccctgcttcagcctgacattgtccaagcctcccccagcccactcctaaaatggccaggccccacttcttcccaggtgggctacattttctgctgtcccggtcccacttccttaccttttctccttaaatctgatttcactgtgagggtgggaggttgggcagaggggtgaaaaccctcttccccttacttggtaagcacatacaattttttttggttttgtcaattaaaaaaaataacatacctggttgatcctgccagcagaaaaaaaaaacaaaacaaaaggctgggcgcggtgactcacgcttgtaatcccagcactttgggaggctgaggtgggtggatcacgagatcaggagatcgagaccacggtgaaaccccgtctctatcaaaaatacaaaataattagccaggcgtggtggcgggtgcctgtagtcccagctactcggagaggctgaggaaggagaatggcataaacccaggaggtggaggttgcagtgagccgagatcgcgccactgcactccagcctgggcgacagagcaagactccgtctcaaaaaacaaaacaaaacaaaacaaaacaaaaaccaaacctgttccccttgagggcagccctgatcatcaggagatccgcacggcaaagggagcctgggaagacccccccacctcaacccctcatcgcacaggcaggaccctaaggtccagagaggacaaagagcatgcctctttgctcttctctgttcaactcaggcccgtggcagctgcagggtctctgccagggaagacttcaggcacatcgatggttggaaggaggggtggggtgaggtcttcaagctgtgtttccatagccagcttactgtttgtgcttcaaatgcattgtttattaggggtggcttaggggtctaatggagatgggggtatacatttccccattcctagccagcccttggggcagccaccactgtggatcctcctctgacctatcctccccacctcccacagcaagtgcagccgcggagccctgtacacaggcttttccatcctggtgactctgctcctcgctggccaggccaccaccgcctacttcctgtaccagcagcagggccggctggacaaactgacagtcacctcccagaacctgcagctggagaacctgcgcatgaagcttcccaagcgtgcgtgcacccctacatcctgataccccccacctcccaccatccctcaactcagagacccgcatc

SEQ ID NO: 1174 - DNA, 6000 bp, Homo sapiens
tgggattacaggcgtgagccactgcccccagccataagctaggattttaaaggcaggggtaaatctgaggaaagcagaagttataggcaaaattctaaatcaatacatgaaggttatatattggtttgacctaaaaaggtgggacatcttgaagtgggggtccacaggtcatgggtggatttaaagattttctcatttgtcattggttaaggacacgaacgtttgtctaaaaatctggggtcagaaaaaaggaatgttagctctggcctgtgggcatgacctcctccaggcccctcagaaagaaatttatttatttttaatgtttaaaatgtattatttattgagacaggggctcgctctgtcacccagactggagtttagtgggacaatcagtgctcactgtagcctcaaactcctgggctcaagtgatccttctgcctcagcctcccatctagctgggactacagatatgtgctgccacacctggctaattaaattttgttttgttttgttttgtttttgtagaaatgggggggtcttgctttgttgcccaggctggtcttgaacttctggcctcaagcagtccttccaccttggcgtcccaaagtgctgagattacaggtgtgaaaggaagaaatttagagcaaagattggtggttagagtttagtcctctgctcccccttgtctgagatctatgagccagtggatctgtttggtgggggtctgggtttatgaaaagcaatgcagggacataagttaagatgttatctttagtttttatagggagccaaataccccatgattctaacttttttggctattgtcttaagttattactatatttttgtttatcagcttgctcatttacttctcaaggctagctaggtgcctgaaatacttttgaagaaacgtaagtttctttttcttttcttttcttttttctctttagagatggtcttactctgtcacccaagctgcagtacagtggcatcatcacagctcactgcagcctggacactcaagcctccggggatcctcctgcctcagcctcctgagtagctgggactacaggcacgtgccaccacgcctggctaattttagaaaaatttttgtggagacgggggtctcactgtgttgcccaggctggtctcgaactcctggcctcaagcgatcctcccaccttggacctgctaaagtgttggaattacaggtgtgagccaccatttctggcctagatttttctctctttttatgttggtggggtgctcagctggcccctaagaagggtccctgctctgtctcacagctatttgaaactgtatgttattgttaactatagtcatcccacaggggtatagaaaatgagaacttagtcctatctaggtgcaattttgtatccttttgcatccccgtccctcccttccccctacccttcccagcctctagtatcctctgttctacttttcacttctatgagttgaactttttttagcttccacatatgagttagaacattctgtgtttaactttctgttcctggcttatttcacttacaaaatgtctccagttccatccagtttcatatcttcagcatcttctatggtgcgaggctctggctaaatgcttatttagtctaacagctctgcaaggctagtattaccatccctgcattacaaagcagaaagcaaaatcagaaaggttgaggggccaggcgtggtggctcacgcctgtaatcccagcactttgggaggccaaggcaggcggatcacgaggtcaggagatcgagaccatcctggctaacacagtgaaacaccatctctactaaaaaaatacaaaaaattagctgggtgtggtggcgggcacctgtagtcccagctacttgggaggctgaggcaggagaatggcatgaacccgggaggcggagcttgcagtgagccgagatcgtgccactgcactccagcctgggcaacagagcaagactctgtctcaaaaaaaaaaaaaaaaagtaaagaaaggttgagggactggttcagggactcacatgcctaggatgtttctgacttgggatttgaactcaggtctggccacatcaaaggccatgtctgctcttcgctctcctcccaaaatacatgtactatctcatttgactcttgaaatccaaaactcattgaaccttcgaaccacaagtctaaatttattaaaaaaaatttattaatgcaaattgtaaagcacacacaatacataaagattaataaaacaaatatggtatataaaaggaaacttgtttttttacactcacagcacttctgacaccaaatgtgtggattttttctacaccaacaacaaatgttctaactctctggacaccaactgggcatcctacaattcaattctgttcagacactatctacctggggttagcatctgaacccataggttgagggctcagtcagacaagactcatccacttcagatgccaatcctaagtcccgggactccagtacttctgatgagttggctacaaattgggagttcccacgactccctcttcatacttgacaaatagctacaatggcccacagaactgagaagcactttacttactattaccagtttattataaaggatacagatgagcagctgatgaagaggtctatagcgtacggcatgtgggaggggtcctgaacacagcagcctctgtccctgtccttgtggagttggggtgcaccaccctcctggcacatggatgtgttcgtctactcgaaagctctccaaacctagttgtttgggatttttatgcaagttccattatgtagacatggttggttaaatcactgattgaactcaacctccaacccctctctcctctctggaagtcggggtggggcgggtgggggtgaggtctgaaagtcccgaccctctcctcacatggcacccagcctccatctgaagctctctaggggctttcagccaccagcatttcctgaatatataaaaaaagacattcttctcactctggagatacttttttttttgagatggagtctcactctgttgcccaggctgaagtgcagtggtgcgatctcgcacctccgcctccagggttcaagcgattttcctgcctcagcctctcgagtagctgcgattacaggcacacgtcaacatgtccggctaatttttgtgtttttagtagcggggtttcactatgttggtcaggcttgtctcaaactcctgacctcatgatacacccacctcgacctcccaaagtgctgggattacaagcgtgagccaccgtgcctggtctttttttcttttttttcttgtttttttttttttagacagagtcttgctctgtcacccaggctggagtgcagtggtgcgttcttggctcactgcagcctctgcctcctgggttcaagcaattcccctgcctcagactcccaagtagctgggattacaagtgtgtgccaccatgcctggctaatttttaaattttttgtagagacagggtttcaccatgttggccaggcaagtctcgaactcctgacctcaactgatcctcccgcctcagcctcccaaagtgctggaattacaggtctgagccaccacacccaggcttactctggagactctttggttcttagtggtccttgtgtcaggaaccagggacagagaccagagacgtttttcactatgtcacagcacaggagccttgccaacacagtcccatcctcccaggcaccctttcccaggctgtcctcttccctcccagcacaggcccccattctcctggatctgaaccacacaaggaggcagaggggtggagtggttaaaaatgcaggcgctactactttctggaggtgtgatcctggacaagagcccctgtgtccctatctgtaaatggagatgataaaacactcctcaaagggcctccgtaaagatcacaggaaacaaagcatggacaacgtgcctggcacgaaggagagcttggtaagtggaggcaagtctgagtgccagagccttaaaaccatggactcttaggtttgaaggaaatcaaaatattcctctctaaaaacctgcggattttagttaaaggtaaaaggttaaaacccaggggcaccctctgccccttctctctgtcttgatcagctcagaagcagagctcagaggatcctggatcagacttgactgttcccatacattcaccttcccacatttccagccctttggaaccctgaagatatcctcttctctgtcctgtcactctatgggacttacggctctttgttaaaatactatttaagcaaggcccctaagccactgccttgagagagaaatacttctcaactgaggcctctactgcataatgggtacagcatgtgttaatcaactttggctgatttttcttttgttaagttgacttttgtttccaggggagcgtgtcaactaagaacctaaacagggaaagaaaagaaatgttttcacccctgcacgtcgtccaaacttcctcctgcgtgtttgagacgacataacggaggccagagaagaggacttgtctgagctcaccaagggtgcacagcccctttctgcacccactcatctgtggatgagaaggggagacaaacaaaggtgtcttctgtttcaaagtgctttcctgtctagggagtggacatttgcctgtttcttgaaacattcaaagagccttatgaatccaaaggcctgcccagaaacaagtgatgagggccctgggcagccaatgggatcgtgctggcctttctacctgcctggggagcccccccgccccacatcctgccccgcaaaaggcagcttcaccaaagtggggtatttccagcctttgtagctttcacttccacatctaccaagtgggcggagtggccttctgtggacgaatcagattcctctccagcaccgactttaagaggcgagccggggggtcagggtcccagatgcacaggaggagaagcaggagctgtcgggaagatcagaagccagtcatggatgaccagcgcgaccttatctccaacaatgagcaactgcccatgctgggccggcgccctggggccccggagaggtatgtgtgagcaccaggaaagggcacaccgatcctggactgcagagccgtgcgcatgtgctgggaagaagcaccggccaggagtcacaggaaagagggattcaggctctgactctaacattgactttttgggtgattttgagcaagtctttggcctgctctgggctccggctccctctcttgtcaaatgagggggttcctttaagagcaggagtttgtaactttccttgcatcacaccgcctccttctgaaaagcagaagagagcatgggttctctccctagagtttcacatgctatgcaggggctttgagatcccactaaagctgggctgtgaatgctaggttaaaggccttggaacaggctgtgcctggtggctcccgcctgtaatcccagcactttgggaggctgaggcgggcagatcagctgaggccaggagttcgagaccagcctggccaacatgttgaaaccccatctctactaaaaatacaaaaattagccagatgtggtggtgtacacctgtaatcccacctacttgggaggttgagacatgagaatcacttcaacctgggaggcagaggttgcagtgagccaagattgtgcaactgtaccccaccctgggtgacacagtgacactctgtctcaaaaaaaataaataaataaataaagaccttgcaccagattttgaaaatgttcaagatcccagtggagaaagagtttctaaaagaggatggtagaagcagttcttcacagaggagttccctcctaattaccacggatcaagggaatgatagttgcaggtgtctgtagagtagatggagacatctgccatcacaggagggattgtgagatgttgggggcaggcaagaaaggagggacaggctctggttaaatttctggagggggctc

SEQ ID NO: 1175 - DNA, 6000 bp, Homo sapiens
cggctcactgcaagctctgcctcctgggttcacgccattctcctgcctcagcctcccaagtagctgggactacaggcgcccaccaccacgcccagctaattttttgtattttgtatagtagagatggggtttcaccatgttagccaggctggtctcgatctcctgacctcagatgatcctcctgcctcagcctcccaaagtgctgggattacacacgtgagccactgctcctagcctgctctataatttataacagcacaagactagaaacaacccaaatgtccattaataaggaactggttaaatagagtacatccacactatgcagctgtaaaatagaaaatgcagctgtgaatgtgagaaaaaaaactttatatgctgccatagagtggtgtctagaatatgctgctaagtgagagaaaagaaagaagaaaatgcaaagcaatgaatagagtattgtatattatttgttatctaagaaagtatttcctagctctatccattgaaaaacactagaaaaacaaccaatgcaatagcaatgagtgcttttcataaccagaatgtggtctctaatgccactttccactgaaaggaaccagagtccttaaagaaatggcttaatctatgttggggcagaaaatgtacaaggtgaacctggaattattattttttaattgaaagcaagtttattaggaaagtaaaggaataaagaatggctattccataggctgagcagcctgaacctgaaatttttattttattttattagagatgaggttaggccgggcacggtggctcatgcctgtaatcctagcattttgggaggccaaggcaggcagatcatgaggtcaggagtttgagaccagcctggccaacgtggcaaaacccccgtctctactaaaaatacaaaaaaattagctaggagtgctggcaggagcctgtaatcccggctacttgggaggctgaggcaagagaatctcttgaacccggaagtcggaggttgcagtgagccgagtttgtgccactgcgctccagtcttgggcgacagagcaggactctgtctcaaaaaaaaataaagggagatgaggtcttgttatgttgccccggctggtctcgtacccctgcccttaagggatcctccttcctgagtcacctagctgggattataggcacaatccaccaagctccgtctgaaccaggaatattttatcataccagaatgtaagaaagctgtcagatattgctggaattatttcacaaaaacatcaatgccaaattgaaagagttctcattgccacaatgaaccatttgagtaccaaaaaatcattattaaaacaaattgaaacattagctgtagtaaaactcatgtgcaggtaaagatactaaaaaaaattagtcacctttggagacacttgggattccaccttattctgaaaacaaggaaataaagggaaagactcaatcattttcctgcttttcttatacaaattatttctatttatttattttttgagacagtgtctttctctgttgcccaagctggagtgcagtggcttgatcacggtttaccacagcctcgacctccctgtctcaagtgatcctcccacctcagcttcctgagtagcagggaccatatgtgtgagccaccacactcaacgaattttaaaattttttgtagagatggggtctccctgttgcccagggtggtacaaattatttttggccaggcatggtggctcacacctgtaatcccagcacttggggaggctgaggtgggtgggttgcttgagctcaggagttcaagaccagcctgagcaacatggtgaaatcgtctctaccaaaaatacaaaaaattagctgggcatagtggcctttgcctgcagtcccagctacttagtaggctgagatgggaggatcacttgaacctgggaggcggaagtgagccgagatcaccccactgcactccaggctgggtgacagagtgagaccccatcttagaaagaaaattattattattattttttgagacggagttttcacttttgttgcccaggctggagggcaatggtgcaatcttggctcaatgcaacctccgcctcccaggttcaagcaattctcctgcctcagcctcccaagtagctggaattacagacatatgccaccacactcagctattttttttttttaatttagtagaaacagggtttcatcatgttggtcagactgttttcaaactcctgacctcaggtgatccacctgccttggcctcccaaaatgctgggattacaggtgtgatccactgcacctggccgaaaacgattttttagggtaatcaaataattgatcaagaaacattctcctttacagaagattacagactgagattacaggcatgccaccacgcctggctaattttgtatttttagtagagacgggatttctccatgttggtcaggttggtgttgaactcccgacctcaggtgatgcgccctcctcggcttcccaaagtgctgggattacaggcgtgagtcaccacacccggccaggaacatgttaaatgacaacatgactcaaggtaatgtgtagaccttgttttgatccttattcaagcaaatcaactgtaagagacaggggtatttgaactgggtaattcatactattagaaataaatatatctattttgagatggagtctcactctgtcacccaggctggagtgcactggctcaatctcagctcactgcaacctccatttcctgggttcaagtgattttcctgcctcagctttccaagtagggagagacagctttagtaaatatctttgtacctatataattattaatgtctgaaagtagttttgtagagtattctaagaaatggatttgcacagtaagtagagcaggcacttacaaatatatatacagtacatataaatgcttcttttcttttttcttttttttggttggttggttggtttttttagagacaggctctcactctgtcacccaggctagagagtagtggtgtgaacatgactcacagcagccttgactttccaggcttaagatcttcccacctacctcagcctcctgagtaggtggaactacaggcatgtgctaccacacccggctaattttttctgtttgtttgtagaaacagggtctcactatgttgcccaggctggtcttcaactccaacccctcctgcttcagcctcccaaagtgctgggattacaggcatgagccattgcacctggcattcactgtttacgtaagcagggtcgtattatatatatattgttctccaactttgcttttttacttcatgtggcatagctatctttccaggatataatatataggggaccactgtattctttttagaagttgcacagtattccacaggataaactgatataccattttttaaatacaagttttattttaatcttcattttttaacacattttatcatggaaattttcaaacaagaacaaaaatagaaggaatcctatgatgaacaaccatatacccatcacccagttttaacaattatcatcatgtagtcaatcttatttcatatataccttcccactctcctttctcctccccttttgctggattgtttttttttaaagtctcagataaggccgggcgccatggctcacgcatgtaagtccagcactttgagaggctgaggcgggtggatcacttcaggtcaggagttcgagtccagcctggccaacatggtgaaaccccatctctactaaaaatacaaaaattagctaggcgtggtggggggcgcctgtaatcccagctacttgggaggctgaggcaggacaatcacttgaacccaggaggcaaaggtcacagtgagccaagatcataacactgcactccagcctgtatgacagagcgggacttcggtttcaaaaaaaaaaaaaattaaaataaaaaataaaacagtggccgggtgtggtgactcacgcctgtaatcccagcactttgggaggccaacatggcgaaaccctgtttctactaaatatacaacaattagctggacgcggtggcaggcacctgtaatcccagctacttgggaggctgaggcacgagaattgctggaactcaagaggcagaactcgtgagtcagagatcttgccactgcactgcagcctgggcaagagagcgagaccccgtttaaaaaaaaaaaaaatgctggctgggtgcggtggctcacgcctgaaatcccagcactttggaaggcagagacaggcggatcacccgaggtcaggagtttgagcccagcctggagaacacagcgaaaccccatccctcctaaaatacaaaaattagtcgggcgtggtggcatgcacctgtagtcctcgctactcgggagcccgggaggcggaggttgcatccagcggagatcacgccactgcactccagcctggacaacacagcgagactctgtctccacacacacacaaaaaaaggcataacaaatttaagtgactcaaagctttatgtgacacaggagctctcagaaaggaacagttaaattataacatgtccatattatgcgttagtatgtgtccacaactaacccataatatggacatgttataatttaactgttcattcctctcttgatagacactgaaatcgtctctataattttcctgtaagaaataatgccttggggtgggggtgtcttcctttctgaggctatcatttgtattcctcacttcttaaatttgtttgatatgttgaggcttaaaaaaaaaagattacgggtcttcagaacgccccaatgcccgcggggtgctggggtgcctcggagtttgtcaaggtgtagcttaaaacgttaattcccatgctcgctcccaaatattcgaattaaggcttctgtagttcttacaagtcacccgctttctttcaggaggaatgttaaagattaagagcggcaagaagtcagagtcggcccaccctccgagctctcttagggcgatgtccttgctaatttggagactgattcagtccccttttggcccccaagttacgtaaagataaggactttggagatgttttctcaggaaggacagagctgaaaaacaaagttccgtaagtctggccggtaactacatctttccttcctaacaaagaataagccgcaattcactctctctggcacctgaactttggggtaacgattaactgcgatccgaagccttcaggcaagtaaaaaattcctgaagtgattacgcctgtttggaggcttgcagggcactaggggatggggaaaggtgaatcgaggtgctctctggctcattcgcagccggctaacccgccatatcttacacagctaagggctgccgacgccattttgcagggtgggctgcgcagactcttggcgggaggccggcgcgcttgagcgggagaggacgtggaagggttggaggtggggagtgcgcgttacgactggaaagcacgcgtgcgcacaggcgacagcagcggaggggtggggccagtgtacgagtgcgcgtgctcggtgggagcccgcggagtacctggaaggaggtgggggcgaggtagaaaggagtggggttgaaaagcgcttgcgcaggacggctacggtacgggggtgggagggcttcggagcacgcgcgcggaggcgggacttgggaagcgctcgcgagatcttcagggtctatatataagcgcggggagcctgcgtcctttccctggtgtgattccgtcctgcgcggttgttctctggagcagcgttcttttatctccgtccgccttctctcctacctaagtgcgtgccgccacccgatggaagattcgatggacatggacatgagccccctgaggccccagaactatcttttcggtaactgctggggggagctggagcgaggccgagcggggcctggtggcggtgagggtgggggtgaggggcgggaatccggctgcaaccgggtctggtggagaccgccaga

SEQ ID NO: 1176 - DNA, 6000 bp, Homo sapiens
tgaggttaggccgggcacggtggctcatgcctgtaatcctagcattttgggaggccaaggcaggcagatcatgaggtcaggagtttgagaccagcctggccaacgtggcaaaacccccgtctctactaaaaatacaaaaaaattagctaggagtgctggcaggagcctgtaatcccggctacttgggaggctgaggcaagagaatctcttgaacccggaagtcggaggttgcagtgagccgagtttgtgccactgcgctccagtcttgggcgacagagcaggactctgtctcaaaaaaaaataaagggagatgaggtcttgttatgttgccccggctggtctcgtacccctgcccttaagggatcctccttcctgagtcacctagctgggattataggcacaatccaccaagctccgtctgaaccaggaatattttatcataccagaatgtaagaaagctgtcagatattgctggaattatttcacaaaaacatcaatgccaaattgaaagagttctcattgccacaatgaaccatttgagtaccaaaaaatcattattaaaacaaattgaaacattagctgtagtaaaactcatgtgcaggtaaagatactaaaaaaaattagtcacctttggagacacttgggattccaccttattctgaaaacaaggaaataaagggaaagactcaatcattttcctgcttttcttatacaaattatttctatttatttattttttgagacagtgtctttctctgttgcccaagctggagtgcagtggcttgatcacggtttaccacagcctcgacctccctgtctcaagtgatcctcccacctcagcttcctgagtagcagggaccatatgtgtgagccaccacactcaacgaattttaaaattttttgtagagatggggtctccctgttgcccagggtggtacaaattatttttggccaggcatggtggctcacacctgtaatcccagcacttggggaggctgaggtgggtgggttgcttgagctcaggagttcaagaccagcctgagcaacatggtgaaatcgtctctaccaaaaatacaaaaaattagctgggcatagtggcctttgcctgcagtcccagctacttagtaggctgagatgggaggatcacttgaacctgggaggcggaagtgagccgagatcaccccactgcactccaggctgggtgacagagtgagaccccatcttagaaagaaaattattattattattttttgagacggagttttcacttttgttgcccaggctggagggcaatggtgcaatcttggctcaatgcaacctccgcctcccaggttcaagcaattctcctgcctcagcctcccaagtagctggaattacagacatatgccaccacactcagctattttttttttttaatttagtagaaacagggtttcatcatgttggtcagactgttttcaaactcctgacctcaggtgatccacctgccttggcctcccaaaatgctgggattacaggtgtgatccactgcacctggccgaaaacgattttttagggtaatcaaataattgatcaagaaacattctcctttacagaagattacagactgagattacaggcatgccaccacgcctggctaattttgtatttttagtagagacgggatttctccatgttggtcaggttggtgttgaactcccgacctcaggtgatgcgccctcctcggcttcccaaagtgctgggattacaggcgtgagtcaccacacccggccaggaacatgttaaatgacaacatgactcaaggtaatgtgtagaccttgttttgatccttattcaagcaaatcaactgtaagagacaggggtatttgaactgggtaattcatactattagaaataaatatatctattttgagatggagtctcactctgtcacccaggctggagtgcactggctcaatctcagctcactgcaacctccatttcctgggttcaagtgattttcctgcctcagctttccaagtagggagagacagctttagtaaatatctttgtacctatataattattaatgtctgaaagtagttttgtagagtattctaagaaatggatttgcacagtaagtagagcaggcacttacaaatatatatacagtacatataaatgcttcttttcttttttcttttttttggttggttggttggtttttttagagacaggctctcactctgtcacccaggctagagagtagtggtgtgaacatgactcacagcagccttgactttccaggcttaagatcttcccacctacctcagcctcctgagtaggtggaactacaggcatgtgctaccacacccggctaattttttctgtttgtttgtagaaacagggtctcactatgttgcccaggctggtcttcaactccaacccctcctgcttcagcctcccaaagtgctgggattacaggcatgagccattgcacctggcattcactgtttacgtaagcagggtcgtattatatatatattgttctccaactttgcttttttacttcatgtggcatagctatctttccaggatataatatataggggaccactgtattctttttagaagttgcacagtattccacaggataaactgatataccattttttaaatacaagttttattttaatcttcattttttaacacattttatcatggaaattttcaaacaagaacaaaaatagaaggaatcctatgatgaacaaccatatacccatcacccagttttaacaattatcatcatgtagtcaatcttatttcatatataccttcccactctcctttctcctccccttttgctggattgtttttttttaaagtctcagataaggccgggcgccatggctcacgcatgtaagtccagcactttgagaggctgaggcgggtggatcacttcaggtcaggagttcgagtccagcctggccaacatggtgaaaccccatctctactaaaaatacaaaaattagctaggcgtggtggggggcgcctgtaatcccagctacttgggaggctgaggcaggacaatcacttgaacccaggaggcaaaggtcacagtgagccaagatcataacactgcactccagcctgtatgacagagcgggacttcggtttcaaaaaaaaaaaaaattaaaataaaaaataaaacagtggccgggtgtggtgactcacgcctgtaatcccagcactttgggaggccaacatggcgaaaccctgtttctactaaatatacaacaattagctggacgcggtggcaggcacctgtaatcccagctacttgggaggctgaggcacgagaattgctggaactcaagaggcagaactcgtgagtcagagatcttgccactgcactgcagcctgggcaagagagcgagaccccgtttaaaaaaaaaaaaaatgctggctgggtgcggtggctcacgcctgaaatcccagcactttggaaggcagagacaggcggatcacccgaggtcaggagtttgagcccagcctggagaacacagcgaaaccccatccctcctaaaatacaaaaattagtcgggcgtggtggcatgcacctgtagtcctcgctactcgggagcccgggaggcggaggttgcatccagcggagatcacgccactgcactccagcctggacaacacagcgagactctgtctccacacacacacaaaaaaaggcataacaaatttaagtgactcaaagctttatgtgacacaggagctctcagaaaggaacagttaaattataacatgtccatattatgcgttagtatgtgtccacaactaacccataatatggacatgttataatttaactgttcattcctctcttgatagacactgaaatcgtctctataattttcctgtaagaaataatgccttggggtgggggtgtcttcctttctgaggctatcatttgtattcctcacttcttaaatttgtttgatatgttgaggcttaaaaaaaaaagattacgggtcttcagaacgccccaatgcccgcggggtgctggggtgcctcggagtttgtcaaggtgtagcttaaaacgttaattcccatgctcgctcccaaatattcgaattaaggcttctgtagttcttacaagtcacccgctttctttcaggaggaatgttaaagattaagagcggcaagaagtcagagtcggcccaccctccgagctctcttagggcgatgtccttgctaatttggagactgattcagtccccttttggcccccaagttacgtaaagataaggactttggagatgttttctcaggaaggacagagctgaaaaacaaagttccgtaagtctggccggtaactacatctttccttcctaacaaagaataagccgcaattcactctctctggcacctgaactttggggtaacgattaactgcgatccgaagccttcaggcaagtaaaaaattcctgaagtgattacgcctgtttggaggcttgcagggcactaggggatggggaaaggtgaatcgaggtgctctctggctcattcgcagccggctaacccgccatatcttacacagctaagggctgccgacgccattttgcagggtgggctgcgcagactcttggcgggaggccggcgcgcttgagcgggagaggacgtggaagggttggaggtggggagtgcgcgttacgactggaaagcacgcgtgcgcacaggcgacagcagcggaggggtggggccagtgtacgagtgcgcgtgctcggtgggagcccgcggagtacctggaaggaggtgggggcgaggtagaaaggagtggggttgaaaagcgcttgcgcaggacggctacggtacgggggtgggagggcttcggagcacgcgcgcggaggcgggacttgggaagcgctcgcgagatcttcagggtctatatataagcgcggggagcctgcgtcctttccctggtgtgattccgtcctgcgcggttgttctctggagcagcgttcttttatctccgtccgccttctctcctacctaagtgcgtgccgccacccgatggaagattcgatggacatggacatgagccccctgaggccccagaactatcttttcggtaactgctggggggagctggagcgaggccgagcggggcctggtggcggtgagggtgggggtgaggggcgggaatccggctgcaaccgggtctggtggagaccgccagaccgacgggaggcctgagcgggtgggaagagctgcctgagccctggacctggagggattggagccgcggggggagccggtggcgtgaagggggaggagacgagcggcctgaagcgtctggggcgtgagcggtccgaggcccggggcctgaggtaaagtggaaccggccgcctggaagttcggcctttgccggggatacgtggcggagctccaggcgtggtttattttctaacggcggtggttcataggcttctgatgccaggccccgggttggtggtcctggaggctgggttcaccgggaagcatgggcctgcttgttggagcgggtagatgcacagcctggcgttattctggcctcagagcctggagctgccggacgtagacttacctcgcgtgcttcggccagttactgggggtggggaggcgcggcgcggcgtgaggaggccgcaaccgctgggagcacgtggttgccacgtggttgggggagggaggggggtgtgggcgctacatccgggactcaccggcgtgttgccactcgtgagccagggatgctgtggctctgttgaagtgggaaatgttaagaggctggtagcactagggttctggaggtctttgttcagtgcttacagcatgtactgtgatggcagctctcatttttttgagccccttttctgtctcactgcggtaggtggagctagccccactttgcagatgaggatactggtgcccagagataaactcacttaacgaaggttgtacttagtaaaggcaata

SEQ ID NO: 1177 - DNA, 6000 bp, Homo sapiens
atcacccgaggtcaggagtttgagcccagcctggagaacacagcgaaaccccatccctcctaaaatacaaaaattagtcgggcgtggtggcatgcacctgtagtcctcgctactcgggagcccgggaggcggaggttgcatccagcggagatcacgccactgcactccagcctggacaacacagcgagactctgtctccacacacacacaaaaaaaggcataacaaatttaagtgactcaaagctttatgtgacacaggagctctcagaaaggaacagttaaattataacatgtccatattatgcgttagtatgtgtccacaactaacccataatatggacatgttataatttaactgttcattcctctcttgatagacactgaaatcgtctctataattttcctgtaagaaataatgccttggggtgggggtgtcttcctttctgaggctatcatttgtattcctcacttcttaaatttgtttgatatgttgaggcttaaaaaaaaaagattacgggtcttcagaacgccccaatgcccgcggggtgctggggtgcctcggagtttgtcaaggtgtagcttaaaacgttaattcccatgctcgctcccaaatattcgaattaaggcttctgtagttcttacaagtcacccgctttctttcaggaggaatgttaaagattaagagcggcaagaagtcagagtcggcccaccctccgagctctcttagggcgatgtccttgctaatttggagactgattcagtccccttttggcccccaagttacgtaaagataaggactttggagatgttttctcaggaaggacagagctgaaaaacaaagttccgtaagtctggccggtaactacatctttccttcctaacaaagaataagccgcaattcactctctctggcacctgaactttggggtaacgattaactgcgatccgaagccttcaggcaagtaaaaaattcctgaagtgattacgcctgtttggaggcttgcagggcactaggggatggggaaaggtgaatcgaggtgctctctggctcattcgcagccggctaacccgccatatcttacacagctaagggctgccgacgccattttgcagggtgggctgcgcagactcttggcgggaggccggcgcgcttgagcgggagaggacgtggaagggttggaggtggggagtgcgcgttacgactggaaagcacgcgtgcgcacaggcgacagcagcggaggggtggggccagtgtacgagtgcgcgtgctcggtgggagcccgcggagtacctggaaggaggtgggggcgaggtagaaaggagtggggttgaaaagcgcttgcgcaggacggctacggtacgggggtgggagggcttcggagcacgcgcgcggaggcgggacttgggaagcgctcgcgagatcttcagggtctatatataagcgcggggagcctgcgtcctttccctggtgtgattccgtcctgcgcggttgttctctggagcagcgttcttttatctccgtccgccttctctcctacctaagtgcgtgccgccacccgatggaagattcgatggacatggacatgagccccctgaggccccagaactatcttttcggtaactgctggggggagctggagcgaggccgagcggggcctggtggcggtgagggtgggggtgaggggcgggaatccggctgcaaccgggtctggtggagaccgccagaccgacgggaggcctgagcgggtgggaagagctgcctgagccctggacctggagggattggagccgcggggggagccggtggcgtgaagggggaggagacgagcggcctgaagcgtctggggcgtgagcggtccgaggcccggggcctgaggtaaagtggaaccggccgcctggaagttcggcctttgccggggatacgtggcggagctccaggcgtggtttattttctaacggcggtggttcataggcttctgatgccaggccccgggttggtggtcctggaggctgggttcaccgggaagcatgggcctgcttgttggagcgggtagatgcacagcctggcgttattctggcctcagagcctggagctgccggacgtagacttacctcgcgtgcttcggccagttactgggggtggggaggcgcggcgcggcgtgaggaggccgcaaccgctgggagcacgtggttgccacgtggttgggggagggaggggggtgtgggcgctacatccgggactcaccggcgtgttgccactcgtgagccagggatgctgtggctctgttgaagtgggaaatgttaagaggctggtagcactagggttctggaggtctttgttcagtgcttacagcatgtactgtgatggcagctctcatttttttgagccccttttctgtctcactgcggtaggtggagctagccccactttgcagatgaggatactggtgcccagagataaactcacttaacgaaggttgtacttagtaaaggcaataagagactaaatctaaaccaagacgcttgactccgtagctgctgcttcgtgaatattaatgaggcttcgttttagggggacgtcctcgcatgccgccatttgtgcggcattgaccaaactgcttttctaaatacaagaaacacgtagagtgttcggtttgagtcagatcaagacctaagactattcgcagaattttgggagcaccacccccctcgacttgcggtagtcctgccccaaaaaggagagtcccacttgggtttttgatctcagtaggattaattgcagaagcctaatctttgtactattcagactttgaagtaaatgcaaatcctaccgtgaattttatcttgttcattatccgtgctgagatttgttaattaaacgtctgttcacatttaagcatgtatatgtattggtaacggttagatgatagttaaatggaatcatttaaaatttttattctgacagtgttttgaagaattttgcccattcatggagtgagagtagacatatgtattcaaaacattaaggctttaattcctagttattttggatagctgagaattctggtaaatttatatcagtactttttgataactatcggaaagaaccctccttgtcttaaacataatttctgaatatagtttgaggcgtatgtcactttctgttgctttaaagagtggagtgttgatccctgtagcaaacttcggttcttttacttttgtcatttttcttttgtaatagtaagctattcatgtttgtaaccgttctcatttcgaaattgccatttgggaatttaggtaggtaaatcagctgttttaaatagtgggaaacttaacattggacattacatttggtttcagataattgcttcaggttgagatttactaaaccattgagcttgtttatgcagaataacagtacctatcagcgtagttagagatgaaatatggtatgatgagagaatggaattatagtcttttatgggtgtctgtagaggtttctgttcaagaaatctaggaattgatcattctgctttgccctctggtagctaaaatagtgaaaaactagttcaaaagttagacctgacctttttggttacccacacttaagtttcagtgttatttttctccttgttagagttgcttttttcttcatttacaggttgtgaactaaaggccgacaaagattatcactttaaggtggataatgatgaaaatgagcaccagttatctttaagaacggtacttaaactttcaaaataaactacttaaccctacttgatttcagccttttagtttctattcatgtggcttgagactttttttcctttgctgactgcttataaaatactatttcttacacctgggtattgtgtgtacctcactgtctgtacatctttgaagaacttggcatctataccactcatttggtaaccatgtaaattccagtcacactgttcaacttgccttattttcttcagttgaattacaaagcccttgtaaaaggcatcgataatctttcatgtctaccagagactagccttctgctcaacttagaagttgctcaataaatatgttaggtggtctatattgtgtgtatgcatatttatgcatttcttaaattttctgaatatgagaaactgatttgccaagatcacaaaacctgaggacaacattgcacaaatttgttttccagggtaatagtgagaggtttatacttgttttttaaaaaaatcacagtcatgtgcctcattgcaactgctgggtcaacagatggatcgcatatacaatggtggtcccataagattattataccttatttttaatatacctttcctgtttttttttttctttggaggcagtctcgctctgtcacccaggctggagtgcagtggtgtaatctcggctcactgcaacctctgatttccgagttcaagtaattccctgcctcaccctcccgagtagctgggattacaggcatgtgccaccacacctggctaatttttgtgtttttagtagagacgaggttgttaccatgttgtccaggctggtctcaaactcctgacctcatgatctgcccgcctcagcctccctaagtgttgggattacaggcatgagccaccaagcccggccctttcctatgcttagatgcacaaatactgtgtttcggttgcttacagtattcagtacagtaacactgtacaggtttgtagcctaggtgtgtgtagtaggctataccatctaggtttgtataagcacattcttatgattgtacaaagatgaaattgtctaacaacacatttctcagaacctagccctgtggttaagtgacgcatggctgcatataacatttagtgggggggtgtaaaataggtggaactcaaaagttgaagtagtattttttttttgttcacaggtcagtttaggggctggtgcaaaggatgagttgcacattgttgaagcagaggcaatgaattacgaaggcagtccaattaaagtaacactggcaactttgaaaatgtctgtacagccaacggtaagggcacttacatactttggatgttgtgtcaaggtttaattctgttttaaggtaggtttggtgtcatttagttgtgccaaggagatagaaagtggttctttatcttctgtcactggagttcgatggtcaactcttgaacatgggggcttctgctgctacttttatcagaggtggaaaaacaggttcactggtttgttgatttggcttatgtgtttgcctgtaatgtttattgttcattttcttcacatgtttagtgatgaaaaatttctcccttctaggtttcccttgggggctttgaaataacaccaccagtggtcttaaggttgaagtgtggttcagggccagtgcatattagtggacagcacttagtaggtatgttatttttatatattatactacttagtttgtcctctttagtgcagttgcttggttcccagtttggacttaaagcatgggtatagtactactgtctttttaataggttccaatgtgagtctagaaattggagaggacaaataaatttttggggcgggggggagaggaaatcttgctgtcacccaggctagagtacagtggcacgatcttggctcactggaacctctccgggattcaagcgatcctcctgtctcagcctccccagtagctggggccacagacgtgcaccaccaagtccagttgcgtttcatagttatagtagagaaggggtttcgtgatgttggccaggccgatcttgaactcctggccttaacgtgatctgcacgccctggcctctcaaagtgctagtattacacgtgtcagccactgtgcctggcctaaaaattattttttaataaagacagtctcattataacggctggagtgcagtgatgtgatcatagcttgctatatcctcgaactgctactgggttcacctcagcctctggaatagctagaactacaggcacactccacgcctggctaat

SEQ ID NO: 1178 - DNA, 6000 bp, Homo sapiens
cacagcttagaggatattcttatttctcctcttttaatctttgggcaagtgttctgcatgggaaataaaatattttgggtctctcctgatttaaacatttgtatgtgtttgtgtgtttaatcactctaagtaagtctccaaactaagctgggcgtatatatagaggcttaaatccagagacctaagtgaaggcttccatcagagtatgtggctgaaagtcagccagcaaatatttgttgagcacttactctgccaggacctgtgctaggtactggacaatagagagatgaaagagaactccaggaactcagagccagcatgtgaacaggattgcagaacaacacaggagctgttacagatatgcaaagggctctaggcacattattgttgctgaggtgttttcatggacacatccagtggtgtattagagaattgatagacttgggttcttagtatcctggacccttgaagaaaccctctttgtttcatgtgagtgacattaaggccatcaggaagcaaaggggaggggcatggcctcccatggactggttctgcatcaggacttgatctctaaagaccactgctcacaggatcctctgtcaagatcttgagactgttaaagggctgggtgagccagaccagtatagtccttaggaaactaaacctgtggatagcatccagttagctgggtcattcagctggtgagctgtttagccacagtacagtggagaatttgaaagaaagaaaatggctgggaaatgctataatatcccagctaaaaggttcagagcaggaagaaggtgttagaaagccctaggggagggagtggcattccttaagactctgctaggtgcttttttgttacaggaaactcagctgctactctcaagcgcccaatgaggctggtggtcatgttcattttacaggagacaagactcagatgaggagactagccccagacctaccttatatgattatagagctccaattcaactccagtcggcttgctgcactacagaaataatttgtattcatctctttgggatcaggtcaagtcacaggcaatatttggaaggatgtctctgtagcgggggataaaggccttagaatctaaaaaccaaaaagaaagccaaaacctagcagataaacaaaagctagtctaaggatcagtgggtaaaggtgataggggaagcaaaacagagttgagaggaatcagtgattgcgtgtaatgatcaccagactgcacatctgttcctcgaagatggcctctagcttaaggtttaggattgggtccccttattggaaggaagtatattggagggtagagaaaaagggagcttatgttttcttctttagctgcagcataagagatgcaactggggactgttgattgcatatgaatattcaacaagaagcatgatgtgaacggggtcccaagggcacgtctgcaggtctgccagctgctggctttggggcttctctgctgtcctaaacagggggcttctatgtgagtatccaaaacactggagtgacctgaagaaagtaaacctcagtttctttaaaaggttttaacctgaaaatattaccaggaataaacttaacagaaaatgtatacaaggcctaggataaagaaaactttgaaagtactgtgaaggacacagaaggaaactggaataaattgaaagatacaccaagttcttacacaggagcagtgacatagaactaacagtggtaagttaaattaaaaatataatattgctaaaaaatgtcatcctaagaaaacataccaagagggtttaaaaaaaaagtttacacagggataaaatagctggaagatgctggtaggcagtggggctgagggggcagtgatgcaggggacaaggggaagagttatttaatcctagcagatactaaaagtcgttataaaaccataatagttaaaactaattttgatacatgaataggccagtcaagcagaatagaaggtctaaaagtagactcaaacatatacgacaatttagtatggcaaatgtggcatccagaaccagtgagcaaaaggtagactcttcattaaatagtattggaataactaagtaacctccggaaaaagtaaaattgggtctatatctcacaccataagccaacatatatttcaaaatagataatgatctaagtgtaaaaaaaaaaaaaagctacaaaaaaccacccataaaaacactacaaggaaatgtgggcaatccctttaaatccctgtaatttggaccacgaatccaggaatcataaacgaagattgataaattcaatgtaaaacaagattaacaaaaaccataagctaaatcaaagttctatagactttttaaggctgtagatgtctttaaaaaaaaatgaaaatagaaaagctttgaaactcatctctaaggactaatcctcctaatatatagagttcctggaaacggatatgaaaaaaaccaacaacccaatagaacaatgagcagacaatagaataaatgcaaatagctctgaagcataggtagagtttctcagcctccttcatgatcagaaaagcataaactaaagaaggcatttctacctaatcagattggcaaaacttccaatgtttgttaacctatcctgttgacaaggccacgggaaacaggcatttatgccatgttgctggagggagtatggattgacataatccctatgaagagcaatttggtaatatgtcagaatttttaaatgcatatatcctttgacctagcaactccatttgctctgggcaagtcattattcctctctgccccgtttttacctcacagagttgttgtaagagttaagcgagacacacatgaagcgcttagtacaaagttcctggcacataggaagtgctcccaaaatgtgggctagtagtagaataacagcagctaacgggcattgagatcttactatatgccacattagcacactgtgcttggtgcttttcatgtattttctcatttaattctccaacctgtgaagtaggcgcaattgattatcaccagttagcttccgaggagacagaggcacaggcatgcgaagtgtgtggtggacaggatttgagcccaggcagatgccaagcctgtgatacactgcctctctattaggtgcagtggggtgatgaataccttacgagagggtgtgtagagggctgtagggacacagacaagcacatagccccgcttacaacaggtggggaccatattgattttttggggaaaagatggctttcagtagaggctgtgccactttctttctttcttttttctttttttttttttttttttgagatggagtcttgctctgtcgcccaggctggagtagtacagtggggcgatctcggctcactgcaagctccacctcctgggttcacatcattctcctgcctcagcctcccaagtagcggggactacaggcgtccgccaccacgcccggctaatttttatatttttagtagagacggggtttcaccgtgttagccaggatgatctcgatctcttgacctcgtgatccacccgcctcggcctcccaaagtgctgggattacaggcatgagccaccgtgcccggcctaggctttgccactttcaagataggtaatcttgcaacagggttgattgttttttgttttaatttactctaagccctactcctgatctgtgataatagtgtagtacaatttcaagggtggttgtgaggattaagagagatgaacatggtcgggcacagtggctcacgcctgtaatcccagcactttgggaggccgaggcgggtggatcacgaggtcagttcgagaccaacctgaccaatatggtgaaccccgtgtctatgaaaaatacaaaaattagctgggcatggtggcacgcacctgtaatcccagctactcaggaggctgaggcaggagaattgcttgaacctgggaggtagagtttgcagtgagccaagattgtgccattgcactccagcctgggcaacagagcgagactccgccacaaaaaaaaaaaaaaaaaaagagagagagatgaacattcaagtcctaagcctttaggtcctcacaatctatgcttgctgaagtgacccgaacaaatgcagatggagtggggtcgagtgggggaaacgctttctagggagagggaacaccacattctaaggctacacatccagaaggagcttgagcaatccaggaagggcgcagggtgcggtggctgatggccggggtggctgatggccttgaggaccagctaagaaacttggattatttactaacaaaaataaaagagccaccatttgttgagggtttgctctgacatttccatcaaaactaccttagcaaggtagatttaataaatccagttgtatacaaaagggaaacacgagaagccatagaagggctgcatacaggtaggtgacttgatcaatttcgtgttttacaaagatcccttagatcatgtgttggagtgataggaggtactctaccgacctgccttgaactccatactttaaaaaatatatgacgtttatcatttcctcttttactccacaatttatactcactgtagaaaatattaaaaatataagaaagtttgaagaaacaaaaaattattactggtactttccagagacatctcaattgatacttttcttccagtctttttttttctatgtaaaaaatatatagttattagaatgcctgacagaaggaagatggaaagagaccactgtgaagcgttcttgatattccctcttcccttcctctccatgttattagggccataccaagaggagaggctgatttccctacacgtgtcagggaaagtcccaactctgcgcagtgaccctcgcttgccattttcgccggtctctagggggcgctgccccgagactgggtggggagggaaagaaggtggtgcgaaaacgcgtttgaacttgggtcctgccgctgcccgtagccggcgtccccaacatggcggctccccaagacgtccacgtccggatctgtaaccaagagattgtcaaatttgacctggaggtgaaggcgcttattcaggtactgatcccgggacccctgccgggctccagcagccctaacccaagctctgctggtctgtgagcttggcagtgtcactcccgaactttccccacttggtttcccagaccacaggctccgccccatggtcggctacccccccggtccccatttggttgtgtcccggtgactgctggccttgatcctttttccgggtgccgccggatctcccatccccagagcaccccactgttctccgcccctgactcagctactgcttcggggctcggctttgccccttccacctgcagccctggtcgtcgccccgcccctgactacctcacaacctacctgtcaccctgcttggccccgccctctgacgctgcttcagcatcctctggtagcgtccgggaggcagctagccccgccccctgctggccagctctcctggcatccaaggccacctggcacgggaggcaccgggtgaaacgaatgtaacctggaccgtagttgtgattttatgcttgaggaaatcgagtacggcgccaaggcctaggttagaaggcatacctgggtcagtggcaaaactgggacctggactgtgaaagtcaacctaggaataacaccttagagtgttaccccgtttgaacagataggaaatgaagtgtttcgccttaagccatttaagggtagaggtaaaataaacgagtggacttaggcaagaattgggagtgtagacacggttccatgagttcagcaaaaagaaaccgagttttaaaccttgtttttgcttgtttgtttttgtttttttgagacggagtctcgctctgtcgcccaggctggagtgcagtggcgcgatctcgactcgcggcaagctccgcctcccgggttcccgccattctcctgcctcagcctcctgagtagctgggactacaggcac

SEQ ID NO: 1179 - DNA, 6000 bp, Homo sapiens
ataaagagccaatgtcttggccaggtgtggtggctcatgcctgtgatcccaacactttgggaggccgaggcaggcagatgacttgagcttaggagtttaagaccagcctgggcaacatggtgaaaccccttctctaccaaaaaaaaaaaaaaatgctgggcatggtgacaagggcctgtagttccagctacttgggagactgaggtgggatcacttgagcctgggaggcagaggttgcagtaagccaagacagtgccactgcactccagcctgggtgacagagccagacccaatctcaaaaagaaagaaagaaagaaagaaagaaagaaagaaagaaagaaagaaagaaagaaagaaagaaagaaagaaagaaagaaggaaggaaggaaggaaggaaggaaggaaggaaggaaggaggaaggaaggaaggaaggaaggaaggaaggaaggaaagaaggaaagaaagaaagaaagaaagaaagagagagagagaaaatccaatgtcttgcttaagggtctccaagagcatgtcctgcttgctgaactaatttcctgatcaattgggttatttgtctggtagattggagcaaacctggaagctcatgattctagggctctgctaagtctttccatttatttttgtgggtgcagcagtgagatgtgagctgaatgatggtgtggtcagaggcttcctgagtggacaaaggagcagctggtttattgccctagtgcaatatgcaagttgatctcgagttgggagcctctggaccctgtccttggtcctgcctgcagcaacctgtttagttaggacttggttgaaagtatatgtgacttcctaatgtcatctgggaatgacagaagcagaagaaaatagcaaataccctccctgacagcacccacatcctgagagggctccatatgggaaagagggattagatgtaatacgatggaaaataattgggatgaatttaagtgtctgcatttaattgcagaaaaccagcgacctaaagggtaggtgaggaacacccagttgttgatagtacctaggcaaagacctaggacaatgtccatcaaagtgtgatccgtcttcagaccactggcagcagcagaaacatcttgtaggttttacagggcacagtaaaagcagattcctagacccctccccagacatcctggatcaaaattaggataggcaggacatggaaatttatactccaagcaactcataggaacttcggtgcatgtccaagtcagtgatggcctcagcacagggtctgagctccccaggtccaggggatattagcagtgcgatatcactgaccaacagctgattaggactcctcttgtgtatcaggccatgatggcagaacacctgccaaccccttcaggagatgccttcaggaagcagcctcaccacggaacacctacagggtgtctgggtggcgagacaggggcccagagccctgctgccatgccagcatctgaagcagaactgtttgccctgaaaattcatgatagaccaagacttcatcttctgaagaaaaatttgcctgagtaacagaagcaaaggaggctggagctctcaggagtcctcttcccatctggccatcctaccttagggtctgagacaaaccctttcctggcagcccttcaccctggattcttaagaagagttccagtgagacacctactccccctctctacaagggcacccctcctccttctcctgacatgactctgagcatcacttggaagggaacagttcagctgaggcccgggtgactaaaaggaaccagccacgtgaagatctggggacagagtattctaggaagaaaggcaaatgggaaggcctggaggtgggatgagcttggatgctggagaaacaaagtgaggggttgaggggccttatggctagggcctaggcagagttgaagaggaaggcaggggccagattctgctgggaccacaggctgtgcaggcactcatgctactctccacatatttcagctctgccttccaggcacgaggtgggattatacttcctggccctcttgggtgggactgtggggccagttctggccaatggattgtgaccagacatgatccattgtgtctgggctgagcgattgatggctggtgggtgcacctctggaatggctgctgtcaggctgggtcctcaagtgagggtgacctggagtcatagacccatgatggacaaatgagaaacaaacctttgttgatttaagtcactgagatttggggactatttgttacgacatcccctaatctatcctgactcttacatagaccattccattctggctgaagagagaggggcaagaagagaagtgaacaaagcagccaactgagcagaaaagacccttcctttcctgtatctcaaacctcatttcccaaattcaaatcccagagtagaaactgtagcaggagaaaagatgaggacacggacgttgaaaccaaacctcccaaggatgcatcttagctaaccctgcagtctattggataaggttggccctgagcaatcaggcacttcctctccctacgcctcagctactgcatctgcataatgggaataataatgtttctttaacaggactgcatgtgaggatcaagccaaattataaatgtatgcaaggacatagtggtgtccagcatactttttttttttttttttttgagacggagtcttgctttgtcgcccaggctggagtgcagtggcatgatcttggctcactgcaacgtccgcctcccaggttaaagcaattctccctggctcagcctcctgagtatctgggattacaggtgcccaccaccacatctggctgtgtgtgtgtgtgtgtgtgtgtgtgtgtgtgtgtgtgtgtgtatttttagtagagatggtgtttcgccatgttggccaggctggtctcaaacccctgacctcaagcgatccacccacctcagcctcccaaagtgctgggattacggtgtgacccaccacacccggccatccctttagacagagcatacactattataatgtcatcttataccccagccctcaatcctcttccttcatcctcagccaccagcctccagtgcccaatccccagtgggccccaagggcagatcctgccactgactctcctctcccacccacctctttcctgcagaggctgaagaggggtgttatggtgccaacaggagcagcctgggcacacactgctcctacacacacacacacacacacacacacacacacacacgagacatgtgagttgatcaggccctgacaccgtgtacattcaaactgccccgaaagcaaagttcccaaaccagaaggtggtgaacactttcccctgggctcacatgaagtctaaaaaattattttttactagttaaaaattttaaatcagaatatttcacatacgacggcttctgttgaaaatttggaagatgcggctatactgtgccccggtcccctcccccgacaaccagcacctggagcagaaaaggcagctgccccttgagatgggatccttgtgcctgtccccagcactgccctttgcctccctggcgatggagcccagcgtctgtatggttgcctctggagctttagctggtgttttttatagtagacttaagaggaaagcaaaacatttttcataacccttctctatcaaaagtgggaaacaaaagacagaccgagagagggcctcgtgtctcaagaaatataggagagctcatatctctttgtggaagcaagaccatcccttacatcgcctagcctgcagcgccaatttatattatcgaccggccccgtaggcgtttgagtttgcgaccctgccctcaccctgctcattcccctcccgacccagactaggaccctctctttttccgatcactccccccaggcacaccgcacgcggctgtcatttcctttctccttcaaggcagccctctgtttattttaacccgattagggaatgggggtggggcacaggagactccagcagcggtcactgctggaggctccaggagacgacgtgacttgaccaaggtcacagagctggaaggtgaagtcgcctggaccctacccccggtctccctagctgccaaagcccagctcgttcctttacacccacgtcgcgggcgccgtgcgctctcggggctcaaacaccgcgcgcccagtcgggtgtgctgcgcctgaaggttgttttccttcggcgaacggcgccgaggggttagggaaaccttgggtcatggtgtgaggcgcgcccctggaatccaccagcctgcgaggctgggactgcgggtgtccccgagtctggcctgccagctctggtggccagggcacctctgcgcgcgggccagggccccggggctctcccgcagtcccctaaccaagccgcgggctggcagcgtaccgcggcgcccggacgaccccggagcgcggccgcgaggaaagggcgggggagaggactgcagcggaacctgcccggggcacccctgccctgggcggctctccgcaggctggcgccgcgccggggtcgccgcagccccgggcccctcccgggccacctgtgcgcagactggcgggcccgcgagagcccggatccggagcaccgatccactccgggtttcagactcctgcccctgtccctggagaccccgcggggcggtgggaggcctccacgcccaccaccccaagcccctccctgggggagcctcaggcatcgcccagagggattcccggtgctgggggtggcccgcgcgcgctgcgcggggcggcccggcccctccttccttcccccgcccctcccagccgccgccccgctccgtcgctccagtccgggttttgcggcgcccaccggcccgctctccggctgcgggctccgcggcgcggctggctcggtgcgcggcgcggctggcgctgcgctccgccccggctgcattgctgcgctcccgtgcccaagggagccacgcgccgcgtgcgcccggcagccggccgcccggaggcagcgcagtccgctggcatgggccccgggggcgccccgagctggggctccgggctgaggcgctaaagccgccctcccgcccgcggggccccgcgcccggcccgcccgcctgcccgcccgcggccatggccgtccggcccggcctgtggccagcgctcctgggcatagtcctcgccgcttggctccgcggctcgggtgagtcacgccgcgcgcgctctggggaggcttgcgggggaccgtgcgcgcgaacgctcgctgctctgggggtccctgaccagcgctgccagacccggctgggagccccccgaggccaaactttgcgaggcgggacgcggggggctcttcttgctgctgcgcagcttccccgcgcgctctcccggaagcctgggttctgccaagtccaggagcagctgtcagcccgcggggctggcgagtgtagacaccccacgcctccgggtgggggaagtttgctggttgcctgggcccggagcagggctgggggtttggatcaaccccagggagcctgactttgaggattcgaagattagagggttttgagcctatcccagtgcccaggaaatggggggtgcggggaacgtttaagatacctcttcccggtagcatctgccctaaacagccactcacaatctcccagcttggcacctggcctctgcccacgtccagaacacagtgtcctcctctgtccccgccacacacgctctcacacgcacacactcaggcgtggaggcgcatacaccagcccccagtccttgcagccagcacagtcaaagcgccgcggtcccggtggccggggctgtggctcctggcctccctggtgcggggggccagagttgtgtgtggttggtccgccagtttccccttcttccttaaactccatagcctttcttggcccctgcatgccccattggtcaccctaacccactgctaactcagccctcagcccacctcattcccttgggag

SEQ ID NO: 1180 - DNA, 6000 bp, Homo sapiens
ttgagacaaagtctcaactgtgttgcctagactggagtgcagtggcacaatctcggctcactgcaaccttagcctcctgggttcaagcgattctcgtgcctcagccacctgagtagctgggattacagatgtgagccaccacacctggctaatgtttgtatttttacaaaaacacaaattttacaaaaatttacagggtttctccacgttgcccaggcaggtcagaaaataacttttatcggctgggcgtgatggctcacccctgtaatcccagcactttgggaggctgaggcggatcacctgaggtcaggagtttgagaccagcctgaccaacatggtgaaactccgtctctacgaaaaatacaaaaattagctgggtgtgctggcaggcgcctgtaatcccagctacctgagaggctgaggcacgagaatcgcttgaacccgggaggcaaaggttgcagtgagccgagatcacaccactgcactccagtctgggcggaagagtgagtctctgtctgaaaaaaaagaagataacttttatctaaagaatccaagtttttttaaatgatcagggcccagagagatattaaaatgagatagcaatcacttcctattctccctttttgagctaagattcatctatcaaaactgcttgctattgccacaagtgggtaaggattaacctaataatgccctacctgacgctatatcctacatcctacagcttaatgtacagccaatcactaaccaatgttatttctgtaaatcaatgagaattcttgataaacaactttgtatgagtcccactccctgtccacatttttttgcctttaaaaatcaagtaaactcttcaaatcatattttgtgtgttagcctcttccttgcaggtcaacacttctataaaatactgtaaaaagaaatattaccaactgagtgtggtggctcacacctgtaatcccaacacttcgggaggccaaggctggtggatcacctgaggtcaggagttcaagaccagtctggccaacatggtgaaactctgtctctactaaaaatacaaaaaaattagctgggtgtggtagcaccctcctgtaatcccagctactcaggaggctgaggcgggagaatcacttaaatctgggacagggaggctgcagtgagctgagatcgtgccaccacactctagcctgggcgatagagtgggattctgtctcaaaaaaaaaaaaaaaaaaaaaaaaattaccaatccatccttcacaaactccttcagaaacaagatgaggaaggggctgggcatggtagctcacgcgtgtaatgccagcactttgggaggctgaagggggcagatcacttgaggtcaggagtttgagaccagcctggccaacgtggtgaaaccccatctctactaaaaatacaaaaattagccagatgtggtggtgaacacctgtaatcccagctactcgggacgctgaggcaggagaatcgcttgacctcctccaggagaaccagggagacgaaggttgcagtgagctgagatcatgccactgcactccagcctgggtgacagggtgagactgcatctcaaaaaaaaaaataataataataataaggaagatctacaagagaaaatttctcaaatcttgggttaagataaagagttcttagatatgacactaaagcacaatacataggataaaaaatgataaatttaatctcatcaaaacttaaaacttttgtgcttcaaaaggcactgtttagaaaatgaaaaaacaagtcacagtcagggggaaatacctggaaatcatatctataataaaagacttgtacccagaatacacagataactcttacaactcagtagaagacaaacagcccaattacaaaataggcaaatgatgtgaatagatatttcaccaaagatctacaaatgggtagtcagcccctgaaaagttgctcagtattatcagtctttaggaaaccacaatgagatatcactacatgcccactagaatgcctataatcaaaaaagacaagtgttgtcaaggttatagaaaaagcgaaaccctcatacactgatggcagaaatataaaaggtgaagccattttggaaaacagtttggcagttctccaaaatgtcagagttacgatatgacccagcaattccactcttagggatatactcaagaaatgaaatgtatgttcacacaaaaacttgggcatgaatgttcgcagcagcactattcacaaaaactccaaactggaaacaatccaaatgtctagaactaatgaatggattaatagaatgtgttatattcattcaatggaattctatttagcaataaaaaggaatgaagtactaatacacaccatgacttggctgaacttcaaaaacatgctgagagaagccaaactcaaaagactacccaagacagaaaacaggtcactggttgcctagggcaggaggtgggagtggggatttaatataaatgagctcaaaggaactaattggggtgacggaaatgttctaaaagtggactgtggtaatggctatacaactctgtacactggctaacaatcactggcgatatgcttacaatgggtgacttgtatggtatataaattgtaactcacatgaaggtgctaagagtagaaaaagggtgagtagaacttaatgttgtaggtgtctacctagatttcacataaatgtgggagaagtgagaacagggaaatgaaatgggtcataacagtgccactatacactcatatacacatagcagacagttcacttttcagagcacagtggttttctgcttcaagatccagggcaaaggtcactttcttcttgtgcacctccaactcttaaaacattcctcagcactgcatcctttacattacactggaactgttttggtgtctgcttcctggactagactgcaagcctttccagggcaagggcagtatcttcctctgatactccagctctgaagctcaaccagttccgggtccagagcaggcatcagtgagtgtttgtcaagttaatgaaaggaaaattggggtaggggaggaaactaccaaacaagtgtgaaagtaggagagccgggtgcggtggctcatgcctgtaatcccagcactttgggaggtcaaggcgggcagatcacttgaggtcaggagttcgagaacagcctggccaacatggtgaaaccccatctctactaaaaatacaaaaatcagctgagcgtcatggcagcagcctgtaatcccagctactccggaggctgaggcagtatagaattgcttgaacccaggaggcggaggttgcagtgtgattgtgccactgcactccaacctgggtgacagagtgagactctctcaaaaaaaaaaaaaaaaaaaaggagagagggccccagaaatagtgtgtgtgtgtgtgtgtgtgtatacataaaatacttacaagtgtatataaaaatatatatacagatttatgtgtgtatatattatatatatacatttatgtgtgtgtatattatatatacgcatacacacacaccatttctggggccctgtctccttcttttttatatataatatacattatatatatatataaacttaggagacaggctagacttgtttttaaattggagaagtatataccagggtataggtctgtgtaccttccttagatatggtcaaaatttcaattttatccaattttatccagggcagtcagttcacaaatagcatattaaactttcgaagacaagtctgctcagcaagcaaacaaatcactggagaaatctgatttccctccagatacctgacaaggttagcagagaagcccagatagagttcttgtacatctgggttagcatcaagcagctggctctgtaaaggacagtgaagggagtcacacaagcaggtcaggacagctcttttccatccttctctttctttcatcccatcttacccagtctcaggtcaagtgcagagcaagctggggcgcttcggcccaggagtgacccctaacgtggctttgcatacactgttctcagcaactttgggtcaagtgtaggacacaaagaagctggagccaaagcaaacccagaccagtttctcaggctccttgtccccaccttagaataagggacccagcaagtagaggccagagagctaaaaacgggtaagccagggctcagtcatcaagaccaggaggaacccagggggtaaggagaaggccttccagagccctcggaagtgtggggcttgagagaagggaggcgagaggccctaggaggaaatctggagattgggacgatggggagtcaaggagtggtgaggggcactcggcttggcttaccgggatggcaaagactgtaggtctccgacaggacgagtatagggatgacagtcctcgaatgtgggaaaaactgcgctgtagtgaatgatgaaggaggaggaggaaaacccagggcctgagcgtgagcggcccttcaccctcagcgcgctgggggcccgattcttggggtgcccgcgcccggatggggagcacaagtctgggggtcccggggcgcagcacgcaaggaggcgggccagggggtgtgaccgtcggcgcttccgcagttccccgcgagccgcgcagcgggcgaggggctttctgcctccaaagcccccgactcaccttcctctctacccaccggctgggcaccggacacggcttcccacaggcggcgcgccctctcgcggtcaaagcgcaccccgtccggctcctggccctccagcaactccgagctgctgtaaggcccggccgctccgccgtccgcggcctgcaccgtggccggcgcgggatactccatcttccccgcaaaccctcaccggtagagagcctctcaggcgcctaggtatcgcgagatttggtgggtggtacttggcccagccaacaaatctcgcgaggtttgggcgctgcacccgcgctgccgtgcgggaccccgcgcttattttgctttgctacctctggtacctcagagcgtgtgccgtggattcggaaacctgtcgctgattccgcagcagtgacccccccctcccggagaggctcgtgtggttttggctcatggctctcaccttgctcacggtcagcccttgatacttttcatttcgttctcaaggtcccgttatgtgggagtgttttcgccatttcattcacagggaaactgaggcccagaacctaaaaatggttaactcaagagctcgctactagtaagtagtagtacagctaaggttccatattactgctaataatacatactatttgttgagttccaagtgccagctcccagctctgatcttccccgagactccggacctgtatacatccagttgcctcttccacagttcactcgaatggctaataggcttctccaatgtagctgtcagaccccaaattttatcttccaaccccagagctgctccttcccgtgtctttgggagccaccatctcttgcctaggttattgtagtagcaacctcactggcattcccagcacagcagttccaggaatcctcttatgacaagtcagatcatgacgcttaggttctcaaatcctccaacagcttcccatctcactcttagtaaaagccaaagtccggccaggcgcggtggctcacgcctgtaatcccagcactttgggaggctaagggggggcggatcacctgaggtccggagttcgagaccagcctgaccaacatggagaaaccccgtctctactaaaaatacaaaattagacgggtgtggtggcacatgcctgtaatcccatctactcggaggctgagccaggagaatggcttgaacccgggaggcagaggttgctgtgagccgagctggcgccattgcaccccagcctgggcaacaagagcgaaactccgactaaaaaaaaaaaaagccaaagtccttacttcgaccaacaaggccctgtacaatctgacttcccttaacctccctgatcctgat

SEQ ID NO: 1181 - DNA, 6000 bp, Homo sapiens
ctcaagtgatcctctcacctcagcctcctgagtagctgggaccaaaggcacacaccaccacacccagctaatttttttaattttgtagagatagggtcttgccatgttgcccatgatggtcttgaactcctggggtcaagcaatcctcccgcctcagccttccaaagtgctgggattacaggtatgagccactgtgcccagcctagtcattatctctgttatagcagttaaaacatactctctgatattacatactcagtagatacttttatgtctgtcactagattagacatactagagttagaaaaactagagtttaaggctgggcgtggtggctcacactggtaatcccagcactttgggaggccaaggtggtcagaccacatgagatcaggagttcaagatcagcctggccaacatggtaaaatcctgtctctaataaaaatacaaaaattagcttggtgtggtggtgcacacctgtagtcctagctacttaggaggctgaggcggagaattgtttgaacctgggaggcggaggttgcagtgagccgagatcgcaccactgcactccagcctgggtgacagagtgagactctgtctcaaaaaaaaaagaaaagaaagaaaaactagagttgaatctctttgagagcaagaactatatcttaagcactatagtttcgtttgcacatgcacacacatgcacatacagagtcagtatttaagcaactgaaatgtatgctgaacagtagccagttcccgtcccttagcaaagtcatttccctgggattgttcatctcccatggcaacaatacacagtaggatgtgttggaaaatggttctcattttccacaaggaggaaataaaaagccagcccaacaaatataaggcatcacctgcactgccaggtcccagcaaggagtccaggcctgggccattcctggaagcacttacacaaagacaaaatagaaaactggtgacaatgaaggctgttcagaccctcagcagggtagctcaggactctgcctccatggcacaggggatgaaccctgacagcactcattggagaataaatggacattattttgagcatgtaattggattggaggttgttttccaataatatgcaaagcaacttatatactccactcccagtatttgttacatagtattaaaaatatccttgtgggttctgcgacttcgacaaaaatcccctgtatcccttggattatccctgaataacttatgctatatgcaagtgtaagtaactagaactcttaagataaataagtagtttgtgaccatcctggctaacatagtgagaccccgtctctaaaagtaaataaataaataaaaagagaataaataatgtgcagtcactgacttttaggctggtcatctggttttggcaaaaggacatagatttgcaatctaaggaccagtgttcaagcatgggctcgtacctaactagctgtgtgatcttcacaaaacctttacctttcctagtctgtttctttatcatcacttatgaagaaatccctcacagaaaccaccctgaggattaaatgctataatgtaggtgctttgcaaactgtaaagcactgccctgggctgggtgtgtggttcacaccaggaatcccagcactttgggaggctgaggcaggaggatcgcttgagctcaggagtttgagaccagcctgggcaatatagggaaaccctgtctctacaaaaaaaaaattttttttaattagctgggcatgttggtgtccacttgtagtccttgctactcaggaggctgaggctggaggatcacttgagtgtgggagttcaaggttacagtgagctatgatcataccactgcactagtgagaccctgtctcggaaaaaaaaaaaaaaaaattgtaggctgggtgtggtagctcatgcctgtaatcccagcactttaggaggccaaggcgggcagatcacctgaggccaggagttcaagaccagcctggccaacaagatgaaaccccgtctctactaaaaatagaaaacatagctgggtatagtgatggatgtctgtaatcccagctactcgggaggctgaggcaggagaattgcttgaacccaggaggtggaggttgcagtgaactgagatggtgccactgcactccagcctgggcaacagagactccgtctataaaaaaaaaaaaattgtaaaacactggccaaacatcagtcacctactgtattggaagcttggaagctctagggcctgaggcctgacatagtgctggtgctcaatatttgtagtataaataaggaaatacttgtagtataaatgactaaattacaccaatgagctatatgatctcaagcaagaataattcatatctgtctctctttggcctcctctgatattactttcctccttgttcactgggctccagccatgctgtcgtttttcctgttcctccaacacatcatgctctctcctgcctcagggcctttgtacctgctgttctctctgctagaacactcttgcccagctctttgcatggctacgccttctcattaatcaggtcttagctcaaatgtcattttcccagaggcttctcctgatgccaccctgattaatgttcctaacacatcattcacctgagatgcaatcctgttttatcttctccttagcacttattattgttaactttttttgtttttgagatggagtctcgctctgttgcccaggatggagtgcagtggcacgatctcggctcactgcaagctccgcctgctgggttcacaccattctcctgcctcagcctcccgagtagctgggactacaggcgcccgccaccacgcccggctaatttttttgtatttttagtagaaacggagtttcaccatgttagccaggatggtcttgatcttctgacctcgtgatccacctgcctcggcctcccaaagtgctggattacaggcatgagccactgcgccaggcctactgttaactttcttattgtactctcctccactacaataaaaaatactttactacagcttccctgtcttgttcaccactatatttccatgctcaaaatatcatctagctcatagtaaattctccataagtatttgaaaaaatgaggttgaaataagctagtaatattaaaagcttcattcattaaacaaatgttttgtatatacctaggagggtccaggttctatttcaaagtgctggagattcaggtgcaatgacaagagacaaaaggctacgcaaggtggcatgtgcctgtaatctcagcattttgggagcccgaggcaggcagattatgagatcaggagtttgagatcagcctagctaacatagtgaaaccccgtctctaccaaaaatataaaaattagctgggtgccgtggcatgtgcctgtaatcccagctactcaggaggctgaggctggagaattgcttgaacccgggagacggaagctgcagtgagccgagatcgcgtcactgcactccaacctggcgacagagcaaaactctgcctcaaaaacaatttaaaaaaagaaagaaaagaaaagagacaaaaatccctgccttcctggggcttgccttctagtcgggagacagacaataagcaagataaaaggtaaaatataaaagaaataaagcaggaaagaaggacatgaagtgtgtgtggaaaagtaacattttagatgggatagccagacaaggtattttagatagagtagccagagaaggaagtgggagactgagccatgaagatatatgagagaaattcaccccaggaggcctggataactgggacaggaattaaggagttggggactgagtaacacatcaggatcagggaggttaagggaagtcagattgtacagggccttgttggtcgaagtaaggactttggctttttttttttttagtcggagtttcgctcttgttgcccaggctggggtgcaatggcgccagctcggctcacagcaacctctgcctcccgggttcaagccattctcctggctcagcctccgagtagatgggattacaggcatgtgccaccacacccgtctaattttgtatttttagtagagacggggtttctccatgttggtcaggctggtctcgaactccggacctcaggtgatccgcccccccttagcctcccaaagtgctgggattacaggcgtgagccaccgcgcctggccggactttggcttttactaagagtgagatgggaagctgttggaggatttgagaacctaagcgtcatgatctgacttgtcataagaggattcctggaactgctgtgctgggaatgccagtgaggttgctactacaataacctaggcaagagatggtggctcccaaagacacgggaaggagcagctctggggttggaagataaaatttggggtctgacagctacattggagaagcctattagccattcgagtgaactgtggaagaggcaactggatgtatacaggtccggagtctcggggaagatcagagctgggagctggcacttggaactcaacaaatagtatgtattattagcagtaatatggaaccttagctgtactactacttactagtagcgagctcttgagttaaccatttttaggttctgggcctcagtttccctgtgaatgaaatggcgaaaacactcccacataacgggaccttgagaacgaaatgaaaagtatcaagggctgaccgtgagcaaggtgagagccatgagccaaaaccacacgagcctctccgggaggggggggtcactgctgcggaatcagcgacaggtttccgaatccacggcacacgctctgaggtaccagaggtagcaaagcaaaataagcgcggggtcccgcacggcagcgcgggtgcagcgcccaaacctcgcgagatttgttggctgggccaagtaccacccaccaaatctcgcgatacctaggcgcctgagaggctctctaccggtgagggtttgcggggaagatggagtatcccgcgccggccacggtgcaggccgcggacggcggagcggccgggccttacagcagctcggagttgctggagggccaggagccggacggggtgcgctttgaccgcgagagggcgcgccgcctgtgggaagccgtgtccggtgcccagccggtgggtagagaggaaggtgagtcgggggctttggaggcagaaagcccctcgcccgctgcgcggctcgcggggaactgcggaagcgccgacggtcacaccccctggcccgcctccttgcgtgctgcgccccgggacccccagacttgtgctccccatccgggcgcgggcaccccaagaatcgggcccccagcgcgctgagggtgaagggccgctcacgctcaggccctgggttttcctcctcctccttcatcattcactacagcgcagtttttcccacattcgaggactgtcatccctatactcgtcctgtcggagacctacagtctttgccatcccggtaagccaagccgagtgcccctcaccactccttgactccccatcgtcccaatctccagatttcctcctagggcctctcgcctcccttctctcaagccccacacttccgagggctctggaaggccttctccttaccccctgggttcctcctggtcttgatgactgagccctggcttacccgtttttagctctctggcctctacttgctgggtcccttattctaaggtggggacaaggagcctgagaaactggtctgggtttgctttggctccagcttctttgtgtcctacacttgacccaaagttgctgagaacagtgtatgcaaagccacgttaggggtcactcctgggccgaagcgccccagcttgctctgcacttgacctgagactgggtaagatgggatgaaagaaagagaaggatggaaaagagctgtcctgacctgcttgtgtgactcccttcactgtcctttacagagccagctgcttgatgctaacccagatgtacaagaactctat

SEQ ID NO: 1182 - DNA, 6000 bp, Homo sapiens
tccctggcttctgtctgcatcttcacagcaatggcaggctacagcctccaaaggtcaaggccccatctcctcccgcagccactcacctgtaggcctctgttctattactcctccctgggccctgctgcccatgctcctgaaggtccccttcctggactggcatctcctaaggcataaccatcagggtcttaaccagctgatttcaaaagtgcccaggtagccatcagacccatggggctgccctcacccctgatgttatcagtccttgtgtcaagtcccacttcctgccctgggctcctcagtgtaggctaccaaggtacttcccagctgaagcagtataagaaggggccagccctgagtgaacatcgtgggtcatttaggcatggaggagttgatgggggctacccaaagcagggcaagctccatgaggatattggtagccacagtgcctcctagaggaagagacctgggtgccagatggcattggcatcccctcccagccacccacacaggtccttttgtctgaaacaatgatgtaccagatgatgatctggactgggaacagacaactggagaaggcactgggcctggaaccctattgatgaagagaagggcagctagcaggcagaccttgggctgggggctgagtggctctgcagtttcatatctcaaccctcagctgtgtccctggggtcaggccttttccggctggcaaccacacagctgtcctggagactggaaggctggggcaggcagactgagctcacaaacaactcacttcccccatgatggccccacctgtctttctcctctttccagtgccaggccagctcctctctgggcctaagcagcaaacttcctggaccctcagctccccaggggcagctcagagagcctgcagccaggacagccttcagagctggggctccctgtgacccttgtgctgccccagagtccagactgtcttctttacactcactttagtcctcctctcctctgaaggggttgggctcagtcagccccctttgccaaactgagatgcccacaagccccagaagtatcttccagatccaaggtggcctcctgcctcttctccacctccatgggaaccaggagtagcaggaaccccaggcacttcatctgttatccctactgagagaaaagagatcgcatttcctcccacaagcccagttctgtcattcaagaaatcaaatgcaactgtctccttccactgcctcctcttgaccctttttcacctggtctggcctcttttccaagatagaagatgcccctctccccaccccctagtaagcgctctcctttgagcctcttcaccctcccccgggctgtgcacctacagtcagaggcaggagcacagctgcacagctggcctcccagcccctgctgatggacagcaagtgccaaaggctggatctactcaaggattgtcccccaccttgtcaggatcctgggactggggctctgtctcccaacccgttaacctgcatcctctgctacaggtgatccagggaatcttcaacattttcagcccagggaacaaaaatagcagccagctgtttctgctaccagagacccatgggtacccaagtggcatggggaggctggagcatggctcattgcttactgtgattctgctctttttttctttctcaggccctgcccaggctgagctgcttcagggcgtcctgaggccctgactgccagctgaaggcgtataatttttccctccgtgtgccccacctacccgtccaagaccctctgtgctccccaccatcctggaccaaccaaaagctgaacggatgccacactgtgctggggccccttgacctcagcagagccgcttcctggtgctacgcagcctccacactcagagcccgtggactgggctggcctaagggccagggctgatggtactgctggcccaacactgctctctttgtgtttggtttttttgtttttgtttttattttgtttttttccaattctttacttttgatactgtgaagatctttcgtgccgaaagataaagcaacatttggacacagagttggcatgttggtgatttgtgggtctgggcggggagggagttgagggtgtgctcagaagcatgggctctcccttagtcactaaccctagcatgcaccatgcatcagcagtttggtgctattgtcccattttacaggtgaggaaactaaagccgataggaaagtgactcagctcaacttagtctggctgattagcattgagcgcagactggtatgattatggcatctgtgcccttttctccttttgggaggtctctggtatgtgagcctggggcagccccttccccactctttcctgtttccctctttgcaagatgggtgagttggaggggttgaagatggtctctgtgcatctggatgtgagaagaggtctaggaaagaccctgaggccttcatggatctgtagcctgggccatcgaggcccctcacactgacttcacagtcaggggaagttgggggtaaattgagttttttataaattagatctgattttccagtgggggtgggacatgtagctgagggcttgagagttaagaggataatgaactcttctgtaaagtcaagcaaactacctcatcccccgaaatggatctggtttgtaaatttggattttaatacaatgagttttcccaaaatgcccctgacacacttgtgtccaaactccatgccccaaatttagttttcgctcctaaaaccaactcgaggttatgtggggagctaacagggtcactaagagccatgtatttgggtgttgtgagcaggaccagaaaccatgtcctccatccctcccaggttgagacccaccatgggactggcagtaagcaccagcttattttttttatagagatggggtcttgctatgttgtccaagctggtcttgaactcctggcttcaagcgatcctcctgccttggcctcccagagagctgggattacaggaatgagccactgtgcccagcctaagctttctttactaaagaagacttcatgaattcctgtgtatccttcacatcccagctaagaggccattgtactgtgaaaactatgacacttcgaaaagcggtaccttgtcttaggatctttctctttaagaccagttatctgtctatatttctagtctcaatctacataagctcctcgcacaccaggtatgtgtcttgattatcatctgcttgagcgcagtgccagcgcccagcacacactcttgaaggcaagaaagcacagagctgaccaagtcattccttagaagtctctaataaagttgaaaccacttactctgacagtcacagcaggcatgctctggtcgcaatctccttttctggccttaggtctggcttccccatcccacccttgccgcaatgctgttgcctagtgaatctgtgtacttgcacatcgccagacctgtattcctgcagcgccctggcccaggacgcctctcctctcccggcctgagattgccatgtatttgggtgttgtgagcaggaccagaaaccatgtcctcctccatccctcccaggttgagacccaccatgggactggcagtaagcaccagcttattttttttatagagatggggtcttgctatgttgtccaagctggtcttgaactcctggcttcaagcgatcctcctgccttggcctcccagagagctgggattacaggaatgagccactgtgcccagcctaagctttctttactaaagaagacttcatgaattcctgtgtatccttcacatcccagctaagaggccattgtactgtgaaaactatgacacttcgaaaagcggtaccttgtcttaggatctttctctttaagaccagttatctgtctatatttctagtctcaatctacataagctcctcgcacaccaggtatgtgtcttgattatcatctgcttgagcgcagtgccagcgcccagcacacactcttgaaggcaagaaagcacagagctgaccaagtcattccttagaagtctctaataaagttgaaaccacttactctgacagtcacagcaggcatgctctggtcgcaatctccttttctggccttaggtctggcttccccatcccacccttgccgcaatgctgttgcctggtgaatctgtgtacttgcacatcgccagacctgtattcctgcagcgccctggcccaggacgcctctcctctcccggcctgagattgccacgcttccctggaagcgccccccaggcagctctgttagagcatttacagtaataaccgtttacatttatacagggcctcccacttcaaaaccactgccatccgtatctgatgcgtgccccaccagtgaacgtatgtgtcacacaggcgcagtcagggaggcagggtgtgtcgagcggtttatcccgcaaccccggcgtccccggcagggatgaaagcgcagggcccacgcgaactcggcccgcagctcccggccctagaggacgcactgtccgccggcaggggcgtgcccaagacgccatgctctgggagaggttgggcacctggcaggccgccccgactccggatcagctgtctccgctgcgtacgtcttcctcttccaatgggcttggattgagccttctagcgcatattccaagtcctccaatgtcccacaatgccttgcagccggtttcgccctcggtcctggcaactgtcgcgtaaccacccatgaaagcgtccatgcctcgccgtgcgatagtatctccggaacaaatttgtccctctgcgcgatccggaactccgaggtcgttcctacgcgccgtcgttcgcctcttcacatcggattgggtctcacgcaaggatgaggcggggtttcgccgtggcgcgcatgcgtgcagcaaagaatggaggagtcggaacccgaacggaaggtaggagagaggcgagaccccgcgcgtgtgggagcgggcgtgaagaggggagcaggccgtgcctgactggcgtgtgcttgcagcgggctcgcaccgacgaggtgcctgccggaggaagccgctccgaggcggaagatgaggacgacgaggactacgtgccctatgtgccgttacggcagcgccggcagctactggtgaggggcacgcgtccggggagggatggggccgtgaccgcggggtcgcagggggcgggcgtggcctcggcctccgtggggaggagggcagtctgaggagtgagcttcagtacaccagggcgcggcccccagacaaacgagggaccgacggcttgatctgaggggtagggcagctttgcgcctcgggcacaggatcctcgccccaaagccaggatcctgacgctgaccttgtggactccatgcccatcctatctgtggatcccgggtggaacctcagctccagaagctgctgcagcgaagacgcaagggagctgcggaggaagagcagcaggacagcggtagtgaaccccggggagatgaggacgacatcccgctaggccctcagtccaacgtcagcctcctggatcagcaccagcaccttaaagagaaggctgaaggtgggctgggcagcactgcctgggcgagaaagaagaagctgagcctggtacaccgttttggtatctgtctgacatcttccacttcttttctcagcgcgcaaagagtctgccaaggagaagcagctgaaggaagaagagaagatcctggagagtgttgccgagggccgaggtatggttgtagccaggatagtgagaaggtggactgagtcttctcctcccagccccaggcatgttatatctcaagggatctggcttctcagaagcaggagccagccctgagccatgtctctctcttcagcattgatgtcagtgaaggagatggctaagggcattacgtatgatgaccccatcaaaaccaggtatgtctgtacagtctgcagttgcccttgcttaggatggtacatgcagggatgctcccaggccagctattcc

SEQ ID NO: 1183 - DNA, 6000 bp, Homo sapiens
aggttttatgcaaatactacaccatttttatataagggatttgtgcatctgcagagtttggtatctgggtaactaatccccagcagattcagagggacgactgtacttaagggaatgacggaagccagcctagcagagctagagaatcaaacaccagatgaggaggaactggaatcccaaggcagtttcactgtcttcatacatagttccctgggcccaatccagaagcccccaagccagcaaagctcctatgcctgctaaaccctagcacctgagagccaaagaggttttgtagagaacctggtctcttagtgatggggacatggtaccttaggagtccagtgagcaaaagaatgaacctctgattgtgcttctcatgtgtcccccaaacccaacaggttctgtttggattctgcaaagcagactcgtcagaaagttgctgtgaactggaccaacttcagcctcaagaaaaccactcctagcacagctcagtgaggtacagagaccccaagagttacatccactgcctctccctgtgcttggccaccctctctgtacgctcaccagaccattctgtgctctggggcacagggagttggacttggggcatgggatccctggcttctgtctgcatcttcacagcaatggcaggctacagcctccaaaggtcaaggccccatctcctcccgcagccactcacctgtaggcctctgttctattactcctccctgggccctgctgcccatgctcctgaaggtccccttcctggactggcatctcctaaggcataaccatcagggtcttaaccagctgatttcaaaagtgcccaggtagccatcagacccatggggctgccctcacccctgatgttatcagtccttgtgtcaagtcccacttcctgccctgggctcctcagtgtaggctaccaaggtacttcccagctgaagcagtataagaaggggccagccctgagtgaacatcgtgggtcatttaggcatggaggagttgatgggggctacccaaagcagggcaagctccatgaggatattggtagccacagtgcctcctagaggaagagacctgggtgccagatggcattggcatcccctcccagccacccacacaggtccttttgtctgaaacaatgatgtaccagatgatgatctggactgggaacagacaactggagaaggcactgggcctggaaccctattgatgaagagaagggcagctagcaggcagaccttgggctgggggctgagtggctctgcagtttcatatctcaaccctcagctgtgtccctggggtcaggccttttccggctggcaaccacacagctgtcctggagactggaaggctggggcaggcagactgagctcacaaacaactcacttcccccatgatggccccacctgtctttctcctctttccagtgccaggccagctcctctctgggcctaagcagcaaacttcctggaccctcagctccccaggggcagctcagagagcctgcagccaggacagccttcagagctggggctccctgtgacccttgtgctgccccagagtccagactgtcttctttacactcactttagtcctcctctcctctgaaggggttgggctcagtcagccccctttgccaaactgagatgcccacaagccccagaagtatcttccagatccaaggtggcctcctgcctcttctccacctccatgggaaccaggagtagcaggaaccccaggcacttcatctgttatccctactgagagaaaagagatcgcatttcctcccacaagcccagttctgtcattcaagaaatcaaatgcaactgtctccttccactgcctcctcttgaccctttttcacctggtctggcctcttttccaagatagaagatgcccctctccccaccccctagtaagcgctctcctttgagcctcttcaccctcccccgggctgtgcacctacagtcagaggcaggagcacagctgcacagctggcctcccagcccctgctgatggacagcaagtgccaaaggctggatctactcaaggattgtcccccaccttgtcaggatcctgggactggggctctgtctcccaacccgttaacctgcatcctctgctacaggtgatccagggaatcttcaacattttcagcccagggaacaaaaatagcagccagctgtttctgctaccagagacccatgggtacccaagtggcatggggaggctggagcatggctcattgcttactgtgattctgctctttttttctttctcaggccctgcccaggctgagctgcttcagggcgtcctgaggccctgactgccagctgaaggcgtataatttttccctccgtgtgccccacctacccgtccaagaccctctgtgctccccaccatcctggaccaaccaaaagctgaacggatgccacactgtgctggggccccttgacctcagcagagccgcttcctggtgctacgcagcctccacactcagagcccgtggactgggctggcctaagggccagggctgatggtactgctggcccaacactgctctctttgtgtttggtttttttgtttttgtttttattttgtttttttccaattctttacttttgatactgtgaagatctttcgtgccgaaagataaagcaacatttggacacagagttggcatgttggtgatttgtgggtctgggcggggagggagttgagggtgtgctcagaagcatgggctctcccttagtcactaaccctagcatgcaccatgcatcagcagtttggtgctattgtcccattttacaggtgaggaaactaaagccgataggaaagtgactcagctcaacttagtctggctgattagcattgagcgcagactggtatgattatggcatctgtgcccttttctccttttgggaggtctctggtatgtgagcctggggcagccccttccccactctttcctgtttccctctttgcaagatgggtgagttggaggggttgaagatggtctctgtgcatctggatgtgagaagaggtctaggaaagaccctgaggccttcatggatctgtagcctgggccatcgaggcccctcacactgacttcacagtcaggggaagttgggggtaaattgagttttttataaattagatctgattttccagtgggggtgggacatgtagctgagggcttgagagttaagaggataatgaactcttctgtaaagtcaagcaaactacctcatcccccgaaatggatctggtttgtaaatttggattttaatacaatgagttttcccaaaatgcccctgacacacttgtgtccaaactccatgccccaaatttagttttcgctcctaaaaccaactcgaggttatgtggggagctaacagggtcactaagagccatgtatttgggtgttgtgagcaggaccagaaaccatgtcctccatccctcccaggttgagacccaccatgggactggcagtaagcaccagcttattttttttatagagatggggtcttgctatgttgtccaagctggtcttgaactcctggcttcaagcgatcctcctgccttggcctcccagagagctgggattacaggaatgagccactgtgcccagcctaagctttctttactaaagaagacttcatgaattcctgtgtatccttcacatcccagctaagaggccattgtactgtgaaaactatgacacttcgaaaagcggtaccttgtcttaggatctttctctttaagaccagttatctgtctatatttctagtctcaatctacataagctcctcgcacaccaggtatgtgtcttgattatcatctgcttgagcgcagtgccagcgcccagcacacactcttgaaggcaagaaagcacagagctgaccaagtcattccttagaagtctctaataaagttgaaaccacttactctgacagtcacagcaggcatgctctggtcgcaatctccttttctggccttaggtctggcttccccatcccacccttgccgcaatgctgttgcctagtgaatctgtgtacttgcacatcgccagacctgtattcctgcagcgccctggcccaggacgcctctcctctcccggcctgagattgccatgtatttgggtgttgtgagcaggaccagaaaccatgtcctcctccatccctcccaggttgagacccaccatgggactggcagtaagcaccagcttattttttttatagagatggggtcttgctatgttgtccaagctggtcttgaactcctggcttcaagcgatcctcctgccttggcctcccagagagctgggattacaggaatgagccactgtgcccagcctaagctttctttactaaagaagacttcatgaattcctgtgtatccttcacatcccagctaagaggccattgtactgtgaaaactatgacacttcgaaaagcggtaccttgtcttaggatctttctctttaagaccagttatctgtctatatttctagtctcaatctacataagctcctcgcacaccaggtatgtgtcttgattatcatctgcttgagcgcagtgccagcgcccagcacacactcttgaaggcaagaaagcacagagctgaccaagtcattccttagaagtctctaataaagttgaaaccacttactctgacagtcacagcaggcatgctctggtcgcaatctccttttctggccttaggtctggcttccccatcccacccttgccgcaatgctgttgcctggtgaatctgtgtacttgcacatcgccagacctgtattcctgcagcgccctggcccaggacgcctctcctctcccggcctgagattgccacgcttccctggaagcgccccccaggcagctctgttagagcatttacagtaataaccgtttacatttatacagggcctcccacttcaaaaccactgccatccgtatctgatgcgtgccccaccagtgaacgtatgtgtcacacaggcgcagtcagggaggcagggtgtgtcgagcggtttatcccgcaaccccggcgtccccggcagggatgaaagcgcagggcccacgcgaactcggcccgcagctcccggccctagaggacgcactgtccgccggcaggggcgtgcccaagacgccatgctctgggagaggttgggcacctggcaggccgccccgactccggatcagctgtctccgctgcgtacgtcttcctcttccaatgggcttggattgagccttctagcgcatattccaagtcctccaatgtcccacaatgccttgcagccggtttcgccctcggtcctggcaactgtcgcgtaaccacccatgaaagcgtccatgcctcgccgtgcgatagtatctccggaacaaatttgtccctctgcgcgatccggaactccgaggtcgttcctacgcgccgtcgttcgcctcttcacatcggattgggtctcacgcaaggatgaggcggggtttcgccgtggcgcgcatgcgtgcagcaaagaatggaggagtcggaacccgaacggaaggtaggagagaggcgagaccccgcgcgtgtgggagcgggcgtgaagaggggagcaggccgtgcctgactggcgtgtgcttgcagcgggctcgcaccgacgaggtgcctgccggaggaagccgctccgaggcggaagatgaggacgacgaggactacgtgccctatgtgccgttacggcagcgccggcagctactggtgaggggcacgcgtccggggagggatggggccgtgaccgcggggtcgcagggggcgggcgtggcctcggcctccgtggggaggagggcagtctgaggagtgagcttcagtacaccagggcgcggcccccagacaaacgagggaccgacggcttgatctgaggggtagggcagctttgcgcctcgggcacaggatcctcgccccaaagccaggatcctgacgctgaccttgtggactccatgcccatcctatctg

SEQ ID NO: 1184 - DNA, 6000 bp, Homo sapiens
agtgtcagtcaggtacgagtgcacctcgcgccgcacgctcgggatgcccatcaccaccgacactatgggggacggaggcccgacgctggaaagggtgcgggggccacccgtccccccaccccgtgctcctccctgtctgcgcccatacctccggtgcggccctggcccacgcgcaccgcgggctgcagactgctctccttggccagcaggtgtggcaggtgatggaagacggtgggcaggtgcagcacgtgccggtgtgagccgttccacggcttcaatcgggggtcctctgggtgggtcgggaaggatcgggactgagaccagggaacctacaaccagcccgcccccgccttttccccctcccgccccagacctcacctgttaggcggccccaggtgcgattgccgtctccgtctcgcagcgcctgcctttctgacacggccctcttgatctcgtccagcaccaggttgagctccttggagcgcttgaggctctcctgctcagctgcgtgcaaccgatcgcgcagcgccaggaactcccgctggtaaacgtccacaacgtcgcctgcaggtggtaggcaagccgtcacgagggggcggtctagagccaccctacgggcccctccagtgtgccagcgcacacatctgggtgtccacctctgcaatagctcattgacatctgttcttgtgcctgccacacgtgacatagctggggtcactctaaaattacactgacactaatgctcatggggagaaaaccaggggaattagccctcttccagtactctcccccaccgggggttattttatcctctgagaaggcatctgaagtggaaatacgatttccagacctaggtaggtggatcctaagcaagggctggaacagcctcagactgaatccgctccatccgttggcctccaaagcccactcttgctttttgcagcacacgctccctccagcgggtgggctacccaaggtcctggtgctagctcttcactgtccttgtagcggtcgctggttgctcaccctgcactggattcttagcctcacgatggccccggggggtggctgctgcagttccaggagcccacctcacttcattgctcaggtgagcaaatgaggttgagaaaccggccctggggctgctcaaggacagtcaacagcagcgaggggactagctctgaacgccctggtgcctgtgtctctggagacctgtgctgcgcctggggcaccctgaagggtccgcatgccaccccagggggcccctgtcagaacctccagctgggcccaggcatgagggctgtaggtggatggggcagcacagaggtggggctgcccgacagtagagaggcaccaccagtctggcagggaccagtgagcaagaatgagatcaacaacctcctggtggctcggtgcccacagtccacgcagcaggacgctccaggcctctgccaggcgagtctctgaaaacctatgtggcctacaaggccttctgtttccaagtctccaagtttaagaagcctgaccgaactccctctacactcaggcagctcttccattccttgatccttggtggcttcacagaccccagagttgcgtgggatggcctcaccccaccagcagccctgtgcatgatcaaggtcatgatcaggcaaagttcagtcacctcagggcacacccctttccgaaacgggcaggaggtcgaagtgccaagtgaccagggaagaggaaggggtggacctgggcaggagggaaaggtttaaggagcagggagccaggtagatcttccctgaggcatctcttacccaagaagccagcccccaccctccacaccctgcctctctggggctaaaggctgaggcaaagcggagcctctggacagcccctggcgggagggaaaggggagtcagattactggctctgccaggctccacgctgggctcaggggctcggttaccctggaaacctaaccccttgaatgcagagctggctatccccagggctcacccattgctgggtgacaccaggtgtaggcagcactcgcccacagggatgggactggaggtgcagaggcctagagagccatcaggaatgggttcagagccacctgcacctgcaggtgcgcctccctcctgcctagatgccagtccccgcttgcctacttacagccactgcccacccccacccccgagccccaccctggctttctctgtcccacacgactgcctcagatggacaggctgggtgggcagtggtgggtgatgctgcctgaatcaccctggcaacagcctgcgccttaccctcgcttccttcctaggggcctcccctctcccccgggtcctgtttaccaggagataaagggccccacgggctcccgcccacaccaacccttctgtcatttccctacacactgcaggccctggccctgggcagcctcccccgcctgccagctcctccacccgccttgccctcagcttctctgactgtgggtccaactctgtgactgcctccccatgggccaggccctatgccagggctctgccaagccatgctggcaccctataaccctcgggagctggggaggcagctcaggtgaggagagggaccagcctgggagcccctgccacactttcttgcctcaggaccacgttgttaagagcagcagcaatgaggcctggaggctgtgtcaccctcccctggaggcgagtcattaggacatcctggggcccacaaaccacagttccccctgcttccctcttggttggggaaagattaaagagccaagctggggcacaacctttgtgccttgtactcagggaaaagggacaggctcagaggggcataggcagatatcaggcccgttaacggtctgctgtcaccatgcatgtgtgtggcaggtgtctgcctcctctccagaccctgcaacctcctaggagtaagggtgtccatcattgctgaagtccaggcctggggaggcggacagcctgaaggctgggagcgctgcatggctgagaccccgggctgcccccaagggtctgcctccctgggcagatcctcagcaggtgcttgaccgagggccacagtttgagcgctggcagagctgctgcacgggctagataggaaattgggccccaaacccttctccagggtccattttgcgttggtctaagaggccgtcctgggcttgaccttgcgtttccaggatgatgcccacacctgctgcccttcctctctggttccctgcccacctccttccttccctgcagattccacttcctgggtccttccctcaagttcctggacccccgctggctgcaaagtggaggccaggttccaatctggcctccgactggctacgtctggtttcaccaggggtttaagacagattttctacatgtgacaacgagatgggttcacataagagcccagattcccagcttctcttgaggcctccaaagacctggtactactgggtcaccacagaaacagtgacagcccctcgacaagggaggcctatgtcaccccatactcatacctcacaggatccttaggcttctatcccctaggggctgggctcgtgaatctaagtgctccccttctttgctctcctgttccccaggccctcagagagccagcctcctggatgccccccagacacagtgggtgccatggagccagtgcctctccctcactctgctgtcctggagcctggctccctgtggtaagccaggcttgcagaggtggctcctgacatcaatccgcgggcatgtggctgctgcgggaggcacacactggctcaggacaaagggcaagggctcacggctctacccacgactcaaagagcatgccccagcccttcagatatggccccacctaggccttcatgccagtgtgcttttatagtcaccctgccaaggacccagaatgtccttccccaggtgacacaccctacctacagagaattctgccccagccatgcctgcccttgataatataccccgccagcacggcctctgcccagccatccctcccgtgtcaggcaggctccccgcagagtccctgggtgatgcctctctggccctggagccccaaggccagcccaggcctctgctctggcagaacaagtgcggcaggcgggcgtgctggcagagctcggcgtgggtagatggagctcggagggtccggaagggtccaggttccctcgccctcctccgcagcctctctgggatggcgctccgggacagggaaacagggaagcaggtggcggggaggccgaggggcagctggactcagcccgcttaggcctccagcaggcaggcaggcaggaggccactctcccggaacctccaggccgggggaagagcgcctccgagggctcaggccctactcggccccaccatcgccaagaccggccagcggggcggcgcggggggatcggcccgcaccctccgcctgcaagagcgctgggcgcacgcggagggcgggggccagcccgggaagctcggggtgcggaggacgggctggggccgcacgggagcgcagggcagcaggggccgggctgcctcaggacgcctccctccctccctccctccctcccacaggccggatgctgccgacgcgttctgggcgccgaagggagtcccaggaccgggtgtcacgccggggtcgcccaggccggcgcggggcagcaggcagcagggtgggggggtgccctcgcgcctgtgtccctcacgccgccccagctcctgcccaggtggctgtggctggcgttccgggacctctgtgaccttgggtctctgcccctctccgagaaccccacgggtccccagctcagcgtcgggacagctgcgcccgcggagtccggtccggagcacccacgggcgcggcccgggcccgaggagaacgccgcggctccagcagcaaacaagtgggggagggtgggaggggcgtcctcgcgccgcccgggcggggaaggggcgcctgcgtcggcttccggccgccttccgcggccaccgccgggcccgctcccgccgccgacgcccaggtgcgccaggtgcgggccgggcgggggtcgcgctcacctttctggccgctgagtgccgcgtaccaggacagcgagaggaaggcgcacaggcagaagagcagcagcgtcaggaaggtgccattgcggagcctcatctcctcgggtgcgcggcgggcgcccgcggggccgaggctgcatggcccgggggaccggggccggggcgcaggggtcggaaggcggcggcggcggcggcaggggccccggccccgggtcggggaggggcggggggcccggggccgggcggggaccgggccagggagcgcgccggccgcccctcagggcgcaagctttgtgccctgtactcagggaagaggaacaggctcagaagggcagaggcaggtatcaggctcactgcagatatcaggggcgcgggacactggcggcctcgcctccgcggcagggccgggccgggccgggctgggctgggctgggcggcgagagccgcggcccggcctggatctggggcctggatctggggccgccgcggagtcgacggcgcagggcggggcggcccggatttaaaggggccgcagcaccgccgtcgccggcgccgcgagggggtggggtgggggccggcggccgggatcccgatcggctcccgcagccccgcgtgggctcgtgcgagtcggcctcaggtaaggctggagtgggagtgcaggtcgaccgcagccggggcggggggcgggcggcgggggcggcgctccgggaccccggtacccttctcagcaacatctcctccgcgcgcggaccccgaccccattcgcacgttctcggggctctttcccgggcgtgaggggctctgggtggcgcgggggactgggcggttgaagccgggagcgaccgctgccttcgctgccgcccagggcgcttccccgctcaggagcttcctctgggcctctggacggaggcgcgcaggg

SEQ ID NO: 1185 - DNA, 6000 bp, Homo sapiens
ccaagggggtggggtcacggtttcccctcccctccccctcagaagtccgaagataaataggcttagaaagagaggaaaaaaatttcttggtttgcatctcactcaccctttctcaagccccatgttgcacgccaaactgttgtaggactttctccttagttcagctaaaagccaggttcttgtgcagcggccatgagagattaatctcgcagacactttgaagagtgagaaaaatggaatttattgggcaagaaggaaaaaaagggaaacagggactctcagcaaagcgagagagagtcccgctagctggtttctcgcctcccagatagaatcccaagttccaccccgaacatgagaccaagctcctcccccctgcatagctcctccccctgcatagctcctccccctgcatgctcctccccctgcatagctcctccccctgcatagctcctccccctgcaaagctcctcccccctgcagagcttctgtggctctacccagttcttccagtgcttaggcaggtgtgggagtttctcctggacctctttttttttttgagacggagtctcgctctgtcgcccaggctggagtgcagtggtgcgatctcggctcactgaaagctccgcctcacaggttgaagctattctcctgcctcagcctcccgagtagctgggactacaggtgcccgccaccactcccggctaatttttagtagagacggggtttcaccgtgttagctaagatggtctcggtctcctgacctcgtgatccgcccgtctcggcctcccaaagcgggacccctttagacttggctgtctcacttggattacaggcgtaggccacagtgcccaactgagtcactttttttttttccttaaaaaaattgttggcccgcagacacatgaaaaaatgctcagcatcactggccatcagagaaatgcaaatcaaaaccacattgagatagcatctcacaccagttagaatgccaatcattaaaaacccaggaaacaacaggtgctggagaggatgtggagaaataggaatgcttttacactgttggtgggactgtaaactagttcaaccattgtggaagtcagtgtagcgattcctcagggatctagaactagaaatgccatttgacccagcaatcccattactgggtatatacccaaaggattataaatcatgctgctataaagacacatgcacacgtatgtttattgcggcactattcacaatagcaaagacttggaaccaacccaaatgtccatcaatgatagactggattaagaaaatgtggcacatatacaccatggaatactatgcagccataaaaaagaatgagttcatgtcctttgtagggacacggatgaagctggaaaccattctgagcaaactatcacaaggacagaaaaccaaacaccgcatgttctcactcataggtgggaattgaacaatgagaacacttggacacagggtggggaacgtcacacactggggcctgtcgtggggtgggggaagaggggagggatagcattaggagatatatctaatgtaaatgatgagttaatgggtgcagcataccaaccgggcacatgtatacatatgtaacaaacctgcaaattgtgcacatgtaccctagaacttaaagtaaaataaaaaattaaaaaataaaaatttaaatttaaattaaaaaaaaattgttggcccggtgcgttggctcacgcctgtaatcccagcactctgaggggccaaagtgagcagatcacctgaggtcaggagttggagaccagcctggacaacatggtgaaaccccatctctactaaaaatacaaaaattaggctgggcgccgccggtggctcacacctgtaatcccagcactttgggaggctgaggcaggtggatcacctgaggtcaggagttcgaaaccagcctgaccaacatggtgaaaccccatctctactaaaaatataaaaattagccgggtgtggtagcacacgcctgtaatctcagctactcaggtggctgaggcaggagaatcgcttgaacccgggaagcggaggttgcagtgagcccagatcactcaactgcactccagcctgggccagggagcaagactccgtttcaaaaaaaaaaaaaaaaaaaaaaaagggccaggcgcagtggctcatgcctgtaatcccagcactttgggaggctgaagcaggtggatcacgaggtcaggagtttgagaccagcctgaccaacatggtgacaccctatctctactaaaaatacaaaaaaattagccgggcttggtgccgtgcacctgtaatcccagctactcaggaggatgaggcagcagaattgcttgtatccaggaggtggaagttgcagtaagccgagattctgccatcgcactccagcctgggcgacatagcgagactctgtctcaaaaaaaaaaaaaaaaaaaaaaaaaaaaattagccaggcgtggtggcgggcgcctataatcccagctactcgggaggctgaggcaggagaatcgcttgaacctgggaggctgaggttgcagtgagccgagatggtgccactgcactccaacctgggcgacagaccgagactccgtcttaaaaaaaaaaaaaaaaaaaaaggccggggtggtgactcacgcctgtaatcccagcattttgggaggccgaggcaggtagatcacgaggtcaggagatcgagaccatcctggctaacacggtgaaaccccgtctctaataaaaatacaaaaaatcagccgagcgtggtggtgggtgcctgtagtcccagctactcgggaggctgaggcaggagaatggggtgaaggtgggaggcggagcttgcagtgagcccagatagtgccactgcactccagcctgggcgacagagcaagactccgtctcaaaaaaaaaaataagataaactaaaaataaataaataaataaataaaattacaaaaaaatccaaaaaaatttgttttaaaatttttaatgagatgaggtgtcactatgttgcccaggctggtcttgaactgatgagctcaaatgatcctcctgccttagcctctcagagtgctgggattacaggcatgagccaccacacccggctaattttttgtattttttagtagagacggggtttcaccgtgttagccaggatggtctcgatctcctgacctcgtgattcgcctgcctcggcctcacaaagtgctgggattacaggcatgagccaccgcgcccggcctctgggtgactaagttttaacattaagtaactcattaacaatttctaaggccctttatgtcacaacctaagtgaaaagccattatcctttgccacaaatagaagacacctgtgaaaacacgacagtttcctctagaaggctcctataagtcccagtctctagttcggaaagttccaggagcactgagtggggagccctctcctttaacagggggcctcaggatccagcccacttcaacctctggctcggccacccccttcttggcatcaatctctctgtccagacccctcgaagctcccgattccactcagccccaggtgtgggccggggctgaactaggaagacaaagccgcattcaatctcagtctgagtccagcccctcgggcctcccccgggcgggtggggcagaggtccctgcagcctccaccaggaaccgggcccctaggtctgggaggtccaagccggcagcgggccaggcgctgcccaaagcctgcccagaggcggcgctgggccagtccctttataatttgcgcccttcctggttccacagaggattgaggaacgcctgaaattagaacgcaaatgggccgtgcgtggtggctcacgcctgtaatcccagcactttgtgaggccgaggcgggcggatcacaaggtcaggagttcgagaccagcctggccaatacggtgaaacctcgtgtctactaaaaatacaaaaattagccaggtgtggtggcggccgcctgtagtcccagctactcgggaggctggggcaggggaatcgcttgaacccgggaggcggagggtgcagtgagccgagattgcgccactgcactgcagcctgggcaacagagcgagactccgtctcaaaaacaaacaaacaaaaaacaacaaaaaacaacaacaacaaaaaaacaatgaaggcgtgggcccccatcaatatcgggctgggctgggcggggcgaggtggcccctacaccaccgggggcagggcccgttgctcccgttagcggcgctctcgggccgcccctgccccgggaagccggtacggttctgggctggtcactgctctgcatccacgagcatcggccctgataccgcctagaaaggcccatcgttcccgcctcccgggcccctgcgcgcctccgtccagaggcccagaggaagctcctgagcggggaagcgccctgggcggcagcgaaggcagcggtcgctcccggcttcaaccgcccagtcccccgcgccacccagagcccctcacgcccgggaaagagccccgagaacgtgcgaatggggtcggggtccgcgcgcggaggagatgttgctgagaagggtaccggggtcccggagcgccgcccccgccgcccgccccccgccccggctgcggtcgacctgcactcccactccagccttacctgaggccgactcgcacgagcccacgcggggctgcgggagccgatcgggatcccggccgccggcccccaccccaccccctcgcggcgccggcgacggcggtgctgcggcccctttaaatccgggccgccccgccctgcgccgtcgactccgcggcggccccagatccaggccccagatccaggccgggccgcggctctcgccgcccagcccagcccagcccggcccggcccggccctgccgcggaggcgaggccgccagtgtcccgcgcccctgatatctgcagtgagcctgatacctgcctctgcccttctgagcctgttcctcttccctgagtacagggcacaaagcttgcgccctgaggggcggccggcgcgctccctggcccggtccccgcccggccccgggccccccgcccctccccgacccggggccggggcccctgccgccgccgccgccgccttccgacccctgcgccccggccccggtcccccgggccatgcagcctcggccccgcgggcgcccgccgcgcacccgaggagatgaggctccgcaatggcaccttcctgacgctgctgctcttctgcctgtgcgccttcctctcgctgtcctggtacgcggcactcagcggccagaaaggtgagcgcgacccccgcccggcccgcacctggcgcacctgggcgtcggcggcgggagcgggcccggcggtggccgcggaaggcggccggaagccgacgcaggcgccccttccccgcccgggcggcgcgaggacgcccctcccaccctcccccacttgtttgctgctggagccgcggcgttctcctcgggcccgggccgcgcccgtgggtgctccggaccggactccgcgggcgcagctgtcccgacgctgagctggggacccgtggggttctcggagaggggcagagacccaaggtcacagaggtcccggaacgccagccacagccacctgggcaggagctggggcggcgtgagggacacaggcgcgagggcacccccccaccctgctgcctgctgccccgcgccggcctgggcgaccccggcgtgacacccggtcctgggactcccttcggcgcccagaacgcgtcggcagcatccggcctgtgggagggagggagggagggagggaggcgtcctgaggcagcccggcccctgctgccctgcgctcccgtgcggccccagcccgtcctccgcaccccgagcttcccgggctggcccccgccctccgcgtgcgcccagcgctcttgcaggcggagggtgcgggccgatccccccgcgccgccccgctggccggtcttggcgatggtggggccgagtag

SEQ ID NO: 1186 - DNA, 6000 bp, Homo sapiens
tggatcctaagcaagggctggaacagcctcagactgaatccgctccatccgttggcctccaaagcccactcttgctttttgcagcacacgctccctccagcgggtgggctacccaaggtcctggtgctagctcttcactgtccttgtagcggtcgctggttgctcaccctgcactggattcttagcctcacgatggccccggggggtggctgctgcagttccaggagcccacctcacttcattgctcaggtgagcaaatgaggttgagaaaccggccctggggctgctcaaggacagtcaacagcagcgaggggactagctctgaacgccctggtgcctgtgtctctggagacctgtgctgcgcctggggcaccctgaagggtccgcatgccaccccagggggcccctgtcagaacctccagctgggcccaggcatgagggctgtaggtggatggggcagcacagaggtggggctgcccgacagtagagaggcaccaccagtctggcagggaccagtgagcaagaatgagatcaacaacctcctggtggctcggtgcccacagtccacgcagcaggacgctccaggcctctgccaggcgagtctctgaaaacctatgtggcctacaaggccttctgtttccaagtctccaagtttaagaagcctgaccgaactccctctacactcaggcagctcttccattccttgatccttggtggcttcacagaccccagagttgcgtgggatggcctcaccccaccagcagccctgtgcatgatcaaggtcatgatcaggcaaagttcagtcacctcagggcacacccctttccgaaacgggcaggaggtcgaagtgccaagtgaccagggaagaggaaggggtggacctgggcaggagggaaaggtttaaggagcagggagccaggtagatcttccctgaggcatctcttacccaagaagccagcccccaccctccacaccctgcctctctggggctaaaggctgaggcaaagcggagcctctggacagcccctggcgggagggaaaggggagtcagattactggctctgccaggctccacgctgggctcaggggctcggttaccctggaaacctaaccccttgaatgcagagctggctatccccagggctcacccattgctgggtgacaccaggtgtaggcagcactcgcccacagggatgggactggaggtgcagaggcctagagagccatcaggaatgggttcagagccacctgcacctgcaggtgcgcctccctcctgcctagatgccagtccccgcttgcctacttacagccactgcccacccccacccccgagccccaccctggctttctctgtcccacacgactgcctcagatggacaggctgggtgggcagtggtgggtgatgctgcctgaatcaccctggcaacagcctgcgccttaccctcgcttccttcctaggggcctcccctctcccccgggtcctgtttaccaggagataaagggccccacgggctcccgcccacaccaacccttctgtcatttccctacacactgcaggccctggccctgggcagcctcccccgcctgccagctcctccacccgccttgccctcagcttctctgactgtgggtccaactctgtgactgcctccccatgggccaggccctatgccagggctctgccaagccatgctggcaccctataaccctcgggagctggggaggcagctcaggtgaggagagggaccagcctgggagcccctgccacactttcttgcctcaggaccacgttgttaagagcagcagcaatgaggcctggaggctgtgtcaccctcccctggaggcgagtcattaggacatcctggggcccacaaaccacagttccccctgcttccctcttggttggggaaagattaaagagccaagctggggcacaacctttgtgccttgtactcagggaaaagggacaggctcagaggggcataggcagatatcaggcccgttaacggtctgctgtcaccatgcatgtgtgtggcaggtgtctgcctcctctccagaccctgcaacctcctaggagtaagggtgtccatcattgctgaagtccaggcctggggaggcggacagcctgaaggctgggagcgctgcatggctgagaccccgggctgcccccaagggtctgcctccctgggcagatcctcagcaggtgcttgaccgagggccacagtttgagcgctggcagagctgctgcacgggctagataggaaattgggccccaaacccttctccagggtccattttgcgttggtctaagaggccgtcctgggcttgaccttgcgtttccaggatgatgcccacacctgctgcccttcctctctggttccctgcccacctccttccttccctgcagattccacttcctgggtccttccctcaagttcctggacccccgctggctgcaaagtggaggccaggttccaatctggcctccgactggctacgtctggtttcaccaggggtttaagacagattttctacatgtgacaacgagatgggttcacataagagcccagattcccagcttctcttgaggcctccaaagacctggtactactgggtcaccacagaaacagtgacagcccctcgacaagggaggcctatgtcaccccatactcatacctcacaggatccttaggcttctatcccctaggggctgggctcgtgaatctaagtgctccccttctttgctctcctgttccccaggccctcagagagccagcctcctggatgccccccagacacagtgggtgccatggagccagtgcctctccctcactctgctgtcctggagcctggctccctgtggtaagccaggcttgcagaggtggctcctgacatcaatccgcgggcatgtggctgctgcgggaggcacacactggctcaggacaaagggcaagggctcacggctctacccacgactcaaagagcatgccccagcccttcagatatggccccacctaggccttcatgccagtgtgcttttatagtcaccctgccaaggacccagaatgtccttccccaggtgacacaccctacctacagagaattctgccccagccatgcctgcccttgataatataccccgccagcacggcctctgcccagccatccctcccgtgtcaggcaggctccccgcagagtccctgggtgatgcctctctggccctggagccccaaggccagcccaggcctctgctctggcagaacaagtgcggcaggcgggcgtgctggcagagctcggcgtgggtagatggagctcggagggtccggaagggtccaggttccctcgccctcctccgcagcctctctgggatggcgctccgggacagggaaacagggaagcaggtggcggggaggccgaggggcagctggactcagcccgcttaggcctccagcaggcaggcaggcaggaggccactctcccggaacctccaggccgggggaagagcgcctccgagggctcaggccctactcggccccaccatcgccaagaccggccagcggggcggcgcggggggatcggcccgcaccctccgcctgcaagagcgctgggcgcacgcggagggcgggggccagcccgggaagctcggggtgcggaggacgggctggggccgcacgggagcgcagggcagcaggggccgggctgcctcaggacgcctccctccctccctccctccctcccacaggccggatgctgccgacgcgttctgggcgccgaagggagtcccaggaccgggtgtcacgccggggtcgcccaggccggcgcggggcagcaggcagcagggtgggggggtgccctcgcgcctgtgtccctcacgccgccccagctcctgcccaggtggctgtggctggcgttccgggacctctgtgaccttgggtctctgcccctctccgagaaccccacgggtccccagctcagcgtcgggacagctgcgcccgcggagtccggtccggagcacccacgggcgcggcccgggcccgaggagaacgccgcggctccagcagcaaacaagtgggggagggtgggaggggcgtcctcgcgccgcccgggcggggaaggggcgcctgcgtcggcttccggccgccttccgcggccaccgccgggcccgctcccgccgccgacgcccaggtgcgccaggtgcgggccgggcgggggtcgcgctcacctttctggccgctgagtgccgcgtaccaggacagcgagaggaaggcgcacaggcagaagagcagcagcgtcaggaaggtgccattgcggagcctcatctcctcgggtgcgcggcgggcgcccgcggggccgaggctgcatggcccgggggaccggggccggggcgcaggggtcggaaggcggcggcggcggcggcaggggccccggccccgggtcggggaggggcggggggcccggggccgggcggggaccgggccagggagcgcgccggccgcccctcagggcgcaagctttgtgccctgtactcagggaagaggaacaggctcagaagggcagaggcaggtatcaggctcactgcagatatcaggggcgcgggacactggcggcctcgcctccgcggcagggccgggccgggccgggctgggctgggctgggcggcgagagccgcggcccggcctggatctggggcctggatctggggccgccgcggagtcgacggcgcagggcggggcggcccggatttaaaggggccgcagcaccgccgtcgccggcgccgcgagggggtggggtgggggccggcggccgggatcccgatcggctcccgcagccccgcgtgggctcgtgcgagtcggcctcaggtaaggctggagtgggagtgcaggtcgaccgcagccggggcggggggcgggcggcgggggcggcgctccgggaccccggtacccttctcagcaacatctcctccgcgcgcggaccccgaccccattcgcacgttctcggggctctttcccgggcgtgaggggctctgggtggcgcgggggactgggcggttgaagccgggagcgaccgctgccttcgctgccgcccagggcgcttccccgctcaggagcttcctctgggcctctggacggaggcgcgcaggggcccgggaggcgggaacgatgggcctttctaggcggtatcagggccgatgctcgtggatgcagagcagtgaccagcccagaaccgtaccggcttcccggggcaggggcggcccgagagcgccgctaacgggagcaacgggccctgcccccggtggtgtaggggccacctcgccccgcccagcccagcccgatattgatgggggcccacgccttcattgtttttttgttgttgttgttttttgttgttttttgtttgtttgtttttgagacggagtctcgctctgttgcccaggctgcagtgcagtggcgcaatctcggctcactgcaccctccgcctcccgggttcaagcgattcccctgccccagcctcccgagtagctgggactacaggcggccgccaccacacctggctaatttttgtatttttagtagacacgaggtttcaccgtattggccaggctggtctcgaactcctgaccttgtgatccgcccgcctcggcctcacaaagtgctgggattacaggcgtgagccaccacgcacggcccatttgcgttctaatttcaggcgttcctcaatcctctgtggaaccaggaagggcgcaaattataaagggactggcccagcgccgcctctgggcaggctttgggcagcgcctggcccgctgccggcttggacctcccagacctaggggcccggttcctggtggaggctgcagggacctctgccccacccgcccgggggaggcccgaggggctggactcagactgagattgaatgcggctttgtcttcctagttcagccccggcccacacctggggctgagtggaatcgggagcttcgaggggtctggacagagag

SEQ ID NO: 1187 - DNA, 6000 bp, Homo sapiens
cggacatttgcactggaactgtgccctgcatgcataacagccttgaggtctgtgcggtggagatcattccttaatctgttctttctctcctgagcgtcctaaacatttttcatttagaaaaactttcttcatggaggggtgggcgcggtggctcacgcctgtaatcccagcactttgggaggccgaggcgggcggatcatgaagtcaggagatcgagaccatcctggctaacacggtgaaaccccgtctctactaaaaatacaaaaaatcagccgggcgtggtggcgggcgcctgtagtcccagctactcaggaggctgaggcaggagaatggtgtgaacccgggaggtggagcttgcagtgagccgagatggcgccactgcactccagcctgggcgacagagaaccgccgttcgcccatccgtccagaagtaaggaaaaggccacggagaccaagggggtggggtcacggtttcccctcccctccccctcagaagtccgaagataaataggcttagaaagagaggaaaaaaatttcttggtttgcatctcactcaccctttctcaagccccatgttgcacgccaaactgttgtaggactttctccttagttcagctaaaagccaggttcttgtgcagcggccatgagagattaatctcgcagacactttgaagagtgagaaaaatggaatttattgggcaagaaggaaaaaaagggaaacagggactctcagcaaagcgagagagagtcccgctagctggtttctcgcctcccagatagaatcccaagttccaccccgaacatgagaccaagctcctcccccctgcatagctcctccccctgcatagctcctccccctgcatgctcctccccctgcatagctcctccccctgcatagctcctccccctgcaaagctcctcccccctgcagagcttctgtggctctacccagttcttccagtgcttaggcaggtgtgggagtttctcctggacctctttttttttttgagacggagtctcgctctgtcgcccaggctggagtgcagtggtgcgatctcggctcactgaaagctccgcctcacaggttgaagctattctcctgcctcagcctcccgagtagctgggactacaggtgcccgccaccactcccggctaatttttagtagagacggggtttcaccgtgttagctaagatggtctcggtctcctgacctcgtgatccgcccgtctcggcctcccaaagcgggacccctttagacttggctgtctcacttggattacaggcgtaggccacagtgcccaactgagtcactttttttttttccttaaaaaaattgttggcccgcagacacatgaaaaaatgctcagcatcactggccatcagagaaatgcaaatcaaaaccacattgagatagcatctcacaccagttagaatgccaatcattaaaaacccaggaaacaacaggtgctggagaggatgtggagaaataggaatgcttttacactgttggtgggactgtaaactagttcaaccattgtggaagtcagtgtagcgattcctcagggatctagaactagaaatgccatttgacccagcaatcccattactgggtatatacccaaaggattataaatcatgctgctataaagacacatgcacacgtatgtttattgcggcactattcacaatagcaaagacttggaaccaacccaaatgtccatcaatgatagactggattaagaaaatgtggcacatatacaccatggaatactatgcagccataaaaaagaatgagttcatgtcctttgtagggacacggatgaagctggaaaccattctgagcaaactatcacaaggacagaaaaccaaacaccgcatgttctcactcataggtgggaattgaacaatgagaacacttggacacagggtggggaacgtcacacactggggcctgtcgtggggtgggggaagaggggagggatagcattaggagatatatctaatgtaaatgatgagttaatgggtgcagcataccaaccgggcacatgtatacatatgtaacaaacctgcaaattgtgcacatgtaccctagaacttaaagtaaaataaaaaattaaaaaataaaaatttaaatttaaattaaaaaaaaattgttggcccggtgcgttggctcacgcctgtaatcccagcactctgaggggccaaagtgagcagatcacctgaggtcaggagttggagaccagcctggacaacatggtgaaaccccatctctactaaaaatacaaaaattaggctgggcgccgccggtggctcacacctgtaatcccagcactttgggaggctgaggcaggtggatcacctgaggtcaggagttcgaaaccagcctgaccaacatggtgaaaccccatctctactaaaaatataaaaattagccgggtgtggtagcacacgcctgtaatctcagctactcaggtggctgaggcaggagaatcgcttgaacccgggaagcggaggttgcagtgagcccagatcactcaactgcactccagcctgggccagggagcaagactccgtttcaaaaaaaaaaaaaaaaaaaaaaaagggccaggcgcagtggctcatgcctgtaatcccagcactttgggaggctgaagcaggtggatcacgaggtcaggagtttgagaccagcctgaccaacatggtgacaccctatctctactaaaaatacaaaaaaattagccgggcttggtgccgtgcacctgtaatcccagctactcaggaggatgaggcagcagaattgcttgtatccaggaggtggaagttgcagtaagccgagattctgccatcgcactccagcctgggcgacatagcgagactctgtctcaaaaaaaaaaaaaaaaaaaaaaaaaaaaattagccaggcgtggtggcgggcgcctataatcccagctactcgggaggctgaggcaggagaatcgcttgaacctgggaggctgaggttgcagtgagccgagatggtgccactgcactccaacctgggcgacagaccgagactccgtcttaaaaaaaaaaaaaaaaaaaaaggccggggtggtgactcacgcctgtaatcccagcattttgggaggccgaggcaggtagatcacgaggtcaggagatcgagaccatcctggctaacacggtgaaaccccgtctctaataaaaatacaaaaaatcagccgagcgtggtggtgggtgcctgtagtcccagctactcgggaggctgaggcaggagaatggggtgaaggtgggaggcggagcttgcagtgagcccagatagtgccactgcactccagcctgggcgacagagcaagactccgtctcaaaaaaaaaaataagataaactaaaaataaataaataaataaataaaattacaaaaaaatccaaaaaaatttgttttaaaatttttaatgagatgaggtgtcactatgttgcccaggctggtcttgaactgatgagctcaaatgatcctcctgccttagcctctcagagtgctgggattacaggcatgagccaccacacccggctaattttttgtattttttagtagagacggggtttcaccgtgttagccaggatggtctcgatctcctgacctcgtgattcgcctgcctcggcctcacaaagtgctgggattacaggcatgagccaccgcgcccggcctctgggtgactaagttttaacattaagtaactcattaacaatttctaaggccctttatgtcacaacctaagtgaaaagccattatcctttgccacaaatagaagacacctgtgaaaacacgacagtttcctctagaaggctcctataagtcccagtctctagttcggaaagttccaggagcactgagtggggagccctctcctttaacagggggcctcaggatccagcccacttcaacctctggctcggccacccccttcttggcatcaatctctctgtccagacccctcgaagctcccgattccactcagccccaggtgtgggccggggctgaactaggaagacaaagccgcattcaatctcagtctgagtccagcccctcgggcctcccccgggcgggtggggcagaggtccctgcagcctccaccaggaaccgggcccctaggtctgggaggtccaagccggcagcgggccaggcgctgcccaaagcctgcccagaggcggcgctgggccagtccctttataatttgcgcccttcctggttccacagaggattgaggaacgcctgaaattagaacgcaaatgggccgtgcgtggtggctcacgcctgtaatcccagcactttgtgaggccgaggcgggcggatcacaaggtcaggagttcgagaccagcctggccaatacggtgaaacctcgtgtctactaaaaatacaaaaattagccaggtgtggtggcggccgcctgtagtcccagctactcgggaggctggggcaggggaatcgcttgaacccgggaggcggagggtgcagtgagccgagattgcgccactgcactgcagcctgggcaacagagcgagactccgtctcaaaaacaaacaaacaaaaaacaacaaaaaacaacaacaacaaaaaaacaatgaaggcgtgggcccccatcaatatcgggctgggctgggcggggcgaggtggcccctacaccaccgggggcagggcccgttgctcccgttagcggcgctctcgggccgcccctgccccgggaagccggtacggttctgggctggtcactgctctgcatccacgagcatcggccctgataccgcctagaaaggcccatcgttcccgcctcccgggcccctgcgcgcctccgtccagaggcccagaggaagctcctgagcggggaagcgccctgggcggcagcgaaggcagcggtcgctcccggcttcaaccgcccagtcccccgcgccacccagagcccctcacgcccgggaaagagccccgagaacgtgcgaatggggtcggggtccgcgcgcggaggagatgttgctgagaagggtaccggggtcccggagcgccgcccccgccgcccgccccccgccccggctgcggtcgacctgcactcccactccagccttacctgaggccgactcgcacgagcccacgcggggctgcgggagccgatcgggatcccggccgccggcccccaccccaccccctcgcggcgccggcgacggcggtgctgcggcccctttaaatccgggccgccccgccctgcgccgtcgactccgcggcggccccagatccaggccccagatccaggccgggccgcggctctcgccgcccagcccagcccagcccggcccggcccggccctgccgcggaggcgaggccgccagtgtcccgcgcccctgatatctgcagtgagcctgatacctgcctctgcccttctgagcctgttcctcttccctgagtacagggcacaaagcttgcgccctgaggggcggccggcgcgctccctggcccggtccccgcccggccccgggccccccgcccctccccgacccggggccggggcccctgccgccgccgccgccgccttccgacccctgcgccccggccccggtcccccgggccatgcagcctcggccccgcgggcgcccgccgcgcacccgaggagatgaggctccgcaatggcaccttcctgacgctgctgctcttctgcctgtgcgccttcctctcgctgtcctggtacgcggcactcagcggccagaaaggtgagcgcgacccccgcccggcccgcacctggcgcacctgggcgtcggcggcgggagcgggcccggcggtggccgcggaaggcggccggaagccgacgcaggcgccccttccccgcccgggcggcgcgaggacgcccctcccaccctcccccacttgtttgctgctggagccgcggcgttctcctcgggcccgggccgcgcccgtgggtgctccggaccggactccgcgggcgcagctgtcccgacg

SEQ ID NO: 1188 - DNA, 6000 bp, Homo sapiens
gggtgcacagggactcgcagggaggtcgaagagctgagtctcgtcgggaggctgagggggaagagcgggcactgggctgcgagtgtgcagagctggaggtgggggactgcggtaagtacccgtcctggggtgcgggccctgctgggaagcattgggagcaagaagggttagatcctcaaaggaggataattcttccagaaggttttctttgttttgttttgttttgttgaggcaccaagattggagtgcagtggcgccatgtcagctcactgcaacctccgcctccgaggctcaagcaattctcttgcctcagcctcccgactagctgggactacaggcacctgccgccacgcccaactaatttttttaatttttagtacagatggggtttcactctgttggccaggctggtctcgaactcctgacctcgtgatccgcccacctcggcctcccagtgctgggactacaggtgtgagccaccgcgcctggcctcttccagaaggttttcgatggcagcaggtggaggggagcgagagggccatcgctcctgctgcaagggcagcccctccacgggatcccacactcctgacccgttcagtatagacggggtactcccggtgcggcctgtcaccgctctgtctggcgctggcgctcctagagaaggccatgccgacctctcccccacctcgctccagattccccttcttgagctgcttttcccacagtccccccaggcgccactgagagcctcccgtcttcgatgggcttggggcgcctggacccttccggggtcactttgccgtcttcctccagcccccctccctactccttgtcgccgcccccccgtcttttcaggaccttgcgcactcaggctggccctatgctttggggtaccccagcagtgcccccgggtctccggccacccggtgacggagggagggagaggctggcgagggggcggcgccttaggtcccagcgcgacccgcctctcagcccctcccgccggctacagccgcgcgggacggggcagggacctcgagaacaccggggacttgcgggccggtggccccgggcaggccacttctgacgcgggtgcgaggccttccgcgggcgtgcacggttgggccggagccgcgccgggggccgggacacgcctggggtcagcgctggcgtcgccgctcgggtggggtgggccgggttcgggtccagtctcctccccacgggcggcccgcgccccgtcttccagtgacccccacatcccttgcgccccgagctggaacttcggcaggttctgccccgggccgcgcgcgctttctggggaccagggctgtggttcctgctccgcgtcgtgcctttagacaccgccgggcgttcgtcctccatccctccccccttttccccactccgcggttgacgagggccgcccccaagtggccatgtcccccggcatggacgacccctcagtgcccctgagggcccagggtctcgcccccgtcccgaggcaggccatgtttgaatttatttggagaaattcgcccagcccaggggacctctttctgcagctctggccttccagtaggagagggtccctggggctctcaggcctgacaacttggcatcactgaattctctaaccatgtctgtccatgacttgaactccttttcttttagaaagatctttgcaaaccccttgtgggcgtgcccctcccatggcccccgtgcctcttgcctgggctttgggcttgtctgaaagggctaaaagggggtgatgcctggccgggcgggtggctcacgcctgcagtcccagcactttgggaggccgaggtgggcggatcacctgaagtcaggagttcaagaccatcctggccaacatagtgaaacccatctctactaaaaatacaaaaattagcaaggcttggtggcaggcacctgtagtcccagctacttgggaggctgaggcaggagcaggagaattgcttgaacctgggaggcagaggttgcagtgagctgagatcgtgccactgcacttcagcctgggtgacagagagagactgtctcaaaaaaaaaaaaaaaaaaaaaaaaaaaagtgatgtccagtgcctggggatttttcctagggagtggtcaaggaaggccccgctgaggaggagacatttagggtgggaagttgccatgtagggcaggagtggaaagggttttggaccagagggagagccagggaaaagtcaccaggtagaatgagctggcatgattaggaagatggcaagggagggctgtggccctcccatgtgagtggaagggagtggctgcagcgcagaaggcctggaggcccccgcacagaccaggacctctgtagaggaactcatcccctgtgtcccctgtgattgtcaatctccctaaagatggcccagagcagtgcggcctgaatccctcagtggccttgtctctggctgccccagcacccacgcggacacttgactccacgccccaaagaaaagaagcgaacctgggaacaccactgccaaggcataggattatttgggaggggggaagggggaactgaggaggtggttacaacatgctgggcagcaacagacagaaccagaccacccctgtggctgccccggctggtctcctgggaccactgggcgcttggctcaggcctctcctgccctccccactcttccacctcagcccccctgcagtctctgtcctgccctgaccccccagcttacagccccaaaagcagctaaacaactcgcacacccacggggcatcgcctgggagggcagcccaaatccttccacttcagccccatttgaaagatgaggaaatgagaggctggtccatagtgggtctcgcggctcaggtgccgagccttccctgggcatgcacgccgggccctggagggtgggaaggggccagtggacgcggggagcctgcggggtgggactgcatcgggaaaggggaaggagtcagaggcgagaagggggagagtgtctgtctggctccagccgctgcacgctcttcctgctcaggggactcacggtgaccccggagccactccccagcccagcctccaggtaagaggtcactgagatgggtggcagcaggggccggggatccccctattacgacagcggtcatgggacgctgactcactgccggccagaccacctgacctccgcggcgggaggagagggccctgccagggggttcccgccgcgccttgtttacctccgggaggcctcggcctcgcgtgggggcagggcggccgctggggccgcaaggcgtgcggggaagggccagagccgggtgtccaccccagcttcccaaagactccctcttctgtgcttccttctcccctccccgccccccccccagtctcttcacatgcccctagcccccgcggaaacttcccgcgatcccaaacgggccaaatggcgagaaagcaaaggagctccttcttgggggtgagtggggcgccttgagcgcttcctcaaagctatgttcccagagccacaggccttccttgtgtccctcaccctgctcagaccgggccatagccgggggctggggcaggaaagccggccctcggcgggggccacgtggctctcaggcgcctgggctgctgagtcacgcttggccagcacctgtctgtaggccacagcctctgccagcacgcccctctgtgtcccctgcccctgtctgcaaggcagtggctccagcaggccctggggcattttccactctccaccgccggatgcagggagaggcctgaaccctctccacagggctgctctgggcagggtggaagccttgcccacttcggagccctccgggaaggatcattcacacctgtggaccagcccctgctgtgcgcacacccacacatcaccttcgcacctgactggccccatccagccactcttgcctccctctgggtttcctcccctgggaggtttctccagctcctgcaagccctgggctgaaatggcatgagttggacccagcaggttctgacctcctactcacaggaccttgcctgggaggctccagagggtgaccactcgtcctgcccctctccttgccccagttctggcggacaggttactctggtggcataaagcagtgtttcttccttcctagctgaggaggctgttggctgacccccttggctgcccacaaggccaacgggcctgagcccccacagggccatgggcattacctgctgaattgaggagcccataaggagtcacttggaccacagtgaacacttggcgaccactgacactcaggagaccttagctggtcctccagcacctctcaactccactcctactaaactgggaacttctctggtgctcaggccagagtcggggtccgtcaccgagtatgctatgcgctgcccatcaccgaggatgccatgcgctgtaagagggctgccaccgcggcaggctgaccatggcagggtcggaacagcaacctgagagccagcttgttctggccagcagtgcccactgggcgacctagcagcctcctgatatgggggctgtgtccccctctccctgcactgggtacccccaactgaggatattgctgagtcatggccaggcccaagcctgggaggggcgaggggctggacccccgccagtaccctgatcccaggtgcagaggctggagcccaggcctgtatgagtgccagggccggtttcctggggtccttggtgcaccggggcaatgaagagaggggtcagcaatgagggggccgggagacctggagcgaggggtagcggggaaggggagagtagtgaaggggcctctgcagggcggctctcgcgccgcgacgacggtggcgggggcggggagggcgcgagagactccgcccctctcgaggcggggcggggcctccgcgttcgctacaaaagccgcgcggcggctgcgaccgggacggcccgttttccgccagctcgccgctcgctatggcgtcgctcaccgtgaaggcctaccttctgggcaaggaggacgcggcgcgcgagattcgccgcttcagcttctgctgcagccccgagcctgaggcggaagccgaggctgcggcgggtccgggaccctgcgagcggctgctgagccgggtggccgccctgttccccgcgctgcggcctggcggcttccaggcgcactaccgcggtgagcgggccggggagcggcgggggcggtgacgcaggccggacacggcctcctgccgcggggtggctgccccctcccttctcggcgacgcctggcgggccgtgagggggtctgcgctggctgctccctggatggcggtggcctgcatgggtccccagttcggccatgggagccggcctggtgactggagtggtgaccaaggccgggacccgctgctcagcgtcggccccctggggcggtggagccctgccggccgggggctcgagcctgggggcgtcagacgccccgctccaccccccgcgctgttggggattttggcaaggacgcgccggggcgaacgctctggctctccgcgggcactgggtggtcaggcgggcactcgggttacactgacaccttgctgcgccaggtggtgggttcagataatgccctggaggagccgggcgagcgccggcgaggggagggagtgacgcgggtaaacaagcgcgggggtgcgggggactcgcgagcgccgcgacagcgcctgggagaagggcacggatcgccggcggaacgctccgagccaggtcgagtacagatgttttcccattggcaagtggacgagaacgttcttcagaagtgttggtgttggcacagaagccctgtttcctgctgcgctggtgtgaccagtggctgctgggggtggggttagggaggtggttgtggccaggagggcgggaggtggccaaggccggcccctgggagggtgcagtgctaggacctccctctggagcgctgccagcataccaggccctctcctattcttaaaaaaaa

SEQ ID NO: 1189 - DNA, 6000 bp, Homo sapiens
ctggggatttttcctagggagtggtcaaggaaggccccgctgaggaggagacatttagggtgggaagttgccatgtagggcaggagtggaaagggttttggaccagagggagagccagggaaaagtcaccaggtagaatgagctggcatgattaggaagatggcaagggagggctgtggccctcccatgtgagtggaagggagtggctgcagcgcagaaggcctggaggcccccgcacagaccaggacctctgtagaggaactcatcccctgtgtcccctgtgattgtcaatctccctaaagatggcccagagcagtgcggcctgaatccctcagtggccttgtctctggctgccccagcacccacgcggacacttgactccacgccccaaagaaaagaagcgaacctgggaacaccactgccaaggcataggattatttgggaggggggaagggggaactgaggaggtggttacaacatgctgggcagcaacagacagaaccagaccacccctgtggctgccccggctggtctcctgggaccactgggcgcttggctcaggcctctcctgccctccccactcttccacctcagcccccctgcagtctctgtcctgccctgaccccccagcttacagccccaaaagcagctaaacaactcgcacacccacggggcatcgcctgggagggcagcccaaatccttccacttcagccccatttgaaagatgaggaaatgagaggctggtccatagtgggtctcgcggctcaggtgccgagccttccctgggcatgcacgccgggccctggagggtgggaaggggccagtggacgcggggagcctgcggggtgggactgcatcgggaaaggggaaggagtcagaggcgagaagggggagagtgtctgtctggctccagccgctgcacgctcttcctgctcaggggactcacggtgaccccggagccactccccagcccagcctccaggtaagaggtcactgagatgggtggcagcaggggccggggatccccctattacgacagcggtcatgggacgctgactcactgccggccagaccacctgacctccgcggcgggaggagagggccctgccagggggttcccgccgcgccttgtttacctccgggaggcctcggcctcgcgtgggggcagggcggccgctggggccgcaaggcgtgcggggaagggccagagccgggtgtccaccccagcttcccaaagactccctcttctgtgcttccttctcccctccccgccccccccccagtctcttcacatgcccctagcccccgcggaaacttcccgcgatcccaaacgggccaaatggcgagaaagcaaaggagctccttcttgggggtgagtggggcgccttgagcgcttcctcaaagctatgttcccagagccacaggccttccttgtgtccctcaccctgctcagaccgggccatagccgggggctggggcaggaaagccggccctcggcgggggccacgtggctctcaggcgcctgggctgctgagtcacgcttggccagcacctgtctgtaggccacagcctctgccagcacgcccctctgtgtcccctgcccctgtctgcaaggcagtggctccagcaggccctggggcattttccactctccaccgccggatgcagggagaggcctgaaccctctccacagggctgctctgggcagggtggaagccttgcccacttcggagccctccgggaaggatcattcacacctgtggaccagcccctgctgtgcgcacacccacacatcaccttcgcacctgactggccccatccagccactcttgcctccctctgggtttcctcccctgggaggtttctccagctcctgcaagccctgggctgaaatggcatgagttggacccagcaggttctgacctcctactcacaggaccttgcctgggaggctccagagggtgaccactcgtcctgcccctctccttgccccagttctggcggacaggttactctggtggcataaagcagtgtttcttccttcctagctgaggaggctgttggctgacccccttggctgcccacaaggccaacgggcctgagcccccacagggccatgggcattacctgctgaattgaggagcccataaggagtcacttggaccacagtgaacacttggcgaccactgacactcaggagaccttagctggtcctccagcacctctcaactccactcctactaaactgggaacttctctggtgctcaggccagagtcggggtccgtcaccgagtatgctatgcgctgcccatcaccgaggatgccatgcgctgtaagagggctgccaccgcggcaggctgaccatggcagggtcggaacagcaacctgagagccagcttgttctggccagcagtgcccactgggcgacctagcagcctcctgatatgggggctgtgtccccctctccctgcactgggtacccccaactgaggatattgctgagtcatggccaggcccaagcctgggaggggcgaggggctggacccccgccagtaccctgatcccaggtgcagaggctggagcccaggcctgtatgagtgccagggccggtttcctggggtccttggtgcaccggggcaatgaagagaggggtcagcaatgagggggccgggagacctggagcgaggggtagcggggaaggggagagtagtgaaggggcctctgcagggcggctctcgcgccgcgacgacggtggcgggggcggggagggcgcgagagactccgcccctctcgaggcggggcggggcctccgcgttcgctacaaaagccgcgcggcggctgcgaccgggacggcccgttttccgccagctcgccgctcgctatggcgtcgctcaccgtgaaggcctaccttctgggcaaggaggacgcggcgcgcgagattcgccgcttcagcttctgctgcagccccgagcctgaggcggaagccgaggctgcggcgggtccgggaccctgcgagcggctgctgagccgggtggccgccctgttccccgcgctgcggcctggcggcttccaggcgcactaccgcggtgagcgggccggggagcggcgggggcggtgacgcaggccggacacggcctcctgccgcggggtggctgccccctcccttctcggcgacgcctggcgggccgtgagggggtctgcgctggctgctccctggatggcggtggcctgcatgggtccccagttcggccatgggagccggcctggtgactggagtggtgaccaaggccgggacccgctgctcagcgtcggccccctggggcggtggagccctgccggccgggggctcgagcctgggggcgtcagacgccccgctccaccccccgcgctgttggggattttggcaaggacgcgccggggcgaacgctctggctctccgcgggcactgggtggtcaggcgggcactcgggttacactgacaccttgctgcgccaggtggtgggttcagataatgccctggaggagccgggcgagcgccggcgaggggagggagtgacgcgggtaaacaagcgcgggggtgcgggggactcgcgagcgccgcgacagcgcctgggagaagggcacggatcgccggcggaacgctccgagccaggtcgagtacagatgttttcccattggcaagtggacgagaacgttcttcagaagtgttggtgttggcacagaagccctgtttcctgctgcgctggtgtgaccagtggctgctgggggtggggttagggaggtggttgtggccaggagggcgggaggtggccaaggccggcccctgggagggtgcagtgctaggacctccctctggagcgctgccagcataccaggccctctcctattcttaaaaaaaaaaaaattgtgatgttattgagctgtaactgaaataagggttcacccatttagtgtacaagtcagtggttttcactattttcataggtttgtggaccatattcagtgtgagagcttttcatcaccttataaacgccatacataccttttatcaccctcttatccacatgcccccagcaacctcctttctgtatctattcatcttgcaatcctggacatttcatgtaaatagaatcagacaatgtagtcttgcaagtggtttctttcacttagtgtaatgtgttcagtgttgtggcacatatcagaactagttttttttggaggaataatattctgttgtgtggacaggccatgttttgtttacctgttcattagttgacagacatttgggttgtttgcatctttgggtgcctcacctgtgccctcggtggatggcgtggtttggtctgcacagctgtgctttaaagccatttcagctcatatgtatctgtcacaaatggagactacatacaaatacgtgtctttcagctttgttagggaaggaagcaggcagatgcccttgtcttctcctttactcccaagccactagaagtctaaggcctttgtggggctgggcccctcaggagcaggtcacaggcagggatctcccacagttgaagacggacatgggcctggtcggatggggaatgaggtggcacgtttctgaaaaggcagctggcccaaggctaaataagtgcagcagccaaagctgctgcccctgtgcacaggccctccgccccctgcatgtggctgtggtccagggcccaggtcggagcactcaccttccaggaggtgccagagcaagggggtagtcttgcctctcactcctgccctctgtggctcaagtaggtgtgtttgtttatagccctgtgagtgtccctttcatacttgcctcagcccattccagcagcttatgtccagctgagaacccctgggtgctcacgtgctgtcttttaaacaatctagatgaggacggggacttggttgccttttccagtgacgaggaattgacaatggccatgtcctacgtgaaggatgacatcttccgaatctacattaaaggtaaggggctgctctgggggctgcctgaagccagctcagcttgtactcagttccctgctgagtaaaaaacagggctcgatgttccaccaatgaaggggtcagcaatttgagggctgtttaagacagagacataggccaggtgtggctcacgcctgtaattccagcactttgggaggccgaggcgggcaggtcacctgaggtcaggagtttaagaacagcctggccaacatggtgaaaccttgtcgctactaaaaatacaaaaattagccgggtgtggtggtacatgcttctagtcccagctactcaggaggctgagacgagaatcacttaaacctggagagcggaggttgccatgagccgaaatcacatgactgtactccagcctaggcgacaaaaaaaaaaaaaaaaaaaaaaaaaaaaaaaaaaagacattttaagtgctgtgcctgacctgagaaagaggagtccatgttcactctagggatggggtctggtgccgtggtgcttgggttagggatggggtctggtgccgtggcgcttgggtgaagggcaaggccaaagctgtgcagacagggctccttgctgctgctctgctgcctgggccaaacagacacagggactgggaacctcctagcaggttcttggtggctctgctgccctcacctaagtggctgaattttgtgtggattccatgctggagagcagggccgggggccttgctggcagtgacagccccacagtgacgacagagggggaggactttagggggtcccaccctagcggctctctttacccttcctgtagagaaaaaagagtgccggcgggaccaccgcccaccgtgtgctcaggaggcgccccgcaacatggtgcaccccaatgtgatctgcgatggctgcaatgggcctgtggtaggaacccgctacaagtgcagcgtctgcccagactacgacttgtgtagcgtctgcgagggaaagggcttgcaccgggggcacaccaagctc

SEQ ID NO: 1190 - DNA, 6000 bp, Homo sapiens
acgctcttcctgctcaggggactcacggtgaccccggagccactccccagcccagcctccaggtaagaggtcactgagatgggtggcagcaggggccggggatccccctattacgacagcggtcatgggacgctgactcactgccggccagaccacctgacctccgcggcgggaggagagggccctgccagggggttcccgccgcgccttgtttacctccgggaggcctcggcctcgcgtgggggcagggcggccgctggggccgcaaggcgtgcggggaagggccagagccgggtgtccaccccagcttcccaaagactccctcttctgtgcttccttctcccctccccgccccccccccagtctcttcacatgcccctagcccccgcggaaacttcccgcgatcccaaacgggccaaatggcgagaaagcaaaggagctccttcttgggggtgagtggggcgccttgagcgcttcctcaaagctatgttcccagagccacaggccttccttgtgtccctcaccctgctcagaccgggccatagccgggggctggggcaggaaagccggccctcggcgggggccacgtggctctcaggcgcctgggctgctgagtcacgcttggccagcacctgtctgtaggccacagcctctgccagcacgcccctctgtgtcccctgcccctgtctgcaaggcagtggctccagcaggccctggggcattttccactctccaccgccggatgcagggagaggcctgaaccctctccacagggctgctctgggcagggtggaagccttgcccacttcggagccctccgggaaggatcattcacacctgtggaccagcccctgctgtgcgcacacccacacatcaccttcgcacctgactggccccatccagccactcttgcctccctctgggtttcctcccctgggaggtttctccagctcctgcaagccctgggctgaaatggcatgagttggacccagcaggttctgacctcctactcacaggaccttgcctgggaggctccagagggtgaccactcgtcctgcccctctccttgccccagttctggcggacaggttactctggtggcataaagcagtgtttcttccttcctagctgaggaggctgttggctgacccccttggctgcccacaaggccaacgggcctgagcccccacagggccatgggcattacctgctgaattgaggagcccataaggagtcacttggaccacagtgaacacttggcgaccactgacactcaggagaccttagctggtcctccagcacctctcaactccactcctactaaactgggaacttctctggtgctcaggccagagtcggggtccgtcaccgagtatgctatgcgctgcccatcaccgaggatgccatgcgctgtaagagggctgccaccgcggcaggctgaccatggcagggtcggaacagcaacctgagagccagcttgttctggccagcagtgcccactgggcgacctagcagcctcctgatatgggggctgtgtccccctctccctgcactgggtacccccaactgaggatattgctgagtcatggccaggcccaagcctgggaggggcgaggggctggacccccgccagtaccctgatcccaggtgcagaggctggagcccaggcctgtatgagtgccagggccggtttcctggggtccttggtgcaccggggcaatgaagagaggggtcagcaatgagggggccgggagacctggagcgaggggtagcggggaaggggagagtagtgaaggggcctctgcagggcggctctcgcgccgcgacgacggtggcgggggcggggagggcgcgagagactccgcccctctcgaggcggggcggggcctccgcgttcgctacaaaagccgcgcggcggctgcgaccgggacggcccgttttccgccagctcgccgctcgctatggcgtcgctcaccgtgaaggcctaccttctgggcaaggaggacgcggcgcgcgagattcgccgcttcagcttctgctgcagccccgagcctgaggcggaagccgaggctgcggcgggtccgggaccctgcgagcggctgctgagccgggtggccgccctgttccccgcgctgcggcctggcggcttccaggcgcactaccgcggtgagcgggccggggagcggcgggggcggtgacgcaggccggacacggcctcctgccgcggggtggctgccccctcccttctcggcgacgcctggcgggccgtgagggggtctgcgctggctgctccctggatggcggtggcctgcatgggtccccagttcggccatgggagccggcctggtgactggagtggtgaccaaggccgggacccgctgctcagcgtcggccccctggggcggtggagccctgccggccgggggctcgagcctgggggcgtcagacgccccgctccaccccccgcgctgttggggattttggcaaggacgcgccggggcgaacgctctggctctccgcgggcactgggtggtcaggcgggcactcgggttacactgacaccttgctgcgccaggtggtgggttcagataatgccctggaggagccgggcgagcgccggcgaggggagggagtgacgcgggtaaacaagcgcgggggtgcgggggactcgcgagcgccgcgacagcgcctgggagaagggcacggatcgccggcggaacgctccgagccaggtcgagtacagatgttttcccattggcaagtggacgagaacgttcttcagaagtgttggtgttggcacagaagccctgtttcctgctgcgctggtgtgaccagtggctgctgggggtggggttagggaggtggttgtggccaggagggcgggaggtggccaaggccggcccctgggagggtgcagtgctaggacctccctctggagcgctgccagcataccaggccctctcctattcttaaaaaaaaaaaaattgtgatgttattgagctgtaactgaaataagggttcacccatttagtgtacaagtcagtggttttcactattttcataggtttgtggaccatattcagtgtgagagcttttcatcaccttataaacgccatacataccttttatcaccctcttatccacatgcccccagcaacctcctttctgtatctattcatcttgcaatcctggacatttcatgtaaatagaatcagacaatgtagtcttgcaagtggtttctttcacttagtgtaatgtgttcagtgttgtggcacatatcagaactagttttttttggaggaataatattctgttgtgtggacaggccatgttttgtttacctgttcattagttgacagacatttgggttgtttgcatctttgggtgcctcacctgtgccctcggtggatggcgtggtttggtctgcacagctgtgctttaaagccatttcagctcatatgtatctgtcacaaatggagactacatacaaatacgtgtctttcagctttgttagggaaggaagcaggcagatgcccttgtcttctcctttactcccaagccactagaagtctaaggcctttgtggggctgggcccctcaggagcaggtcacaggcagggatctcccacagttgaagacggacatgggcctggtcggatggggaatgaggtggcacgtttctgaaaaggcagctggcccaaggctaaataagtgcagcagccaaagctgctgcccctgtgcacaggccctccgccccctgcatgtggctgtggtccagggcccaggtcggagcactcaccttccaggaggtgccagagcaagggggtagtcttgcctctcactcctgccctctgtggctcaagtaggtgtgtttgtttatagccctgtgagtgtccctttcatacttgcctcagcccattccagcagcttatgtccagctgagaacccctgggtgctcacgtgctgtcttttaaacaatctagatgaggacggggacttggttgccttttccagtgacgaggaattgacaatggccatgtcctacgtgaaggatgacatcttccgaatctacattaaaggtaaggggctgctctgggggctgcctgaagccagctcagcttgtactcagttccctgctgagtaaaaaacagggctcgatgttccaccaatgaaggggtcagcaatttgagggctgtttaagacagagacataggccaggtgtggctcacgcctgtaattccagcactttgggaggccgaggcgggcaggtcacctgaggtcaggagtttaagaacagcctggccaacatggtgaaaccttgtcgctactaaaaatacaaaaattagccgggtgtggtggtacatgcttctagtcccagctactcaggaggctgagacgagaatcacttaaacctggagagcggaggttgccatgagccgaaatcacatgactgtactccagcctaggcgacaaaaaaaaaaaaaaaaaaaaaaaaaaaaaaaaaaagacattttaagtgctgtgcctgacctgagaaagaggagtccatgttcactctagggatggggtctggtgccgtggtgcttgggttagggatggggtctggtgccgtggcgcttgggtgaagggcaaggccaaagctgtgcagacagggctccttgctgctgctctgctgcctgggccaaacagacacagggactgggaacctcctagcaggttcttggtggctctgctgccctcacctaagtggctgaattttgtgtggattccatgctggagagcagggccgggggccttgctggcagtgacagccccacagtgacgacagagggggaggactttagggggtcccaccctagcggctctctttacccttcctgtagagaaaaaagagtgccggcgggaccaccgcccaccgtgtgctcaggaggcgccccgcaacatggtgcaccccaatgtgatctgcgatggctgcaatgggcctgtggtaggaacccgctacaagtgcagcgtctgcccagactacgacttgtgtagcgtctgcgagggaaagggcttgcaccgggggcacaccaagctcgcattccccagccccttcgggcacctgtctgaggtgagcaggccctctgtgcaggcctggggtgggctcagggtggcaggaaccttgacccgctcactgcctgccgctctgctaattcctcccccagggcttctcgcacagccgctggctccggaaggtgaaacacggacacttcgggtggccaggatgggaaatgggtccaccaggaaactggagcccacgtcctcctcgtgcaggggaggcccgccctggccccacggcagaatcaggtgaggcttgtgttggaacctgcttctgattggtgacagtagtcaggcagcctgtgtgcagggcccttgtgcaaagcgtgtgtgcaaggcaagaattcaggataccccccaccttcctggtgccctacaatcacacaagaaccctgcaaagtggggtgtattctctccatttcccaaatggggaaactgaggtgcctaagtgcctgaggccacaaatttacctgcacagcccttcctacctcaggaggctgccctctcaaggtaccctgaggtgcaggcagggaggcccttccagcccaggggtctttgatgcactttgttctcttttgtgatggttgtcaggaagatcagagccaaagttgctgaagtcctttgaaacatagttataagtgaaagacttaccgttagctttgtagtctagatttttggattctgattttattaatgttactgtgtcctgtgaatcacctcaccctttgggacaaagatggggatgtttgcttgactttgagtaaataacatatttactcaaggaggtgatcaatattcacagtgtactgagcctgagcctctgtggggttgctgagcaccagggtcacagatgagggggagatggcacgggagagtggagatgctctctgtgcagggccag

SEQ ID NO: 1191 - DNA, 6000 bp, Homo sapiens
ccactgtacccggcagcttcaaccttttcataatcacaagttgggaagaataaaggagaaaaataatttaaatattacagatggaggtacttgtagttaagcctgcttttacctctgctccccccttaaactctattgaaataacaggaaagggcttacacaaaaaagaaaacaccatagacaaagaaagtaatagaggaaaagacaaagatgtgatcagattttggaagatggacatggagggagggtggcaacctgctgagggaagcttcagaaatctctgtgccagaacagggcatcctggtgagaaggaagaccatctgttcaggtaccaggaaaggcaagaggtgggagtgatcgggggacaggaacaaggggggagggttgaaaacctctagggagtgtcagctagagacttcagggcccacttggccagatgatggctcttgccaacaattgaaggagacctcatgtttaattccaggagcacctgacccagggaagcttcagcatgggatactagagacaggccagggtgaggcaccagcctgaaactgggcatcccgaatgagcaatgggcccagcagtcagttccctggccaggcaggaggtggggagtccctgctgagggaggttgaatgcccccagagaagtgtcctacagctcctgcctgccagacccccaggcaccctgcagagggaaagttagtgatggcgctggccccacagaaggcttcctgtcaaccttagtgcttcagtgggatcagacccctgggtcaccagccatctgaggaaagcccccacacatgggagaaaaggtcttaaagggaagagaatgttaatgtcctcagtgagatacaaaagagcattgtctgcatgaaaaaggaacaggatactagaaaaaggataacaaagggaacagaataagaaagttcttaaaattaaaaaatagaaaaaaaacttcaaaagaaggcttagattctactattgtctcaaggagatattccaaaagcaaaatagagatagtttttttatctttcctctcctcctaatgtaggaacaagtctagaagcccaatataggatgagtaggaattccagaaagaatagaaaactgaaaggaggaaatgaacatagaatgcaagatagtttcttggcaccaggcatggtggctcatgcctgtaatcccaacactttgggagaccaaggcaggcagatgacttgagctcacgagtttgagaccagccttggcaacatagggagacaccatcccccacttcccgtgtctacaaacactatgaaaattagccaggcatggagttgtgtacttatggccccagctacgtgggaggctgaggttggggatggcttgagcctggaaggcagagggtgcaacgagcctggattgtaccactgcactccatcctgggagacagaaacagaccttgtctcaaacaaaacaaaacaaaacaaaacaaaaaacaaaaatgcaagatagtttcttggcaatgaggccattatcttctagattgaaagcggccctgacaatgactgagaaagaccccacagcaaagcttatcattgtcaagtgtcagaaccctgaggataaagaaagaggggcttctaaaactctaggttattgtaaatacttgggaatacaaagagcaaacaaacatgaacagctaggagacaatggaacaactgatgactccagaaatcagttaaaaaggcttttcggcctagaattcttttgtttttgaaaccgggtctcactgtcatctgggctggagagcagtggtacagttgtcttcatctcgtgggctcaagtgatccttctgcttcagcctccccagtagctgggactacaggcatgtgccactgtgcctagatatttttttttttctttttctttccccacccccgagtcagagtctcgctgtcgcccaggctggagtgcagcggcgtgatctcagctcactgcagtttccacctcctgggttcaagcaattttctgcctcagcctcccgagtagctgggattacaggcacccgccaccatgcctggctaatttttatatttttagtagagatggggtttcaccatcttggccaggctggtcttgaactcctgacctcatgatctacctgccttcgtctcccaaagtgctgggattacaggcatgagccactgtgcccagccccgtgcccagctattttaaaatttttttgtagagatggggtcttgccatgctgcccaggccgattttgaactcctgggctcaagagatttctcatgttgttctcccaaagtgttaggattacatgcatgagtcactgtgcctggtccagcctagaattctatacccagctaaaacgatcaagtatcagggcagaacaaagttactttctggtatacagtcttaattattttaaccttggtttgaaccacatgaagagagaaacccaaaatgaagcacagaggtattaggaaacgggggacctaacaggacagagggtgaacgtaaagggggtcacagcatcacagcgcagcctctgcccagagagctgccagtcctggctggaacaggaggctgcacagcaagcggcactctctatggaaaacaccagaaccagtggggtctctgatccacttcacccttgtagaaaactatggagatgctgtgggagaacatagggaaagttagcaaatgcaaagagaaggcaggctgggtgcagtggctcatgcctgtaatccaagcactttgggaggccaaggcaggcagatcacctgaggtcaggagttcaagaccagcctggccaacatggtgaaaccccgtctctactaaaaatataaaaattagctgggcgtggtggcacgtgcctatagtcccagctactcgggaggctgaggcaggagaatcacttgaacctggtgggcagaggctgcagtgagccgagagattgcggcactgcgctccagcctgggcaacagagcgagactctgtctacaaaacaaaggaaaagagaagccattatcagtggtaggaaaacaaaaagcgatacaaagaaatagtctgctacttgacccagcaaagaacatttagatagaggtcctagctgaaacattgaatgttcttttttttttttgagatggagtcttgctctgtcaccaggctggagtgcagtggcgccaacttggctcactgcaacctccgcctcccaggttcaagcgattcttctgcctcggcctcccgagtaactgagactacaggcgattgccaccacgcccagctgattttttgtatttttagtagagacggggtttcaccatattagccagggtagtctcgatctcctgatctcgtgatccgcccgcctcggcctcccaaagtgctgggattacaggcgtgagccactgcgctcggcctactgaatgttcttttaacaaaaaattgcgtcttggaaagggtagtggaaggagaggcaggtactggtccagagtaggaagtgcgcagatgtgaactccagcagcaggcaagagcagcgtgagctgaaagggcacagggagagtttggggagtgggatgggggcagggagtgtgcaccacagcctttggcaactggtgactctaagctgtgggtgtggagacttttgacacatttaatttcaaaaatagtgcaggtgattctcccctctgtccctggtgagtcacgtgagcctggaggtgtgcaggttccctgtggggccagcgttgggccctacgcagcgcctgcacggcccatccacctcccagagcagagctccggcgttgaggtgtgcgtgtgtgtcgtcgcacaaagcctctgtgtgcaggtgtcaggaggcacatggccttccatcactgtggctggaagcgcctgccacatgtggtattggctctccctgtacttagggcctggccccacctgccgtgtggcccgtgtcctgcatggttaggaaaaaggtctctttcgactttctggctcagaagctgactttagatgctagctgaggttaatgttttactgaattggagaaagagaaaggtccagtatcatgggcccaccaagaatgtttccagaagccacagagatttgtagctgggatatggggagaagcctctgactcatgggtttgtatcgtctggtcccatactggctgtgtgattgcggggtcgagctgggtagaacctagcacctgcatccacacgctgagtgccaccatccagacacttagctgcttgtggggactgaacgttgagatcttcgtgagtctgtagtctccacaggccaagctcctgcttgcaggtgcatccttgggggaacttcacggcttgctctttcctcctccgcctctaggcattgaagttgatatcgatgtggagcacggagggaaaagaagccgcctgacccccgtctctccagagagttccagcacagaggagaagagcagctcacagccaagcagctgctgctctgaccccagcaagccgggtgggaatgttgagggcgccacgcagtctctggcggagcagatgaggaagatcgccttggagtccgaggggcgccctgaggcaagcctgtgcccctcccgccacctgggaccacggccagcctagtgatctgtggcctgcacctccgcctcatcctcagcacctctgcagccccacttacaaacccgagggagctgctgctgctgcagtgatgtctgtgccattaaagtcacgctgggaacctgctagaactttgtagttacttggtctttgtgagtggccactgttccccctagacccctgcagccttaactgcacgtgtgcatgcgtgctccccgactgtctgccaggagccagggccatggtcaggcttggcctgttgcgcgtgtctcctgtgtgctcatggtgagttttgttccaggaacagatggagtcggataactgttcaggaggagatgatgactggacccatctgtcttcaaaagaagtggacccgtctacaggtgaactccagtccctacagatgccagaatccgaagggccaagctctctggacccctcccaggagggacccacagggctgaaggaagctgccttgtacccacatctcccgccaggcaagtgaaccaagaggttttgtacatattcctacctttccctttagagcatcctgccctcctctgatttcagcgacacaaacagaaggatgagatgttctccactgcagggctgtctgtaggtgtgggaggttaggagttggttttgtcctattatgtgtaccctgagcaatagcgagtaagctctgctaatgcagttctgaaaatgtttttctttaggcaaactccagagccaggaatattaattgtaggagtttctaaaacttaacatgcagaccaggaattaaggcaggtgtgacacagagagggggcagcactgggtgtgtccctactactcacactcaagtgccgcctcagggagtgctggtctgagaggggggggggtcatagccaagatccctgtaggagccaggcagaagccaccgttgaagtggatggtgtggcaggcagcagtgggggggtggggggtggggacagctgacagaaactcctcattgtcacatggcagccgtgtgtaaaccaaggtccgtgtgcacaacctgctgtgggccgccgctgtgtgtcttctctgccttagggcaggggatggcgagctatggcctatgggccaagagtagttcttatttttgtttatttatttatttatttttattgatcattcttgggtgtttctcgcagagggggatttggcagggtcataggacaatagtggagggaaggtcagcagataaacaagtgaacaaaggtctctggttttcctaggcagaggaccctgcggccttccgcagcgtttgtgtccctgggtacttgagattagggagtggtgatgactcttaaggagcatgctgccttcaagcatctgtttaacaaagcaca

SEQ ID NO: 1192 - DNA, 6000 bp, Homo sapiens
tccccaccgagaggcatgcaggcttcataacggcttgatccatcacattcacaaacgaaaatcaatatgaatgcccatccacaggaaaatggataaatcaacagtggaacactatacagcaaataaaaagagcaaactatacctacacacacaaaaacacgaaatctcacagacataggttaagaaaaagaaacgacaccaaagattccatattgtatgattctatttatattatataaagttcaacaacaggcaaactaatcaatggtaacagaaagcaggatagtagctgggtatggtggtgcacacctgtagtctcagctactcgggaggatgaggtgggagcattgctgagtccaggagttcaagcctgcaggaagccatgattgcatcactgcgctcccgcctgggtgacagactaagaccctgtctctaaagaaagaagaaaagaaatcagaatggtggggtgctcacgacggagcagctcagggaagctttcaggagtgctagtaatgttctccatcttcatctagataatgggtaaagggtgtttccgcctcataaaagacgttttgagttgtaaacataaaatttttgcactttatgtatgttatgttgcaatataaaaaagcaataaatgtatgaaagaagtaaaaaaaaaacacaatatagtgctgggtgaagaggatcagaaacagaatgacatcaataacccaatacagtttaataattaaaaagcacaggcacattaagcaacaacacacattttgcaagaacacaaacaaaagagacgcatgaggcacactaaaatggttccctatgggtcaaggaatgggagtgagaaatagtgataaaagggagcatgttaataatgaaacaagagcagggccttcctaggaccagtggggattatgtgccattcaagaaagaaaaggaagaggaggagaaagaggagttggactttgggaaatctgggcaaccccctggggtttgtagcactgttcaggggacccccgcttggtctctgattgctggcatcccaaactctgtgcagcatgctttacacacacccattaccctgtctgctgtcctgggagggcagacattgctcacaggggagacagatctcctcctgaaggactgaagctcttacggggcctggatgtgggaggctggcagctcgggccccactggagttctggggagaaggggattttgagctggggcttacaggtgacctaggatttattgtaggctgagaaatggacacagaggcaggggaatatggtgcgtggtggagtcagggaaataaccccattaaggaaaaaggttcgtgggcagctcattcacaggccagcgtgggccagagccagactgcggcacacatcctccgtgagacctgccatgtccgataaaaccactcgtacttttatttaaccaatacttttaattcacttttttcttaaatgttttaaaagatagcatcgtgtaaagatatacacatggccaataagcacatgaaaagatgttcagcaccactaatcattagggaaatgcaaatcaaaaccataatgagagaccacctaatacccatttagatggctactattttgaaaaagaagtagagaagtgttggcaaggatgagaagaaactggaacccttgtgcagttggtgggaatgtaaaatggggcagctactattaaaaaaacagtagggcagttcctgaaaaaaattaagcatagaattaccattagatctggtaattccacttctgagtatatacacaaaagaattgaaagcaggaagggatatttatacgcccaatgttcatagcatcattattcacaatagccaaacagtagaggcaaccaagtgtcctatgatgaatggataaacaaagtgtattatatacatacagtggaatggatgaatggctaaaaaaaaacttggaatatacatacaatgtgatatgattcagccttagcaaaggaggaaatctgatacgtacttcaacagaggtgaacctcaaggacatcgtgcaaagcaagataagctactcacaaaaggacaaatactatatgattccacttatgcgggtaagtagaatcatcaaaatcatagagacagaaaagaagaatggtagttggggaagggggaacgtttaatgggtgcagagtttcagttttacaagatggaaagagttctggagatggatggcaaaggttacacaacgatgtgaatgtacttaatgccactgatccatatgcttaaaaatggttaagatggacaattttatgttatgtgtattttaccataatattttaaaaggtagcgttgtatcactattataaatgaaaaacttcttgtctccctaaggtctccttaaaaccttgaggtttccttaaaagacaatgccactcccaagtacaggctggtgtgaatgttgccgtacatgctggtgcgtgatgaggctgtgcaccgagacctcatcttgctttatttaaaggggagatcagcaagtgccagggaagtgttaaaggtgctctggaaccaattttctccttgacaaattcagaagggttgagaaagccacttcctccccacctgattaacaaagtggtgcttgtgagcttctataattgtttcttgtgccaggggtcatgggcaccttacagtttgaagactcctcctttataaggacaaaggagtagaggccatgagcctcttgggcaggggtaggccagggcatgcccagcaagaagagcaggagaccgtcaccgggaagagccctacacaggccctagatgtggccctgggctgtggggagaaggaatttctgggtcttaggtgctagagcatgggtaccttggtgctaaggactccttgccctatgaagggtccagctggaggggaccagattagagcactctttaggtgccaggcccagggcgaggaccccgctgctttggcctagggtctgtacttgccgaggataagtaaataagtaaaagccgttctccataggccagggcacggtttataaggactatggtagaggatggaagagagggaaatggagggagaaattgtaaaggatgtctgccaagtcatcaatagtggacatctgttttctttcttttttctttttctgagacggagtcttgctctgtcgcccaggctggagtgcagtggctcgatctctgctcactgcaacctccgcttcccgggttccaacgattctcctgcctcagcctcccgagtagctgggactacaggcacgcatcaccacgactaatttttttatttttagtagagacggggtttcaccatgttggccaagctggtctcgaactcctgacctcgtgatccgcccacctaggcctcccaaagtgctgcgattacgggcgtgagccaccgcgcctggccagtggtgggcatcttaagttttagcctgcactgcatccgtaccctttcctggaaacagtgcctcaaatttctttttggggagccacctcttttccggattttcagaacatttggttgtgcaaagctgactccacccacttcccgcagtaggagacaggagactcaaccctggctggtcagaagacgccaaactttccccctccgcctccccacaaagatcctgtaagttcctgaattcggctgcactgccccattcttccttttagctgatactttatagcgatgtgtatcttttaaacgccatggagagagaaaatgagagtcgtgtgtgtgtgcgcgcgcgcgcgtttcggaaggtggagggggggttcccactgcaaccctctggtccgggggcccctggagtagttcacctagtcactagagcaggggctccccaaccgcccggccgcggacctgtaccggcccagggccttcgaggaaccagtaagcgagcaggaggtgagtgagcatcaccgcctgagctccgcctcctgtcagatcagggcggcattagactctcatagcaacgtgaacccggctgtgaactgcgcatgcttgggacctaggttgcccacttcttacgagaatctaacgcctgatgatctgaggtggagcagcctcatccggaaaccacttcaactccctcagtccctggaaaaactctcttcctggaaacccgtcccccagtgccaaaatggttagggacggctaccctagaggtctttcccaaccactcgtgtccctgcaggtccgggccagagacatcccccatccatgatgtcaaccgcatgacgtgaatgttaaatctcatgacatttaattttaaacatttcttttaaagttatggctttttttcctttgtagtctgttctcacacatttccatacgtcctcgcaaatctcccgggctccacgccctgcggctatcacgcctgacagagaaacaaccagcaccagcggctgacccggctgcccgggccctcgtgcaggcgggcgggagcggacaggccctggcacgcatgcgctcggggcgggactgcgccttaggcctgcgcgttgccgctagaccagcgggggggcggggcggcggcggacacgcgcctcaggcggcagccgcgcgagagggactttgtgttccgctgaccctcctcggggcgcttcctcccgtgccgcccttcccctcccccgccgcgtccttgcgaggcgcctcccattcggtgggaccgacccggggggatggagggggcacgcttctacaaccctcctgggaccccgaagagacgcccgcgtgcgacctgagacgccgccctcgccgagggcccatgggcgcgtccccacaggcgggcagtggacgtgagggcggcgagcggcggggccgcggcgtccaggagggccgcgctcgggctcggccccgcgcaggccgcgcgcgcgcgctcccgccgccgcccgggccgcgcccgccccgcctctaggcgccggccccggagcccggtccgcgagcagcggcggctgccggagggacgatgagctgcgcggggcgggcgggccctgcccggctcgccgcgctcgccctgctgacctgcagcctgtggccggcacgggcagacaacgcgagccaggagtactacacggcgctcatcaacgtgacggtgcaggagcccggccgcggcgccccgctcacgtttcgcatcgaccgcgggcgctacgggcttgactcccccaaggccgaggtccgcggccaggtgctggcgccgctgcccctccacggaggtgagtgccggcccgggggcggcgggcggtggtcgctgcatcccgcgtaggcggcgggactagggttcccggccccggctctggccctggctctcccgcgctgcccggccgacagccccagccagggtcgaggcttccgtcgtggacagcccggcctgctcccgtgggaaccaggctccaggagcgtgactgggtttttcccttcttttaaaaaagacttggaacggtcatctttgcgttcaggcagctcgtttgctggagggcattgagctaggagtttgcagggacagcgtagacaaaggaggtggtgcaagagcgcaaaactacttcatggggaggacgtctcagcctgtattttggaagcggcaggttcctcaaatcacggacttaaggctgcgctagatctggaaggatgcggcccttttctaatataaaaacgtgccgtttttcttaagtggtaaattggggggggggtgtaaatggaaaatggacatcttccctgttgcttttggctcttgttcttgccctagtagttttactgtaatttgacgcctgaaaatgtcacattatgaggatctgacactaatcggaactactagccaaggcttttcaggtcacgggtgccgaccaaaagggaaataggtaaaattttcaagaattgtctttgaaaccattcggcttaatgtcatgttttcctatgaacaaggactttgtttagttgattatttggtgtaaacatgtatttgtttaaattattagtca

SEQ ID NO: 1193 - DNA, 6000 bp, Homo sapiens
ctggcctagaaaagtattttaatttttactttgaagagttaattatttagaaaagtgttttcagtaatattttgtaggtgattttcattttgttggcattttatttataatgctgattttttgttactacattgaagttagagaatatgatctatataattctgtatttcagaatgtattgggatgttgagacttttcttatggcccaatatgtgtgatatattttgaaatatttaatatacacacatgtagtccctatagggtacaattttaataactgtgttattgtcttattaatcacattgctcatgtaatatccttgtttccttttgaggattctgatgattgtatttccgtctatttttccatgcattttttctgcttttaactttttaactgcatctttttttttcactataaattttagaggtaattttcccaccacttagggtacatttatattttccttttgatgcaagattttatcacaacctcttttctgagcttttctcacccttgtcattttttgtgtgttactgatctttaaacaagcgagatccattcaggcagaatggctacatcttttactcgcctgttttctgtcccctctctctcctctccccagccatcaaagagctatcttgataacttttaaaattatctttcacaacaggcactgtctttaaacacagaggaagacattcatcgggctttccagtcgcttctcactgaagtgaacaaggctggcacacagtacctgctgagaacggccaacaggctctttggagagaaaacttgtcagttcctctcagtaagttgaatcaatagaacaataaaagttgcattcaacatacctggtgatatagagtctgggagaaagaccctagagaaattgagaaatttatgttaaccaatttaaaaaaattgcactatttttttttctaagatggggtctcactacgttgcccaggctggtcttaaactcctggtctcaagtgatcctcctgcctgttgggattacagatgtgagccaccacgcccagcctaaacttctttttttttttaaagactgcaattctataattataccttgcattagtattgcaaaagtagtctctacttttcttgaaaggtaaaattgaaaggtaaaattctcaagttcatttctggttattcagggttcaatacatacctattcacaaactctgatattttaacatatcttcatatgatcacttttaaagagttatgtatattctttttattaaaaaaagataacatatttagaatttttggaagtttgctgacatttgtatttagcaatgcagcctcactgaacatttttctctccaaagacgtttaaggaatcctgtcttcaattctaccatgctgagctgaaggagctttcctttatcagagctgcagaagagtccaggaaacacatcaacacctgggtctcaaaaaagaccgaaggtcagaatgacaagttattgcaccttcctcccaacccgtcctcctcctgcggctcttcctattcctccttcccgcctcttatatcctctctcctcctcctctccctcctatccctcctccctctcctcacccacctccacctctccactccgccccctctaatttcacgggtgtttcagatggtcagagtagtgttgactggcagggcctcctggcatactgaaccttgatggactcataaaggttctgatcagacattcaggttttcagcaacagagatttacttttgtctattctcccaggaccagagtagctgatacaaatgtcaaaagagggccagccacggtggctctcgcctgtaatcccagcaatttagaaggccgaagtggacatatcacttgaggtcaggagttcgagaccagcctgaccaacatggtgggacccccccccgcccaacatctctactaaaaatacaaaaattagccaggtgtggtggcccatgcctgtaatcccagctgcttgggaggctgagacatgagaatcacttgaacctgggaggcagaagttgtagtgagctgagatcatgccactgaactccagcctgtctcaaaaacaaaaaacaaacaaaaaaacaaatgtcaaaagaatctcaggccaggtttccagtttaataacttgcattaaaatatactctccctggcctgtaacattcacatgtcaggtgactccattgtctctgcgagaaggagattggtggacagatcttgcctgaggtatacacttgggctgcctcttcctaggttctgggggacctccatcaccattacctttacctgctaaggtcactcctgacttttcatgtcttccacttaagctcctttagtttgacttgataagcctacatttgattggttaactgccgaccctctctcagggctgatcagttccacagactgaaaataccctccatttggggttgaaccttattcatctacatttcagaaagtgacgtgttccagtctaggcctccaagaccaatgatggtctgatgaaccattcagactcctctgcgccaattatgcttagtaccaccaggaacatttccatttctgtgaataaatgagacggtaaagaatgggagacgttcttcgcttaaagtctcagcagttgtttcccgcattcctgcttggagtatttaccacggatgctctcttcaggcagtgggttagcagggatgccctcagttcattgaaacagtaccacttgatctccagggaaagaaggggtgatctttgtttgcccacatcctcttttccagggatgcctagtgctttgttgaggggattcagcaggaatatctcctccaaaagcttctggaaactccccatgtgcccaatgtcagctcttcccgctttgagccgtccattctggttgcttctgacatgtccatgtatagtcacagaatgttagaactgggtgtgatcatgaagggttggatcaaacactccaattaaccatgtgagacaaacaccccttcagcctatcacatttcctgctggtcttgttctccaacctggtgtaatttttctactttgtaccaacctgctttcctcgagtgacttaggtatctttcaccatcctcaacttggtggatgttctcaaggtgtcagtaatcatgaataccactcatatgtgctgtttttatttctctacataacaacccaaactcagcaaagttgaaaacagaagtttgcttctcaactaatgatccaggatcatccaatgcatcaggttcttataaaaagcaactgaatgtagtctctacttttcttgaaaggtaaaattgaagagttgttgccgggtagctcaattgatgcagaaaccaggctggttcttgtcaatgccatctacttcaaaggaaagtggaatgaaccgtttgacgaaacatacacaagggaaatgccctttaaaataaaccaggtgggggaagctttttaaaatcctgctagtttgatgaagaagttgaatggaaagatttaactttgtaaaagtgtaagtgacataagcgtaagccaaaaggaatttgaaacttaaagtatttctgaatgaatttcttaactcagtagaaaaaaacggaaggagtaaaagatatttgctgcatatatatattatatatacgtatatataatatatatatatatatgtagtgttttatcactgctcttaactgcctttgataatttctcataaaccattgctgccacctagttttggaaactaaagatcttcctataagcccaatttacttggctagaaagcaaaaaaaaaaaaaaaaaagtgttaaggtagtgtgatatgtgggagtgagaggcagtatagggcagggtagagggagagaaggtgaaaacatgtgtctttaattagttatttttaaaattaaagtaagttttgatttgaattgttaactaattatcattaattcagtatttacagctttttaatattaaaacttcatgacaaagaccttagttttgacattgaagtaaaacttaattaaggcaggcattagaataatttgccaaatcttccagcccctaaaaagatactattttaatgtaattaaaaaacaaaagcaggtaaccctcctgcattttttgtaaggtgtactttaacttaaaaaaattagttctctagttgcaaagggtgggaggaggagaattctaaccctggttttagaactattttaatttttataataaatgatctgtatcaattttttaaagtattacgttaataaatgtaatactttgctgagcttctatgtgcttatgcctcttctgtattttaaaaaagttatttcattagagtatcagaattgaaaagattgggttaaaatacattactacatatgtaggtcgttactctttctgagagagtgtatccatttatactccctgtcatgctgttgtggaactataagtttcatcccactttatgattttttttctcatatgttgggttggataaataggaaaaacaatacacatttttttctaattaaatcaaaacaaatttgtatttaatttcatttgattatattgctttcttagatctatttgctgagcacaatttaaatgagaaacatctttctcctctggaaaatgtagggtatcacattttattttgcagaagaaaacctttcccagggtggtactgtgtctgcttgcaatgaagataggaaggaactggttgactttttttttttttttttttttttttttttttagtgttaactggggcatgaatgtggcggtttccatcacaggtgctgaaaacactcttggaggcaactgcagctcttttgaaagttttaattgcgtctttcaataatccttcccccaggaggagcaaaggccagtgcagatgatgtatcaggaggccacgtttaagctcgcccacgtgggcgaggtgcgcgcgcagctgctggagctgccctacgccaggaaggagctgagcctgctggtgctgctgcctgacgacggcgtggagctcagcacggtaagacccgggctgcgggaagaacccagggacacctttgcgggcagaactcgagtgccacttccacctctcatattcaccttctgagttggcgatgcggcagacgcacactgtgcaggcacttggcgttgggatcgaacttttgttcaaggctgacttttcccaatattgtctgcgtgatctgccaaactacacatctcagtcctctgttttttcatcgctagaaggagtgggcggcggttaaaatgccttttaaaataaatcaggtaggaggaagcttataaaaatcctgctagtttgatgaatggcagacttttaactctaaaagcataaatgactgctcggggttattgcctcctagagttatgatgaggataaaatgtgggtaattcaggtaacaagcttaccacattgcctggcaactagtaaatgctctacaaatgtgatccattattacaatcatcattcttagcattatgcttttaaagtctaggaacctgaaatagagaatgaggaagtcttaactttgacctaacaaggctgggagggggcatccagggaggtgtgaagtccagttctcagagggtgggaccagaggcagcctctgagggcacatccaggcactcggcttcctttcagcatggatctccagggtgagagagtcaaccatggcaaatggcaggcagtgggaccccatgacttaagaggtctgtgtgcgcagcagccattggctctccctctgcccaccttcctgaaactatgctccggaaactatgcagaatctctctggggcagataatcctctggtaacctctctgctccggaaactatgcagaatctcacctgggacagataatcctgttggagtggctcacactgagagccctttcgtttccaatccttttctttactagcaatggtttgttgtctttaaaaagactatgtttgaaaaaaaaacacagtcgcctg

SEQ ID NO: 1194 - DNA, 6000 bp, Homo sapiens
aggtttgcatacaggccttttcgatttgacctcaacatacgtttcaaggctcatctcctgctgctgtgttcttcttatccccctcccgacatacgtactcgagcacacacacacacacacacacaacctcgacacacgtactcgagcgcacacacacacacaacctcgacacacgtactcgagcacacacacacacaaccttgacacacgtactcgagcacacacacacacctcgacacacgtactcgagcacacacacacaacctcgacacgtacttgagcacacacacacctcgacacacgtactcgagcacacacacacaacctcgacacacgtactcgagcacacacacacaacctcgacacgtactcgagcacacacacacacaacctcgacacacgtactcgagcacacacctcgacacacgtactcgagcacacacacaacctcgacacacgtactcgagcacacacacacaacctcgacacacgtactcgagcacacacacacaacctcgacacacgtactcgagcacacacacaacctcgacacacgtactcaagcgcacacacacaacctcgacacacgtactcgagcacacacacacacaacctcaacacacgtactcgagcacacacaacatcgacacacgtactcgagcacacacacaacctcgacacacgtactcgagcacacacacacaacctggacacacatactcgagcacacacacacacacacacaacctcgacacacatactcgagcgcacacacacacacaacctggacacacatacttgagcgcgcgcacacacacacacaactttgacacacatactcgagcacacacacacacacaacctggacacacatactcgagcacacacacacaacctcgacacacgtactcgagcacacacacaaccttgacacacgtactcgagcacacacaaccttgacacacgtactcgagcacacacacacacaacctcgacacacgtactcgagcacacacacacacacacacacacaacctcgacacacatactcgagcgcgcacacacacacacacacaacctccagacccttccaagtccatcttcagggaccttccttggtccctgttctctcaagccacctggatgatgcagatctgaaatgccgtttccctgtttgcccacttgcagatctctatttcttgatcatctaatcccagtatgaagcctttcaatcattcaacaaatacgcttcagcaaatacagttgtctcttggtatctgattgattccaggatcctagcgaacattgagctctgcggatcctcaagtccctaatataacatggcgtagtgtttgcatataacctatgcaaatgtaacctgtgtaacatcctcccatacgcttgaaatcatctctagattatgtataatacctaatacaatgtaaatgctgtacaaatagccgttatactgtattgttttaaattttgtattattttttgattttttaaaaaatttttccatctgcagttggttgaatctgtggatgtggaacctgaggtaccggtggccaaatgtacagtgtgctaatataaaaattagtaaaggagggttaggctgtcctgaggctcgcagtccggtgtgggagacagaagatttagtggaaagtccctgtggagcttaagtgttgggctgggccattctaggggtgttcagggcaccttggaagtacctcagtgtgctcgccgtctctccctcagactgctgccctcttgggccagatattgtgtcttcaacttggtaccaagttcccagcaagtgccaagccaagcccatggcaggaagcgaattattttttgttaactgaatgcatgagtcttagaatggaacctgactgtgtcacaagcatgataggaacatgttgggggcagggaaatgttttcaaagttgtggaaacctttgcagaatgaatagggccacgctccatattttgctctttgcaggactttaaggaagtgtgtcaaatgcccacaggtagagctggaaaatgtggcctttgctaaagatgcagaagagtctagagacgcacaacggctgggtcattggtggtgagggactttatttgcagtgaacttggagctaggaaggaagttactgctgggtgggtcctcagtgacggaggtctgcttacacgtttgccaggttttcaggccagcaacatgattctgtcatttctcttgggcttgtctgatcatgaagtagtgatttttgaaaaatccttggacctggtgtgaggatcaaagactcccttcctccggacagtgttggaaaatcctggaaaaatgcttcctctggggccctgtgtattttctatctgggaaaaccatgatgagcaatcagataaagaaatatttttgtgatatgttgtgactttcttaaagtaataaagtagaagagattttaaatgaaaaatataggtaattgcaaaatctcttgattcttagctatttctgaacagatttcatgccccacccccccatacaatttttagtgggggaaagaggagaaaggaaaggaaaagctaaaataaccttgttttcatagttctgtgtttttatcctttcctaaacccattttccatcgctggtcacatgatttggattgaaaggacgtttcctctaggcctcggagcacagaggcagctaacatgtttgcactatgccatcatggtccacgtttactcagacactttcttgcaatggcactgacaacgatgcccccatttgttgccttaaaattcatgggtatggccaggcacagtggttcacgcctgtaatcccagcactttgggaggctgaggcgggaggatcacctgatgtcaggagttcgtgaccagcctggccaacatggtgaaaccccatctctactaaaaatacaaaaattagctgggtatggtgatgcatgcctatagtcccagctacttgggaggctgaggcaggagaatcgctggaattgggaggtggaggttgcagtgagccaagatcacgccattgttctccagcctaggcgatagagcaagactccacctcaaaaaaataaataagtggataaataaataacagctttttgtttaatcaattgtctctatcattataaagttttctatatcattgatttattctctaatctttattatttcttcttttctactgattatgtgttcaatgtatttatactttttctagtttttgaaggtagaaactgaggtcattgatttgaagcctttctcctctcctaatataggcatttcatgctgcaaaatttccccaaagctgacttaataacatcctacaaattttgatgtttttattttcattttttattaatttcaaaatacattctaatttcccttttgattttataatatttttataagtattattcagttataaaaagaaataaagtactaacaaatgctacctggaaccatcaagaatgacccttgaaaacattatgctaagtgaaagaaggcagtcaggaaagaccacatattgtatgattcaatttgcatgaaatcttcacagtcggtcaatccgcagggccagaaaagaaatctggaggtcggagcctctcccagaagccaggggttgtgggaaggaggaaatggagaataattgctaatgggtatcacagttccttttagggtgatgaaaaccttctggagttagatagtggtgagagttggacagctttgtcaatataccaagaactattgaattgtatgctttaaaaggatgcatattatggtccgtgaattgtcttttaataaaggttttatttttaaaaacaagctaggcacctagggtgtcaaattgaaggaggctctgattctcagggccgcgcaaatgcagggttggcacctatgcgtgtggccctcctgaaattttgtgccttaggcacctgccttgcttctccctaattcaggccctcaggagaaagctctaattctggtcaatttgaaacaggagggcacggcttctgggcgacgctccgtgctccagagagagccatttgtctgttcccttcctctggacgtcaccgtgccaacatgaaatgcttccaattgagtccagcctgagatggaagggggtggggggatatctgatgacatcacgaactgctgcatcaactcccccgagtccctgcctctggaccccctgatagaggacacaaggagtgtcctgagcccgtgtgactcagtgtctcttcccatcactttgcgggaaaatggggctgcttacaccacaccgcagcccaaacacctgtggctagagaagggcttgggtactaggagtgaggacgcctggttctgggcccaggactagtactagttagtggtgggacctggaacaaatgctttggttctaagtgaatcccccatattcatgacaagaggcgtggaacacagacccatgggaccttcccactggaacacggagcttggctgtcacccgaccttcgcttccttaagtacaaaagcccagggttccaggctccgtctcctttcccgcagacgccttgtttcttcgcgcggaggccctggacgccgcaggctcccaacctacttctctgggctgtcaggttctgaacccggtcctgaagaggccctggcgccgggggtgggtgaggccgagcgcgcgccttgggaacctggccggcctcaggctggcgggagcattggcggacatcgccccgggcggggcggactggggggaccctgacctgaccctgctcccagctctgacctcggccaccacgcgcggcgcccccgctggtcccgccaggctccgcctaaacgcagaaagcgtgggaggcgcccgaccctgcggtataaaagcggtgcctgcagaggccctagcgggagtccgcggcgagcgcagcagcagggccgggtcctgcgcctcgggggtcggcgtccaggctcggagcgcggcacggagacggcggcagcgctggactaggtggcaggtgagggcgtccccgcgcacggctggggtaggggacgggagtggcgagcttcaggtccaccggctgccaccgagtgatgggaccggaggacaggagaggtcgctcagccaagagccccggggaggcggtgccttctcggtggggtcagcaacggtctctggggggtgcctgggagcggcagccggtctccgccttggcggcccacagccaccgcggacgcctccctcccggatgtctcctcgctgcccttccctggccgaagccctcccctgcagcctcctccccacctgccggccctgtgttctcactgctcttctctgctctgggatccgcaggatgacgtctgtcctgcttcttcactgtcctttacagtcaccagtctcggccgggcgcagtggctcacgcctgtaatcccagcactttgggaggccaaggcggtcggatccttggagatcaggagttcgagaccagtctggcaaacgtggtgaaaaccggtctctactaaaaatacagaaattagccgggcatggtggcccacgcctgtaataatgtcagctatgtgctgaggcaggaaaatcacttcaactcgggaggcagaggttgcagtgagctgggattgcgccactgcactccagcctggcagacagagtgagacttcgtctcaaaacaaaaaaaagaaaaacacaaaaaaaccaccaccaacaacaacaaaaaaataaagccaccagtctcggagtttcaaatctgagcactcttatccatcttaattctttcaataattcagctaaacgaatggggtcctgagaatctgcagagccaggctcagcgctcgcctgcagagcctgcggtctgtggggaccaccagcaagatgaggaatcaccttcgggaggaagggtcgtgctggggagggtcgcgccggcggggtcaagagaacctcctccagggtgggaatcagagcctccgggccgcggtg

SEQ ID NO: 1195 - DNA, 6000 bp, Homo sapiens
aaagtgaaagacgattaaagttaggaagacatgtcaaaagccaagataagccataagcaagacctcttgcaccaaacaagctgccaagttgtgaatgaaagaaaaagttattgaaggaaattaaaagtgctgctttagtgaacacatgaatgataagtaaaacagccttattgctgacatggggaaaatttaagtggtctgtatagatcaaaccagccacagaactcccttcagccaaagccgaatccagagcaaggccccaactctcttcaatcctatgcaggatgagagaagtgaggaaattgcagaagaaaagttggaagctagcagaggttggttcttggttcatgaggtttaagggaagaaggcatctctgtaacataaaagtgcaatgtgaagcaggaagtgctgatggagaagctgcaccaagttatccagaagatctagctaagatcattgatgaaggtggctacactaaacagattttcaatgtagataaaacagccttctattggaagaagatgccacctaggacttccatagctagagaggaaaagtcaatgcctggcttcaaagcttcaaaggataggctgactctgttgttaggggctaatgcagttggtgactttaagttgagaccaatgctcatttaccatactgaaaatcttagggctttaagaattatgctaaacctactctgcctgtgctctcagtggaaccaccaagcctgggtgacagcatgtctctttacagcataggttactgagtattttaagtccactgttgagactcactgttcagaaaaaaagattcctttcaaaatattactgctcattgacaatgcacctgattacccaagagctctgacggagacgtacaaggagatgaatgctgttttcatgcctgctaacacaacgtccattctacagcccatggatcaaggagtaaattcaactttcaagtcttattatttaaaaaatacacttccggccgggcgtggtggctcacgcctgtaattccagcactttgggaggccaaggcgggtggattaaccaaggtagggagttcgagaccagcctggccaacatggggaaaccccgtctctactaaaaatacaaatatcagctgggcgtggttgcgggcgcctgtcatcccagctacttgggaggctgagtaacgagaatcgcttgaacccgggaggcggacgttgcagtgagccgagatcgcaccactgcactcctgcctgggtgacaagagtgtgactccatctcaaaataataataataataataataataataataataataataatgataatgataataataaacacaaaataatttttaaaaggctattagctgccagatatagtgattcctctggtggatctgggcaaaataaattgataaattgctagaaaggttctcaccactcttgatgccattaagaacatttgtgatgcgtggaaggaggtcaaaatgtcaacattaacaggagtttggaagaaattaattccaacgctcatggaagactttagggaaggaagtagctgcagatatggtggaaatagaacagaactagaattagaaatggaacctgaagatgtcacagaattgctgcaacctcatgataaaactttcacagatgaggagtcacttcttatggatgagcaaaggaagtggtttctggagatggaatctgcctctggggaagatgctgtaaccactgttgaaatgacaacaggccgggtgtggtggctcacacctgtaatcccagcactttgggaggccgaggccggtggataacctgaggtcaggagttcgagaccagcctggccaacatggtgaaaccctgtctctactaaaaatacaaaaattagccaggtgtggtagcacatgcctgtaatcccagctactcgggaagctgaggcaggagaattgcttgagcctgggagacggaggttgcggtgaactgagattgtgccactgcactccagcctggctgacagaacgagactctgtctcaaaacaaacaaacaaaaaccaaaagatttaggatataacaaagtaagttgataaagcagtggcagggtttgagaagattgacaccaatttgaaataagttctactgtgcataaaatgctatcaaatggcgttacatgctacagagaaatctttcataaaaggaagaatcaattgatgaagccaactgattttaaaaaattgccggccaggcacggtggctcacgcctgtaatcccagcactttgggaggccgaggtgggtggatcacgaggtcaggagatcgagaccatcctggctaacacggtgaaaccccatctctactaaaaatacaaaaaattagctgggcgcagtggtgggcgcctgtagtcccagctactggggaggctgaggcaggagaatggcgtgaatccgggaggcggagcttgcagtgagctgagatagcgccactgcactcaggcctgggcgacagagcgagactctgtctcaaaaaaaaaaaaaagaaattgccacagccactccagccttcagcaaccaccaccttgatcagtcaggttcattaacattgaggcgggccactccaccagcaaaaagattatgactcactgaaggctcagatgactatcatcattttttttagtgataacatgtgttatgattaaggtatctacatttttgagacataacgtgcacttaatacactgcagtatagtatataactattatatgcatagggctgctaaagcgttgcgtgatttgcattattgtggtattcgctttattgtggtggtttggaacctaccccacaatatctctgaggtatgcctgtatattgctggcaggaatgtaaaattgcacagtagctttgcaaaaacaagtttggcagttcttcaaaaagttaaatatagagttataccatatgactcaccaattctacccactggtatatatccatgataagctcaagaaaacatacctctatacatatatttatacatgaatgttgatagcagcattattcataaatatatttatacatgaatgttgatagcagcattattcataatagccaaagatggaaaaaacccaaatgtctgtcaattgaaagggtaaacaaaatagatatatgtatacatattattatattattcagccataaaaagaaatgaagcctgacaaatgctaccttgaaccatcatgaatgaacctttaaaacattatgctaagtaaaagaagcagccacgaaagaccacatattgtatggttcattttgcatgaaatccccgaaataggaaaatccagagacagaaaataaatctgtggttgccagggattgtgggaaggaggaaatggagaataattgctaatgggtatcacagttccttttagggtgatgaaaatcttctggagttagatagtggtgatagttgcacagcttcatcaatatactaagaactactgaattgcatgctttaaaaggatgaacattatggtatgtgaattgtattttactaaaggtgttattttatttatatattatttatttatttatttatttttatttttatttttattttttgagacggagtctcgcctgtcgctcaggatggagtgcagtggtgcaatctcggctcatggcaactttcgcctccaggttcaagcgattctcctgcctcagcctcctgagtagccgggtctacaggcgtgcaccaccacgccgggctaatttttgtatttttagtagagacgaggtttcaccatgttggccaggctagtctggagctcctgacctcgtgatctgcctgcctcggcctcccaaaatgctgggattacaggcgtgagccaccgtacccaaccttaataagaacaagctaggcacctagggtgtcaaattgaaggaggctctgattctcagggccgcgcaaatgcagggttggcacctatgcgtgtggccctcctgaaattttgtgccttaggcacctggcttgcttctccctaattcaggccctcaggagaaagctctaattctggtcaatttgaaacaggagggcacggcttctgggcgacgctccgtgctccagagagagccatttgtctgttcccttcctctggacgtcaccgtgccaacatgaaatgcttccaattgagtccagcctgagatggaagggggtggggggatatctgatgacatcacgaactgctgcatcaactcccccgagtccctgcctctggatcccctgatagaggacacaaggagtgtcctgagcccgtgtgactcagtgtctcttcccatcactttgcgggaaaatggggctgcttacaccacaccgcagcccaaacacctgtggctagagaagggcttgggtactaggagtgaggacgcctggttctgggcccaggactagtactagttagtggtgggacctggaacaaatgctttggttctaagtgaatcccccatattcatgacaagaggcgtggaacacagacccatggggccttcccactggaacagggagcttggctgtcacccgaccttcgcttccttaagtagaaaagcccagggttccaggctccgtctcctttcccgcagacgccttgtttcttcgcgcggaggccctggacgccgcaggctcccaacctacttctctgggctgtcaggttctgaacccggtcctgaagaggccctggcgccgggggtgggtgaggccgagcgcgcgccttgggaacctggccggcctcaggctggcgggagcattggcggacatcgccctgggcggggcggactgggggtagacggatctgcctctgcgcctagccctgccctccgccgccgcgcgaacgcgcgcgcctccccggctagtcccggcaggcggagccccagttagactgctcgtcaagtgtgggaaaagctccgtggcgtcacaagctactatataaaaggcggtgcccgccggggccgagtgggagtccgcggcgagcgcagcagcagggcccggtcctgcgcctcgggagtcggcgtccaggctcggagcgcgacacggagactaggtggcaggtgaggacgtccccgcgcacggccggggtggagcacgggagtggcgagcttcaggtccaccggctgccaccgaaagatgggacctgaagacaggagaggtcgctcagccaagagccccggggaggcggtggtgtctcggcggggtcagcaacggtctgtggggggtcccctgcagcgcgcagccggtttccgcctccgcagctcccagccagcgcggacgccgccctccccggcgcctcctcgctgcccttccctggccgaagccctcccctgcagcctcctccccacctgccggccctgtgttctcactgctcctctctgctctgggatccgcaggatgacgtctgtcctggttcttcttctgtctttcaaagtcactagtctccagttctaaatccgagcactcttacccattctaattctttcagtaactcagcgaaacggatggggcccttccttccccggagcactcctccagggactgagaatctgcagagccaggctcagcgctcgcctgcagagcctgcggtctgtgggacccgccagcaagatgaggaatcactttcgggaggaagggtcgtgctggggagggtcgcgccggcggggtcaagagaacctcctctagggtgggaatcagagcctccgggccgcggtgtttgagggtgagtggaattaatcccgtgatggacgtggggccttctaagggggaccaggagtttgcgaagaggtgactttgggaggggttcaggatggccagaggtggaggctgtgacctcagtgaggctggatcaagggaggggcaggtggagaagaaaccgttttaacgaggtggctttaagcggatcctaagggccccaggagatttaggaggaaggacaagaggattaagacaccgctttctggtcgggtgcggtggctc

SEQ ID NO: 1196 - DNA, 6000 bp, Homo sapiens
ttggaacctgctgcggcctcaagcgcaacagtaaaaggccctttcaaagggctggtaagggaagagcccaaactgttttttcttaatgatagggcactaggagcccaccttctccaccaaaacaacattaatggcgtgtgggactgcctattccaccctcacgcggtaaccgcggcccaaaggcaggtctccgcccgctaccagtccagcgccccgacctctggcacagaggcggccagcggactccggataagcagagacacctagcggagcacccctgacttccgggagcgcccgcggccccgcccaccgcccgacttccggtaccggcggggcccgcccgccgcgcgcaccccgggcagagtccctctccttccgggaagcccgcggccgccccggcctccacgcaagcacccgagcgttactttcgtttccgcggcaaacgtctggaggcccgggtgagggaagaagcggcggcggagggttggggattactccgacgccgcggcagccttgcccgggcgtgctgggggagggcgcgcgaaccccgaccaggggggtcaccgggactgagcccggcggcctccggaatgttccccgcgcggtgccagtccgctcaccgcgcccttctccgtggccgcgccgtccagccaagtcctgccgcgctccgtcggccccgcccggatggccgcgctctggcgccccagctgtgggtcccctggagtcgccgcgctccggcagctggcccgccgtccgcgtcgagcgcgcccggctggagggcgtggactgttcgcgctgcctcctccccctgccccggcccttgccggggaggaggaccgcgagagcgccgccccgccgctcgtgggacctcgcgcccggggtctgagtcccggagctctcttgcgggctagaggatcgcggactttgttttcaagcgagtggggcggcctacgtaaaagaggaaaccgaaacctccgcgcgcacgagagggagaagggtctggagggaagcactgggtggattacagcgggggcgctatccggaggattcagagctctgcgggttagcataggcaagttagcattcctctaccttcatctgtaaagtggggctgttgaggaggaaatgtgattattttgcagccctttaaaatggtaattgtgaagtctcgagcaaagttggaactgcatgctattcatgtatattaaaaatcaaataataaaattatatgcacatcaggccgggcgcggttgttcacgcctgtaatcccagcactttgggaagccaaggcgggcggatcacttgaggtcagcagttcgagaccagcctggccaacatggtgaaaccccatctctactaaaaaatacaaaaatcaactgggcgtggtggcgggcaccagcaatcccagctactcgggaggctgaggcaggagaatcccttgaacctgggaggtggagattgtagtgagccgagatcgcgccactgcactccagcctgggtgacaagagcaagattccgtctcaaaaggaaaaaaaaaaaaagcacaacaggattacatactgtgaaaagatatgtatgtcaagagaactagccacgttcacaacacgagccacagactgggagaaaatatttgcaaaagacatatctgataaagcactgtgacccaaaatataccaaaaaaaaccctcttaaaatgcaacaatatgaaaatgtacaacttgattaaaggcgggcaaaagctctgaacatacacctcaccatatgtatatgcatatgaaaagatgctcaacatcatgtcattaaagaattgcaatttaaaaaaacaaatactattacacatttattagaatggctaaaattcagaacactgacaacaacaaatgttgatgaggatctggagcacaaggaactcccatacattcctagtgggaatgcctaatgttagagtctggaagacattttggcaatttcttaaccaagctcttcttaccataagatgaagcaactccacaccttggtatttacccaaacgagttgaaagcttatgcccatacaaacacctgtacaagaatgtctatagcagctttattcataattgccaaaacttgagggcatccaagatatcacttaatgggtggacagataagctgtggtacatctatacaatggaatattaagtgctaaaaagaaatgagctctgaagccacaaaaaaaaaaaaaaaaaaaaaaatcctggagcaatcctaaatgtataaatctaagtgaaagaagccaatctgagaagactacataatgcatgattccaactatgtgacattctggaaaaggaaaaactacggagatagtaaaaaagatcagcggctgccagggatttgcagggaaggagggatggataggtgaggcacaagggatttttagggcagtggagtctgacgttacagggttgggtacatctctatacatttgtcaaatgtatcttgaatatacacaaagagcaaaacctaacaaactccggactttggctgataatgtatatgttttatccatattggttcatttttgtaaccatgaatctatgttggtttatcaggtgtgacaaatattccacagtaatgcaggatgttgatggtaggggaggctgtacagtccaggatgtttgtggaaggggatattttctttctgcttagttttgctgtaaaccaaaacagctctaaaacaaagtctattcattattttttaaaagatgtacacatatcaaaaaagacgaaaggcagagctattcactcagcaaagctttctatctactgtatgccaagcaggtactagatacaagagcatctggtgatagatacaagaaatacaaaaaggaattcattccttcagtaaatatttactgagcacctgttctaggcactgaagactcggttgtgaattaaacacaaaaaatctctatgttctggccgtgtgtagtggctcacacctgtaatcctagcactttgggaggccaagtcgggcggattgcctgagctcaggggttccggaccagcctggcaaacatgatgaaacctcgtctctactaaaaatacaaaaattagctgggcgtggtggtgcatgcctgtagacccagctactcaggaggctgaggcgggagaattgcttgaacccagaaggcggaggttgcagtgagccaagattgctccagcctgggtgacagagccagactccgtctcaaaaaacaataaaaaataaaaaactccacgttccattcgtggagcttgcattctaatggggaagacaaaaagttattgcccatcactgtcctctagacatcatgtgaccttgggaggttggaaatgcgttgtttttgcttcattttgtgttcagtgttttaactcagaaacatctatttgggagctttactcattactcccagcaaaagccatgagtgtagactgtgcatgagatgaaggaactggtccttgcagaacaccagaatggaaaaggcaagaaacagcccaaggtgaggaaagaaaaccagcgagaacaaagagctggtactatctctgaagcccgtggaggccaaagtgtgaatatgagggggtaggtctcttggccacaggcctgaaaccaaatgaacccccacccccaggctgcagttcccagtgcacttggaaatgagaccctgactcctccaggtgagcctgggagacctccctgactcctttccatctccccctcctcccccacacccatctccaaggcctgccctctacgcccacatttcttcccactttggatcctgtgcctggtctaatgcccaggccccctcccgagcctctggtctccctagagccactccccactgtcgggacacctcatctgtgctccccaaaacgccacgcaaagcactggagagccttggacaatgaacacaacccgcacccccagccacccccgccacagccgcacggcacctcagaaagccgtgtctttttttttttttttttttttttttttgagacggagtctggctctgtcgcccaggctggagtgctggagtgcagtggcgcgatctcagctcactgcaagctccgcctcccgggttcacgccattctcctgcctcagcctcccgagtagctgggactacaggcgcccgccaccacgcccggctatttttttgtattcttttttttcttttttttagtagagacggggtttcacagtgttagccaggatggtctccatctcctgacctcgtgatccgcccgcctcggcctcccagagtgctgggattacaggcgtgagccaccgcacccgaccagaaagcggtgtcttaatcctcttgtccttcctcctaaatctcctggggcccttaggatccgcttaaagccacctcgttaaaacggtttcttctccacctgcccctcccttgatccagcctcactgaggtcacagcctccacctctggccatcctgaacccctcccaaagtcacctcttcgcaaactcctggtcccccttagaaggccccacgtccatcacgggattaattccactcaccctcaaacaccgcggcccggaggctctgattcccaccctagaggaggttctcttgaccccgccggcgcgaccctccccagcacgacccttcctcccgaaagtgattcctcatcttgctggcgggtcccacagaccgcaggctctgcaggcgagcgctgagcctggctctgcagattctcagtccctggaggagtgctccggggaaggaagggccccatccgtttcgctgagttactgaaagaattagaatgggtaagagtgctcggatttagaactggagactagtgactttgaaagacagaagaagaaccaggacagacgtcatcctgcggatcccagagcagagaggagcagtgagaacacagggccggcaggtggggaggaggctgcaggggagggcttcggccagggaagggcagcgaggaggcgccggggagggcggcgtccgcgctggctgggagctgcggaggcggaaaccggctgcgcgctgcaggggaccccccacagaccgttgctgaccccgccgagacaccaccgcctccccggggctcttggctgagcgacctctcctgtcttcaggtcccatctttcggtggcagccggtggacctgaagctcgccactcccgtgctccaccccggccgtgcgcggggacgtcctcacctgccacctagtctccgtgtcgcgctccgagcctggacgccgactcccgaggcgcaggaccgggccctgctgctgcgctcgccgcggactcccactcggccccggcgggcaccgccttttatatagtagcttgtgacgccacggagcttttcccacacttgacgagcagtctaactggggctccgcctgccgggactagccggggaggcgcgcgcgttcgcgcggcggcggagggcagggctaggcgcagaggcagatccgtctacccccagtccgccccgcccagggcgatgtccgccaatgctcccgccagcctgaggccggccaggttcccaaggcgcgcgctcggcctcacccacccccggcgccagggcctcttcaggaccgggttcagaacctgacagcccagagaagtaggttgggagcctgcggcgtccagggcctccgcgcgaagaaacaaggcgtctgcgggaaaggagacggagcctggaaccctgggcttttctacttaaggaagcgaaggtcgggtgacagccaagctccctgttccagtgggaaggccccatgggtctgtgttccacgcctcttgtcatgaatatgggggattcacttagaaccaaagcatttgttccaggtcccaccactaactagtactagtcctgggcccagaaccaggcgtcctcactcctagtacccaagcccttctctagccacaggtgtttgggctgcggtgtggtgtaagcagccccattttcccgcaaagtgatgggaagagaca

SEQ ID NO: 1197 - DNA, 6000 bp, Homo sapiens
agggttccaggctccgtctcctttcccgcagacgccttgtttcttcgcgcggaggccctggacgccgcaggctcccaacctacttctctgggctgtcaggttctgaacccggtcctgaagaggccctggcgccgggggtgggtgaggccgagcgcgcgccttgggaacctggccggcctcaggctggcgggagcattggcggacatcgccctgggcggggcggactgggggtagacggatctgcctctgcgcctagccctgccctccgccgccgcgcgaacgcgcgcgcctccccggctagtcccggcaggcggagccccagttagactgctcgtcaagtgtgggaaaagctccgtggcgtcacaagctactatataaaaggcggtgcccgccggggccgagtgggagtccgcggcgagcgcagcagcagggcccggtcctgcgcctcgggagtcggcgtccaggctcggagcgcgacacggagactaggtggcaggtgaggacgtccccgcgcacggccggggtggagcacgggagtggcgagcttcaggtccaccggctgccaccgaaagatgggacctgaagacaggagaggtcgctcagccaagagccccggggaggcggtggtgtctcggcggggtcagcaacggtctgtggggggtcccctgcagcgcgcagccggtttccgcctccgcagctcccagccagcgcggacgccgccctccccggcgcctcctcgctgcccttccctggccgaagccctcccctgcagcctcctccccacctgccggccctgtgttctcactgctcctctctgctctgggatccgcaggatgacgtctgtcctggttcttcttctgtctttcaaagtcactagtctccagttctaaatccgagcactcttacccattctaattctttcagtaactcagcgaaacggatggggcccttccttccccggagcactcctccagggactgagaatctgcagagccaggctcagcgctcgcctgcagagcctgcggtctgtgggacccgccagcaagatgaggaatcactttcgggaggaagggtcgtgctggggagggtcgcgccggcggggtcaagagaacctcctctagggtgggaatcagagcctccgggccgcggtgtttgagggtgagtggaattaatcccgtgatggacgtggggccttctaagggggaccaggagtttgcgaagaggtgactttgggaggggttcaggatggccagaggtggaggctgtgacctcagtgaggctggatcaagggaggggcaggtggagaagaaaccgttttaacgaggtggctttaagcggatcctaagggccccaggagatttaggaggaaggacaagaggattaagacaccgctttctggtcgggtgcggtggctcacgcctgtaatcccagcactctgggaggccgaggcgggcggatcacgaggtcaggagatggagaccatcctggctaacactgtgaaaccccgtctctactaaaaaaaagaaaaaaaagaatacaaaaaaatagccgggcgtggtggcgggcgcctgtagtcccagctactcgggaggctgaggcaggagaatggcgtgaacccgggaggcggagcttgcagtgagctgagatcgcgccactgcactccagcactccagcctgggcgacagagccagactccgtctcaaaaaaaaaaaaaaaaaaaaaaaaaaagacacggctttctgaggtgccgtgcggctgtggcgggggtggctgggggtgcgggttgtgttcattgtccaaggctctccagtgctttgcgtggcgttttggggagcacagatgaggtgtcccgacagtggggagtggctctagggagaccagaggctcgggagggggcctgggcattagaccaggcacaggatccaaagtgggaagaaatgtgggcgtagagggcaggccttggagatgggtgtgggggaggagggggagatggaaaggagtcagggaggtctcccaggctcacctggaggagtcagggtctcatttccaagtgcactgggaactgcagcctgggggtgggggttcatttggtttcaggcctgtggccaagagacctaccccctcatattcacactttggcctccacgggcttcagagatagtaccagctctttgttctcgctggttttctttcctcaccttgggctgtttcttgccttttccattctggtgttctgcaaggaccagttccttcatctcatgcacagtctacactcatggcttttgctgggagtaatgagtaaagctcccaaatagatgtttctgagttaaaacactgaacacaaaatgaagcaaaaacaacgcatttccaacctcccaaggtcacatgatgtctagaggacagtgatgggcaataactttttgtcttccccattagaatgcaagctccacgaatggaacgtggagttttttattttttattgttttttgagacggagtctggctctgtcacccaggctggagcaatcttggctcactgcaacctccgccttctgggttcaagcaattctcccgcctcagcctcctgagtagctgggtctacaggcatgcaccaccacgcccagctaatttttgtatttttagtagagacgaggtttcatcatgtttgccaggctggtccggaacccctgagctcaggcaatccgcccgacttggcctcccaaagtgctaggattacaggtgtgagccactacacacggccagaacatagagattttttgtgtttaattcacaaccgagtcttcagtgcctagaacaggtgctcagtaaatatttactgaaggaatgaattcctttttgtatttcttgtatctatcaccagatgctcttgtatctagtacctgcttggcatacagtagatagaaagctttgctgagtgaatagctctgcctttcgtcttttttgatatgtgtacatcttttaaaaaataatgaatagactttgttttagagctgttttggtttacagcaaaactaagcagaaagaaaatatccccttccacaaacatcctggactgtacagcctcccctaccatcaacatcctgcattactgtggaatatttgtcacacctgataaaccaacatagattcatggttacaaaaatgaaccaatatggataaaacatatacattatcagccaaagtccggagtttgttaggttttgctctttgtgtatattcaagatacatttgacaaatgtatagagatgtacccaaccctgtaacgtcagactccactgccctaaaaatcccttgtgcctcacctatccatccctccttccctgcaaatccctggcagccgctgatcttttttactatctccgtagtttttccttttccagaatgtcacatagttggaatcatgcattatgtagtcttctcagattggcttctttcacttagatttatacatttaggattgctccaggatttttttttttttttttttttttgtggcttcagagctcatttctttttagcacttaatattccattgtatagatgtaccacagcttatctgtccacccattaagtgatatcttggatgccctcaagttttggcaattatgaataaagctgctatagacattcttgtacaggtgtttgtatgggcataagctttcaactcgtttgggtaaataccaaggtgtggagttgcttcatcttatggtaagaagagcttggttaagaaattgccaaaatgtcttccagactctaacattaggcattcccactaggaatgtatgggagttccttgtgctccagatcctcatcaacatttgttgttgtcagtgttctgaattttagccattctaataaatgtgtaatagtatttgtttttttaaattgcaattctttaatgacatgatgttgagcatcttttcatatgcatatacatatggtgaggtgtatgttcagagcttttgcccgcctttaatcaagttgtacattttcatattgttgcattttaagagggttttttttggtatattttgggtcacagtgctttatcagatatgtcttttgcaaatattttctcccagtctgtggctcgtgttgtgaacgtggctagttctcttgacatacatatcttttcacagtatgtaatcctgttgtgctttttttttttttccttttgagacggaatcttgctcttgtcacccaggctggagtgcagtggcgcgatctcggctcactacaatctccacctcccaggttcaagggattctcctgcctcagcctcccgagtagctgggattgctggtgcccgccaccacgcccagttgatttttgtattttttagtagagatggggtttcaccatgttggccaggctggtctcgaactgctgacctcaagtgatccgcccgccttggcttcccaaagtgctgggattacaggcgtgaacaaccgcgcccggcctgatgtgcatataattttattatttgatttttaatatacatgaatagcatgcagttccaactttgctcgagacttcacaattaccattttaaagggctgcaaaataatcacatttcctcctcaacagccccactttacagatgaaggtagaggaatgctaacttgcctatgctaacccgcagagctctgaatcctccggatagcgcccccgctgtaatccacccagtgcttccctccagacccttctccctctcgtgcgcgcggaggtttcggtttcctcttttacgtaggccgccccactcgcttgaaaacaaagtccgcgatcctctagcccgcaagagagctccgggactcagaccccgggcgcgaggtcccacgagcggcggggcggcgctctcgcggtcctcctccccggcaagggccggggcagggggaggaggcagcgcgaacagtccacgccctccagccgggcgcgctcgacgcggacggcgggccagctgccggagcgcggcgactccaggggacccacagctggggcgccagagcgcggccatccgggcggggccgacggagcgcggcaggacttggctggacggcgcggccacggagaagggcgcggtgagcggactggcaccgcgcggggaacattccggaggccgccgggctcagtcccggtgacccccctggtcggggttcgcgcgccctcccccagcacgcccgggcaaggctgccgcggcgtcggagtaatccccaaccctccgccgccgcttcttccctcacccgggcctccagacgtttgccgcggaaacgaaagtaacgctcgggtgcttgcgtggaggccggggcggccgcgggcttcccggaaggagagggactctgcccggggtgcgcgcggcgggcgggccccgccggtaccggaagtcgggcggtgggcggggccgcgggcgctcccggaagtcaggggtgctccgctaggtgtctctgcttatccggagtccgctggccgcctctgtgccagaggtcggggcgctggactggtagcgggcggagacctgcctttgggccgcggttaccgcgtgagggtggaataggcagtcccacacgccattaatgttgttttggtggagaaggtgggctcctagtgccctatcattaagaaaaaacagtttgggctcttcccttaccagccctttgaaagggccttttactgttgcgcttgaggccgcagcaggttccaaaaacaaaagcatttctgcgtgatcttagacgactgaggggacgaatgtggtaaccctagcaggcttctgtcactggcaggtgcttttgtgaagtgctgcggaccctcttgagggttgggaagaggataggctgcatcctccttccctaagcatttgacaaagcctcacagggatgcgggggttgcgggggcagggggaggtctggggttgttagttctttctctcttgctgaccatttggctctcccttaatcagagctcttttttattttgggcaaagcag

SEQ ID NO: 1198 - DNA, 6000 bp, Homo sapiens
ataaaatgttggagggcagggagttaaaaaatgaaaaaagaaataccttggggagaggggactctggaaactcctaggctgcccatggtgttgcacagtggccggctacaggtgacccgggtaaccagccttctacacctcatctaaaggctggggccagctctgtctagcggaggaagctcatacagcagcacctatgggccttctttcctaggacataagacattaccaaacaagagaagtgcctcaggaaacaactacatcggtgggacgtgggcagtgggtggaggcggggggctgcctagatgaaggcctgaagactgaggggtggggtgaggcacacgcgtgaggtaagagaccaggagccatagctccgagagcacgggccctccactatgagcgtgaactctagctctgtgactcaccaacctgtgaccttggggcacttacttatgcctcagtttcctcatctgcaaagtgaaacaataatgaccacctcacagaagtggtaaggattatgagaaaaaaaaagtatacgttcatgtatgtatacgtataaatatacatatatttgtatatgtatatatgtaatatataatatatgatataaaaatgtatatgtgtgtatatatacacatatttgtatgtgtgtatgcatatattgtatatgtagatatatagctatatttgtctatgtgtatatacgtatatgtatatatttgtatatgcgtatatatgtacatatgtatatatttgtgaaaacacgtttgttgcctgctttatgtctctagctatggttggcccagccgcccacatgtgtttatccacacgggtgttgtttccttgggctttgagaatgccaacattctcagctgggatcactctgtcagcagggccctactgaccaatcctagtgagaatgaggtaggagcgggtggagacagagggcataaaagataacattgattttaggcctcctttttcattcactacacatcactggagcaggcagaactgtgaagccttccccattccataagggtcatccgccccaccctcttaggccatattcttccaacttcttgcctggttaggtgtcagagaactgtcattttgtcaaggaagccatcctaagtcttcccattagacacttccataggtaagacagtactgtaattgagaattatttctcatgaagttcacagaaggcaggaaacttgtcttgtgcaccatctccagagcctagcagaacccaacgtatgccggcccatcatcaattgaataactattttaaaaagagaactatttaattgtccaaaaaaataaaaataaaaatattgttaaatgaattacggcacactcctaacagaatattatatagccattcaaaattgtttttgacgaataaatctgtaaaaattatattcacatttgtgtgtgttttatatatatatatatgtaaatagataaagatataagtacagataaaaaagacataaagacaccaaaatgttaacaaggattgtatcttgatgataggttgatttttactttcttctttacacttttactatgttttccaaattttccacaatagacatgaattaaatgtaaaattaaaattatttttttgaaaggaataattccttgactcagtatttctttactctgagggatcaaatcagagatgctgataaagattatgtgcaaagctgttcctggtagcattacatagaacagcaaaagtaggtaaaacacttagcatgtacagaggagagaatcagttatgcccatcaacactgaaatatatctagcagtttgcaaaagcgatgttgtgaaagaatgtttaataatatttaaaaaaggtcacagacagtaaagaaacaggcaggaactacaacatgccctgaaaaatgcccttttgagtaaaaggtttctactttatgaggagtcctatttggtatctcttcttcagtctcagccacatctcctcaaatttgtcaagaccaactaggacctgcaggtgctgctgtgtgcggtggagtttgggaaggcctctagttgggtccactggactttgggagcttagctcctgacccaagtcagttctccttacagtcttgcggtttgctagtttagtctgttaatcttctgcatcttctgcatggtgttcagtgatttcttttgtttttcctatccacccctcttttttccacatgaaagattcaactttatgagcactgaatatcttaggaaggccttgtgagtagttgaaggatatacaaaaacagtgaatttaggcagcttatatggccatactgcataaccatattattacaaagccatgacacagagtgacaaagacatgctggcctgttatagcaaataattttaactaataattacgtccatttgaaggaatttgtaaatgttttgcataaatattaattcagggactcaggacagtgaatttgtttctattgaaattaatgtgaaatctcaaggaatttcacgattaccttctaaggcagggtaagtatacatatcaaaatattctaattaactttttccccatttttctatgatgaccacacataacaagagaatggcagaaaatgctggttgcccacctgccattgccccctttcttcccactaacagaattctgattttgctcagctatccaagtgaccagaggatttctccaacttccttgattacagcagcctgatgctttgcctggataaacaaaagctctgagcaaggaagagacttaaggaccagcaagagacaagaattgaaacagagtttaaacaagcatcataacccctgaagcaaattttatcatgatttcaatttgcaaataaagaaactaagatttggagctaagtgattcacctaaagtggtaggatcctggaatgaaatatttgtcccttcattcaaactttcactattggctcactaatacatgctacttctctagatagcaaataatctgtcttcggaaaaatccagatgcaaagacccacccttacagccttactcatctatattaaataaatgtgcgacagtcagaaacacggagaaagtacagaataaactttttaaatacaggaaggtgaggtgcaggggctcatgcctgtaatcccagcactttgggaggccaaggagggcagattgccaagagtttgagaccagattggccaacgtggtgaagccctgtctctactaaaaatacaaaaattagccaggcatggtagtgcatgcctacaatcccagcttcttgggaggctgaggcaggagaactgcttgaacccgggaggcgaaggttacattaagccgcgatcgcgccactgcactccagcctgggtgacagagcaagactctgtctcaaaaataaaaatacacggctcatgtatttttgaaatatatggttcaaaatcaatgttctacagattaatacagtcaaccttttttgccagaatgtaatatccaactaaagcatgggaaattaagtattttcttcaaattcccagatcatatggatgttaacacgttatagattaataagcaccaaaaagtaagctgcccagtttgaaagaggctgtttaagagcttttcttaatactcattaatattcacattccagaaagtacaacatatctctgaggctcagtatagttcagacagaggaaaatgagtattaaaagttatcatttttgctattttatcagtaataatgatacactccaaatttcattttaaacaagcctagtcttcactttttgtgaatagaagagctgcagtattccccatttctttatttatttttttttttgatacagagtctccctctgtcgcccaggatagagtgtaagtggcaatctcggctcactgcaactaccgcctcctgggttcaagccattctcctgcctcagcctcccgcgtagctgggattacagggacccgccaccacacctggctaatttttgtatttttagtagagacagggttttgccatgttggccaggctggtctcgaactcctgacctcaggtgatcctcccacctcggcctccgaagtgctcggattacaggagtgagccaccgtgcccgacgcagtattccacatttctaacaagacaatttcctcttgactcagtccatcttcctagcagtcacagaatgcagatgagtactaagacattgcacatttcaaagttcacttcctgccttggcttcttcaagtgtaagtcagggaagaattaatcattggaacagcctcctgctttgcccaaaataaaaaagagctctgattaagggagagccaaatggtcagcaagagagaaagaactaacaaccccagacctccccctgcccccgcaacccccgcatccctgtgaggctttgtcaaatgcttagggaaggaggatgcagcctatcctcttcccaaccctcaagagggtccgcagcacttcacaaaagcacctgccagtgacagaagcctgctagggttaccacattcgtcccctcagtcgtctaagatcacgcagaaatgcttttgtttttggaacctgctgcggcctcaagcgcaacagtaaaaggccctttcaaagggctggtaagggaagagcccaaactgttttttcttaatgatagggcactaggagcccaccttctccaccaaaacaacattaatggcgtgtgggactgcctattccaccctcacgcggtaaccgcggcccaaaggcaggtctccgcccgctaccagtccagcgccccgacctctggcacagaggcggccagcggactccggataagcagagacacctagcggagcacccctgacttccgggagcgcccgcggccccgcccaccgcccgacttccggtaccggcggggcccgcccgccgcgcgcaccccgggcagagtccctctccttccgggaagcccgcggccgccccggcctccacgcaagcacccgagcgttactttcgtttccgcggcaaacgtctggaggcccgggtgagggaagaagcggcggcggagggttggggattactccgacgccgcggcagccttgcccgggcgtgctgggggagggcgcgcgaaccccgaccaggggggtcaccgggactgagcccggcggcctccggaatgttccccgcgcggtgccagtccgctcaccgcgcccttctccgtggccgcgccgtccagccaagtcctgccgcgctccgtcggccccgcccggatggccgcgctctggcgccccagctgtgggtcccctggagtcgccgcgctccggcagctggcccgccgtccgcgtcgagcgcgcccggctggagggcgtggactgttcgcgctgcctcctccccctgccccggcccttgccggggaggaggaccgcgagagcgccgccccgccgctcgtgggacctcgcgcccggggtctgagtcccggagctctcttgcgggctagaggatcgcggactttgttttcaagcgagtggggcggcctacgtaaaagaggaaaccgaaacctccgcgcgcacgagagggagaagggtctggagggaagcactgggtggattacagcgggggcgctatccggaggattcagagctctgcgggttagcataggcaagttagcattcctctaccttcatctgtaaagtggggctgttgaggaggaaatgtgattattttgcagccctttaaaatggtaattgtgaagtctcgagcaaagttggaactgcatgctattcatgtatattaaaaatcaaataataaaattatatgcacatcaggccgggcgcggttgttcacgcctgtaatcccagcactttgggaagccaaggcgggcggatcacttgaggtcagcagttcgagaccagcctggccaacatggtgaaaccccatctctactaaaaaatacaaaaatcaactgggcgtggtggcgggcaccagcaatcccagctactcgggaggctgaggcaggaga

SEQ ID NO: 1199 - DNA, 6000 bp, Homo sapiens
gtgaccttttttaaatattattaaacattctttcacaacatcgcttttgcaaactgctagatatatttcagtgttgatgggcataactgattctctcctctgtacatgctaagtgttttacctacttttgctgttctatgtaatgctaccaggaacagctttgcacataatctttatcagcatctctgatttgatccctcagagtaaagaaatactgagtcaaggaattattcctttcaaaaaaataattttaattttacatttaattcatgtctattgtggaaaatttggaaaacatagtaaaagtgtaaagaagaaagtaaaaatcaacctatcatcaagatacaatccttgttaacattttggtgtctttatgtcttttttatctgtacttatatctttatctatttacatatatatatatataaaacacacacaaatgtgaatataatttttacagatttattcgtcaaaaacaattttgaatggctatataatattctgttaggagtgtgccgtaattcatttaacaatatttttatttttatttttttggacaattaaatagttctctttttaaaatagttattcaattgatgatgggccggcatacgttgggttctgctaggctctggagatggtgcacaagacaagtttcctgccttctgtgaacttcatgagaaataattctcaattacagtactgtcttacctatggaagtgtctaatgggaagacttaggatggcttccttgacaaaatgacagttctctgacacctaaccaggcaagaagttggaagaatatggcctaagagggtggggcggatgacccttatggaatggggaaggcttcacagttctgcctgctccagtgatgtgtagtgaatgaaaaaggaggcctaaaatcaatgttatcttttatgccctctgtctccacccgctcctacctcattctcactaggattggtcagtagggccctgctgacagagtgatcccagctgagaatgttggcattctcaaagcccaaggaaacaacacccgtgtggataaacacatgtgggcggctgggccaaccatagctagagacataaagcaggcaacaaacgtgttttcacaaatatatacatatgtacatatatacgcatatacaaatatatacatatacgtatatacacatagacaaatatagctatatatctacatatacaatatatgcatacacacatacaaatatgtgtatatatacacacatatacatttttatatcatatattatatattacatatatacatatacaaatatatgtatatttatacgtatacatacatgaacgtatactttttttttctcataatccttaccacttctgtgaggtggtcattattgtttcactttgcagatgaggaaactgaggcataagtaagtgccccaaggtcacaggttggtgagtcacagagctagagttcacgctcatagtggagggcccgtgctctcggagctatggctcctggtctcttacctcacgcgtgtgcctcaccccacccctcagtcttcaggccttcatctaggcagccccccgcctccacccactgcccacgtcccaccgatgtagttgtttcctgaggcacttctcttgtttggtaatgtcttatgtcctaggaaagaaggcccataggtgctgctgtatgagcttcctccgctagacagagctggccccagcctttagatgaggtgtagaaggctggttacccgggtcacctgtagccggccactgtgcaacaccatgggcagcctaggagtttccagagtcccctctccccaaggtatttcttttttcattttttaactccctgccctccaacattttattatgaaaaacaccaagtctgaaggttacgtccaccacgactatcgtcttaacaccgcttgcttcatcgtgtaattctccatctcctttcccgtcatctgtccgtcattgtctgactttttgatgtatttccaagtacacatcagtacacatctcgaaatacttcagcatgcataccatagctagagttcaatatgtttacaggtttgtcttttgatgtaaaatttacctgctgttgttgggagtacatctgctgagtatgggcagatgcgtatgcctgcaaccctagcccccgttgatatcctacaacattatcatcaccccagaaagttccttcatgcccctgcccactcagcctcaccgtgctcacaggcggccagtgttctttttctgacacagattggttttgacttctgaaccgtcatataaatagaattacatagtatgtatgcttttgtataaggcgactttcacttatcacgtttttgcatttcgttcatgcggttttcattcatgtgtatcagtagttcatttttattgctgagtagtatcccatcgtgttcatacaccagtgtgttcactcattctcttactgatgggcagctgtttccagtttggagctattataaataaagttgctatgaacattttacaagtgttttccaacatacgttttcatttctcttgggattggaattgctgggtcatagtgcaggtgtttgtggttttataaacaaaataaatgcctatgaaatttcaatgaatattttatgccccagaaagagtatttttcatggtctgtatctggatgtagatatttattattttattttattttaatttttttgagacagagtctcactttgttgcccaagctggagtgcagtgagtggcatgcgatctcggctcactgcaacctccgcctcccaaatttaagcaattctcctgcctcagcctcctgagtagctgggattagaggcgcgtgccaccacgcctggctgatttttgtatttttagtagagacggggtttcaccatgttggccaggctggtcttgaactcctgacctcgtgatccgcccgcctcagcctcccaaagtgctgggattacagacgtgagccacggcgcccagccgggatgtgggtatttctggaatacaaaacatccatagccctccttttactctcaaagcaaaacacagacacgcacattcacatgcacacaccagtgtgtccgtgtcctgttggtttgcatggagtttctgttttgccacgaagctttttgccagcccttttcccaaagtgtttgtaccattttatactcccaccagtgatgtttgagaggtctggttgcttcacatgtttgccagtgtttggtgtattagtctttttagttttggatatcctggtagttgtgtagtggtgtctccttgtggttctccatgggtttttattctatatttcagtttggggaaaatgaatgaatggaagaaaagaagggaggaaggatgaagcaaatagctgtgctttgagatctgacactgtatacttcacagccctgatggacattctccaaattctactcctttttcacattttcttcttagagtttgcattgttctttttatattcttcagattccttcttttgttcataattacttaaacctattcattttctaatgcctttcagttgttaatttactgaagttctttggtgcttactagtgctgcttgctgtagctgcagggtctgtctcacagtgaattttttcttttgtgttttataattttggaaagggagctcatgttaaatttgtatttgtaggaattctgtctggcctggcttgaggttgttgtttgctttagcctataacctcaggatggcatcagcctgtgaccacttcctgtgtaaaagttcatagtttaggcgatcctctcaattcaaagtctgtatctatttcaagacaggcccaaggttataaatttgcacaaactttttttttttttttttaataccttgtgcccagtccaagacaaatatgtttgtttgccatgggctgctttttttctagttcatcctttcatcaaagggttgcacattgagcagtgccgtgttaaggggggattcttcattctaccttcttttcttgtattccttgacctcagctgggctttaaaccttgacttctggatggcgaggttggcactcccctgtgtgagctactgcctgcctccggtgctctgtttctgtccctagagttcttttcctttccacggagttttggtatgcatttcaatgaatgtttgtattatgttgtccaacatacttgtgtcctttatagctggagggttcttaaaattttctaatgctccatattgccagaaataaaaaggctgagggaataaatattatagtcttctctgattcttaaaaatatgaaaaatagctcatcagatgactgtaagtctatcctcagaaatccaaggcacaccaagcatgtggtggaatgttaacaaaagtttttaaaaatgatcttttctgccaggtacaatggctcacacctgtaatctcagcactttgggaggctgaggtgggaggatcccttgatcttaggagtttgagaccagcctgggcaacatagtgagatcccccggcccccccatctctacaaataattaaaaaatcagctggtcacggtggggtgcacctgtggtcccagctactcaaggaggctgagggaggaggattgcctgagcccaggaggtcgaggctccagtgagctatgattgtgccactgcactccagcctgactgacaaagtgagaccctgtctccaaaggagaaaaaaaaaaacatatatatatatatatatatatatatagtcttgccctgaggttttctctctgttttctttacagggtacagctctgccggggggggaaaaagtggtaccattttgggcgttcttgagcttcagaatgcaaccagacatgtccttgaatgtcattaagatgaaatccagtgacttcctggagagtgcagaactggacagcggaggctttgggaaggtgtctctgtgtttccacagaacccagggactcatgatcatgaaaacagtgtacaaggggcccaactgcattgagtgagtagggagcaggggtgggtgggctaagttctgagcgggatggggacgttggctgttgtggagccgttggctgctgcggagccgttggtgggtagagtgagagggagcctgccaagatgtcagggtgacgatggctcttcggattgttattgtcgctgatgtggactctgagactgggtagtgaaggactctcacagctggtaagtaacagaagagacatgaacaagaaggaaatagagaaagacaaagagataagtgtggtggggggacaatgaaaaggaaacaggaggatgggtgaagacagacctattcactcgcttcacattttcagtgaggaccagccctaagtataaaaatgaaaaggcagttcattcctgagaggttctgagagccttccctttaaagcaaccagtagagtggtttcacctctctccctcctttgtcagagtggttttgagagaggctgttttttttttttttaatcgttctgtccagcacggtcttttttcaggttaccttgctgctgttcatgtacttttcattcattgattcattcattccttcattgatttacatttttggagcatgcactgccagttactgggcaggagtactgtgaggaagtgagaaaccgctctgccttctaacgcttctggcctgtgcctggaagagatcggtacagacccaagcatgaccccagcacgtgggagtgatgtgttggaggtgtgcaccaggctcttgaggcgctggctctgccagcctcagcatagcacctttcctgcccacaggcacaacgaggccctcttggaggaggcgaagatgatgaacagactgagacacagccgggtggtgaagctcctgggcgtcatcatagaggaagggaagtactccctggtgatggagtacatggagaagggcaacctgatgcacgtgctgaaagccgaggtagagagggcccctccgcacggggatccccagcgcttgggcc

SEQ ID NO: 1200 - DNA, 6000 bp, Homo sapiens
ttggtttctatacatttctatcaaatacatatacagattatgtgacatcaagagcccaagagactttgggggcatctcacactttctgtgcagtgagtcttccagaagtctgagagatcgtgagaaagactactgaaaagcttagtaggctggcatcaattccacaaaatacgtgtatagcccatataacatagggtttgaaactaactaaaaagtaaaacctcagcagtcagtcaagggggctgtgaaacagtgttacacaggaagttgcatggtttcctgacttctacacaggaggggagcagttttcaggttgcactcaatctaggacagcagtccccaacctttttggcaccagagactagttttgttgaagacaatttttccatggatagaagggtggatagtgggtagttttggaatgattcaagtgcattacatttattgtgcactttatttctattattacattataatatataatgaaagaattatacaactcaccataatacagaatgaatgggagggctgagcttgttttcctgcaactagatggtcccatctgggggtgatgggggacagtgacagatcatcaggcattagattctcataaggagtgtgcaacctagatctctcgcatgcacagttcacaatagggtttgctttcttatgagaatctaatgccactgctgatctgacaggaggcagagctcaggcggtaatgcgagcaatggggagcagctatagagatgaagcctcgctcacctcctgctgtgctgcccagtttgtaagaggtcatggaccagtactggtctgtggcccaggggttagggaccccctgatctagaagacaaaggcaggatgtgatcaaacctgtctcttcccactgcagtgtggcagaaactcagacaggccacagagaaaaaaccaaagtagcagcgctatgcaaagggaaatttttgcctaatataataaagatctgagggaaatgagaggagagcacccacagtcggatacaaatgatgaggaaggtacatttgccactggagacagagtgctacatcatcactgtgtagcgtcaagactagttaggactgtctgccatctactggcacatgtaatgtaggttacattggcccaaaccccctttccctgaccttttgtgggtcacagagtggagagggctgtcacattgcacactgcacaggaagcaatgcagaatctgttcctaagggacctttgcttgtcccacctgctggcaggctgcttccctccactccacagcagccaatcacctgcttatctctcctctccccttctctcctcctctcctctcctctctcccctccaggcctttcttttttctcccctcactccctggagtattgtattttctcttgtggcacagcttcacccttacttgcttacatacatagctggactcctgcccccagagtctcacatttgattctttaagtctctcctcaaacaaacattttctccttaagaacggctttagggatggtcatcttgataagaatatttttactctgcaagaaaagaaaggcaccgtcctcaagaagacctctatgaaaggaaagcaagggtgggtgcagtggctcacgtctgtaatcccagcactttgggaggctgaggtgggtgaatcacctgaggtcaggagttcaagactagcctggccaacacggcaaaaccctgtctctactaaaaatacaaaaattagctggacatggtggtacacgtctataatcccagctgcttgggaggctgaggcaggagaatcacttgaacccgggaggcagaggttgcagtgagctgaaatcatgccactgcactccagcctgggtgacagagtgagacttcgtctcaaaaaaataaaataaaattatatatatatatatatgaaggagagcagtgtgagacatggaagaagaggaggattgtccaaaaagtagaaaagaaatctgaatgagaccagagcacagcttcttcagctacagcctgctaagagattagaagtcagcatcaaagcctgacagtatgtgtgtgtttggttaccattacgtagacataaccatattttaaataactaccataaaccgattctaattttattctataattagggaataggacattctcaaagaacactctggctgtctttataaaggttctagttaaagaactccagacatcattatgggttgatttctgaactagacggccataactaatgatttcaatcaaatcccattttcagtaggcagaactagtaagtagaattccttagagaatgtggcttactcttaatcctatatgggtatgttatatatgtgttatataaaatgccatctgtcataaaacaaaacattttattaagaagattttttttaattgtacattctgcaaatgatcaaattctgtaagctaaaccagaggtcctcagaatgtggccccagatcaacaacactggcatcacctgggaacatgttagaaacacaggttctcaggcctcaccagacacacaggagcagaaactctggggtggggtccagcaatctgcatgttaacaagccccccagctgacgctgatgccctgaagaccactctagcctgaagaccaatgtcctagggtcaccatgatcacaaggttcctgattggtccatttggaatatttctaaatgctagtgcgatccctgaattatgattcctttcatttccaggtcttttgattctcaagaatctgtacccctgtcttcagatgacactgtttctgcaataaagccaatgtttgtggccctgcccaaactcatatgttgaaatcctaagcctcaaggtgatggtattaggaggaaaggcctttgggaggtgattaggtcataagaatggagctctcatacatgggattagtgcctttataaaagaggcctaagagaaacccttcgccccttccaccatgtgagggcacagccagaaggcaccatttgtgaaccagaggcccctcaccagacactgaatcttctagcaccttaatctccaactttggacctccaccctccaaaatggtgagaaataaatgcttgtcatttaagccacccagtctaaggtatttgttatggcagccagaacatactaagaccatttccctgccacagctgcccacagctctctgctaggttttctgctccctgccctgcactcctggactcctcctccagtgtcaatcatgacgcactttgcagggaaggaagttctcaccctcaattgctctcctcactcacatatgttcagagctctctttacaactgctggagcactcacatatcccaagggaaagcttctgtgttccatcctggaccttctaggggctaccacgcttccaccagggccgctgctctcaccataagcttcagactctcatctcccgagatcttgctcacagcgcagctgccttccgctcacacaggccagaggggccaccttgtctcttcttagagcaacttcccaccactcccttggggctcaaccttcgctttatgttctgtaaaagccagcagttctcaaacttgagactgcatcaggcacacctggagggcttgtgaaaatccagaatggtgagtcccgccccccagagtttctgatttaataggtcttgagtagcccagaatttgcatctctaacaagcccccagtggaagctgaggctgtcatcttcccaggccgcactttgagaactgctgttgaaagccatcatcactgaacttatttgcagaggtacctaaaaataatcaatccacaactgttccttctccaaatgaccactctctgatgtctatcaagaaatccaaattatttaccaattaatttattggtaattatgttccacctatttcaaaaaaagttttgagctaactctaatttttgcttagccatcagcagaaatagtaaatttacctagtgcattcagaaaaatgctgttcctcccagggaaaatagtgttttctattgctcctgaaatctgctgaccttggcactgactctggtcctcttacattaaggtgaagctggggcggggttgaggaatcaagactgagaaaccttgctgtcctgcagcagaatagagatacatggaagaaggaagacagaatcttggctttgaagagaaagtgagatgtgatgtcaatgatcccactaacaccaaaaccagcaaaccagcctccttaagggtggccccacctccccacccttcctactttttctaccaagccaaacccagaaatagaacacggctcacttctcagggctattgcctctgcctcatctccagagaccacatctgcagctcccaaaacaaggtctgttctgcagctggacaattcactgctaaaatcccaaacctaagagcagagccaaagccagaggagaggaaagtgacaatagggccaaagcctcattccagattccaaatgtcattctgtagccctcgtgctatcaactgctgcctgctggctgcagccaggtccctgggtccatacacagcctgcatcaagagcctgcagagactcgggggctggagatgggaaacagatggtggcctgcgctttgtctttcccaagtttacagcctcacctgggggtggaggctgttctgaggggcccccaagaggtaagttcacgcatcactactgaccctctccctgtgaaagcagaaagtcagcacgcatcctaccccagaccagaccagccacacctgtagattcaaggtcctgggggaacagtattcaaatgcctctgctctcagccttttacttctgactgtggttcccagcgagtctaaaatttgagaagtgaaactgaacatccaactgccttggtgaggggagaggaagaaattttacaggctttttattggccggttatttttctgtgtgtcccatacaggcccccaccatgaagggtttcacagccactctcttcctctggactctgatttttcccagctgcagtggaggcggcggtgggaaagcctggcccacacacgtggtctgtagcgacagcggcttggaagtgctctaccagagttgcggtaagcccttgcagtacacccatgtgtgtttatggggaaagcaaggcccacagatgtgagccgctagtgctcagttggagttggggtgggaggggagaggggaccagcagctgaacactttctccacctgcagcaggtctgggagggccactgggagcttttggaagaaggagcggtggggccaggactgggagcggaagagaatggcagaacaacaaagagtacaagaaagagaaattgaatctaaatatagccatttactaacaccacagaacccaaaaaagaacaaaatgatcagtgagtctaccaaatcatcaaacctcaccagctgaaaattaggaaaagcagcttccagtaggcccttcctcaacaccgtacacctgggctacctttccatctgatgtactttgcaagtgaagtgaaaagatcacttctgcccaaagagaagattcctgtccctctctggacactttcagagctttcactgcagcagtagctctcatgaattcagcaagcacttcgcatgcagctatcaatgccagggtttctcagtgctagagataataaaagtgcatatgccaggcctgtcaccccagcgggccaacccaatacgccaacagataattgcaattcagtgaagagaatgcagtgaactgtggtaagaagtgtcagaaccaaccaatcgggctgtgtcttagtcagctagggctgccataacaaaccaccacaggctggggacttaaataacagatttatttcctcacagctctggaagctgggctggtttctcctgagacctctcttctttgcttctaggtggcatcttctccctgtctcctcatgtgctcttccctctgtgtacatctgtgtcctcatctcctcttcttataagtacac

SEQ ID NO: 1201 - DNA, 6000 bp, Homo sapiens
gtcaggaccacttatgttagaggagtgtatgtgtcatggtggttacaaaggtcatcccaaattgagtataattatataccacggatgttttcatcgcagcaccatttctatttataatgcagttttccaccatgaagtgggtcttttcagtgcgtgtggcgtcatgtttctggacataaagatggtagtgttccacagtggcccccttggcctccgtcactgacatgttactcgatgccagactcaaatggagcagccctggtacacttagccacgtgataaatcatcccattcctgctctcaggagagaatcgcagatccatttttggagaaacacatagacgtcattctgtaaagaactgtcaagggagaatggctttaaagcagactaccatgtagcacctttcccttaaattctccagccagagcttccatcagcgtttttcacattgacttagaacaggctgctttccatttttatgttcaatgtaaaacaggtatcattgcctttgctattgtaactaggttctttctgttgcatagagaggatgtcacaaagggtgctaggagaatagggtggccagtgagaaaagcggctgaggatgagacttcagtgggtatcctggagactccaggcttagaggtgcagactcaagtgtcagacacccagggctgcctggtccacaccacagcgccctggagagttttcaacctgcctcatccccaaaagacagtccccctccccaccttcatcccctgtacagtgtccagccacctcctcaccacatctcccaggcttgggacccagggacttgcattgatctctctgcccttcagaggctgccagcctccctttgtgtgtagcctatgaaatgcagattgtgtaggtatttctgtgtgaccttggagcctacgtaactgcatttttaaaaaattactgattcgtgtatctgcaatcccaaagcatggccctgctcaactttaagggatgtacttgaactgtggctttttcctcccttgaagggcactgtgttggcactcactgaaaataacttcgatgacaccattgcagaaggaataaccttcatcaagttttatgctccatggtaagtggctgtttaattagaaactactttgtccatgtgtactaagtcacatcatgtttttcagctcatctgccacccctccagactcaatgttgggcacatgttacatttatatgtaggtcatgttgtaggaaataaggaaccgttatcatgctcctatattcaaatattttaaacttcaatggccttaattatatatggagaatgaggctacagttatatcaactttgattatatatggagaatgaggctaaagttatatcaactttggagaaaacataaaaatggaggcaaattatgatggccatattcagttttgtggtatctgcacttttccaaatagatggcttttctttttggctaaacaatgagtgtcatgatgtagctttgctcctcggttcttttaagtactcggatttcttttgtagagaaatccagtagagtctgttagagccattcagtatgctacgcagtttcctgaacctgcatgccacgtggtcttggagaccagagcagaaatggattgcaggtagtgtgagatccagacaaccttggttctaagacttaccgtgaatgactgtatagtaaacttggatgtcctttaattcctttgaaccccagttccctcagctgaaaaatgggagtaactttttgtcttcacaaataaaacaatccatttggaaaagcagagtgttaggacaacagtagattgtttatctaaacatgataaaggcgtcacttttcttgtttgttacactccacatgttcctgagaaactaaccataggggtaaaaagttaataagcacaggacttgaacgaaccatagcaatgcctttcaaatcatttgcaacatttaaaaacctaaagctccacagatcaagtatcaaaaaggaggatcccctttggctgaaggggagccatccatacggcaggagggggtcagaagagacaagggaacagagtcgggtagaagggagggtttgaaccaaacttaatcatggccttgatgctcaccccacatcgctgaagtaccaaggaggccttaaaatggttttgaaattgtgagaccataagcaatcaaatctaaaatgtctttggcattcaagtgaccttttagaaattgtgtggcatctgccctgttccctgttcctctgctcctgtgctttcataaaccagttagcacagttcaccatggcatggaaatggtctcagaatctcaacttgttttgagactggcttgcttctgtcacattatctgaaagtctaccttggatcaacttttgggttcttcatttgggataggaggaggaagagttaatgtgcacccagtgggagaatttggtattttacaaatttctaggcaattgttgactgtcccatacagaagaaacagagcttgtcttggcagcagagtgtaggtgaatgatctcgacccaggatttcaacgaagctgccatttttctcgtcttaggtgtggtcattgtaagactctggctcctacttgggaggaactctctaaaaaggaattccctggtctggcgggggtcaagatcgccgaagtagactgcactgctgaacggaatatctgcagcaagtattcggtgggtacttggatggatgcttatgggagctctcagtatgggggcagatcccaagggaactgtgcctcaaccacgataactcactctgctctcatcttctcaacaatgtggtttttatgtccctttgagttgtttgtttggagaagcaaaagagatcctctctcaaagggaaggcattcttcttcgcccgctttgtagttagtatccatgtttcagtgcaggttttcaggccttgctgtctgagtaacaaggccgtgaagtaacagaccccacgccatagactgtggggcttcccacaccgcgactcttgatgattgaccagtggtctgtagcctttgccataaatacccgagtcgctcatttttcacacataagccagcattataaaatgcagtggctgaatctaagaatcatttcaacataacctcctttctgaaagggccatgccagcaagtcggtcctgtgcttgggttaactactgccttcattccaagctgttagcacagtctgatggcctggaagatttgtcattttttttcttctttgttattcagacacttttggagccctttagatggagaatagacgtaacccagacatagtttccttatcattaaaagataccagttgttttttgtgccctaaaattcttagaaacgagttgccactgaaacatgtatcctcaagaggatcttgctctcatggtctggtctgcagaccaccagggcatcgccagggaggtcattggaaatgcagactcccaggcctgctcaatccaaatctgcaccttcagcagatccgcaggtgatcgtgtgcacagtaaagactgaaagcgtctgctttagggtaaagtcgttcctttgaggctgatctttaatgatgtcattttgaattcagaagtgaacacacagccccacggctgtgctttctaaacagtagtctgctcctgttttaatggaatatacacctttaaaaattagccacagaatttttccagccacaacggtaggagtgtatctggttttatttaggaagcaatttgcatgtgatctggaccgctggtttgcaaacttttttcttttttgttttaaggtacgaggctaccccacgttattgcttttccgaggagggaagaaagtcagtgagcacagtggaggcagagaccttgactcgttacaccgctttgtcctgagccaagcgaaagacgaactttaggaacacagttggaggtcacctctcctgcccagctcccgcaccctgcgtttaggagttcagtcccacagaggccactgggttcccagtggtggctgttcagaaagcagaacatactaagcgtgaggtatcttctttgtgtgtgtgttttccaagccaacacactctacagattctttattaagttaagtttctctaagtaaatgtgtaactcatggtcactgtgtaaacattttcagtggcgatatatcccctttgaccttctcttgatgaaatttacatggtttcctttgagactaaaatagcgttgagggaaatgaaattgctggactatttgtggctcctgagttgagtgattttggtgaaagaaagcacatccaaagcatagtttacctgcccacgagttctggaaaggtggccttgtggcagtattgacgttcctctgatcttaaggtcacagttgactcaatactgtgttggtccgtagcatggagcagattgaaatgcaaaaacccacacctctggaagataccttcacggccgctgctggagcttctgttgctgtgaatacttctctcagtgtgagaggttagccgtgatgaaagcagcgttacttctgaccgtgcctgagtaagagaatgctgatgccataactttatgtgtcgatacttgtcaaatcagttactgttcaggggatccttctgtttctcacggggtgaaacatgtctttagttcctcatgttaacacgaagccagagcccacatgaactgttggatgtcttccttagaaagggtaggcatggaaaattccacgaggctcattctcagtatctcattaactcattgaaagattccagttgtatttgtcacctggggtgacaagaccagacaggctttcccaggcctgggtatccagggaggctctgcagccctgctgaagggccctaactagagttctagagtttctgattctgtttctcagtagtccttttagaggcttgctatacttggtctgcttcaaggaggtcgaccttctaatgtatgaagaatgggatgcatttgatctcaagaccaaagacagatgtcagtgggctgctctggccctggtgtgcacggctgtggcagctgttgatgccagtgtcctctaactcatgctgtccttgtgattaaacacctctatctcccttgggaataagcacatacaggcttaagctctaagatagataggtgtttgtccttttaccatcgagctacttcccataataaccactttgcatccaacactcttcacccacctcccatacgcaaggggatgtggatacttggcccaaagtaactggtggtaggaatcttagaaacaagaccacttatactgtctgtctgaggcagaagataacagcagcatctcgaccagcctctgccttaaaggaaatctttattaatcacgtatggttcacagataattctttttttaaaaaaacccaacctcctagagaagcacaactgtcaagagtcttgtacacacaacttcagctttgcatcacgagtcttgtattccaagaaaatcaaagtggtacaatttgtttgtttacactatgatactttctaaataaactctttttttttaaaagtctggtctttccttcaatgttacagcaaaacagatataaaatagacaataaattatagtttatatttacaaaaaaagctgtaagtgcaaacagttgtagattataaatgtattatttaatcagtttagtatgaaattgccttcccagtacatgattgtgaaaaagacatttagaaaatattctaaaatttaatctgagcctcactttctacaagggaaatcatgatttccgttcataaacagcatgctcatccccctaacaccattcttataagctgggcaccctcattttattttcttcgttggttctaaccctgtggcgtggtatgctgtatagtaaaaaggcagagaaccactttactgaaaaggtactagagccggcagtccagaagttaatgtgctggtcaaagaaccgttctggtaaagaagaggtgagcattgccttcacgt

SEQ ID NO: 1202 - DNA, 6000 bp, Homo sapiens
ttttgaatgagacaaccctagaaactttatcccaggtttcaactacaatcccatagcattatgacacatgggtttgtttgctatttaatatggcaggaacacactgatgcctacaatgtaaccactttgctgtatcgctttttaaaatgctttttttttaaacacacttgcttatatgaacactcaacgcttagaattgtgacttcttcctcaaaataatttaataatctgttaaatctccttttattttctgacagattacctcaaaaataagcatttaagtcggtagcagtggctcatgcctgtaatcccagcactttgggaggccaaggcaggagagctgcttgagcccaggggttcaagactggcctgggcaacacagtgagacccccatctacaaaaaattttaaaaaattagcctggtgtggtggcacacacctgcagtcctagctacctgggaggctgaggcagagggatcacttgaggccagaagtttgaggctgcagcgagctatgatcacaccactgcactccagcctgggtgacagagattttgtctcttaagaaaaaaaggatttaagccgggtgtggtggctcacacctataatcccagcactttgggaagccgaagcaagcggatcacaaggtcaggagttcgagaccagcctgaccaacaaggtgaagccccatctctactaaaaatacaaaaattagctgggcatggtggcacacgcctgtaatctcagctactcaggaggctgaggcaggagaatcgcttgaacccgggaggcggaggttgcagtgagccgagaccatgctattgcactccagcctgggcgatagagcaagactccatctcaaaaaaaaaaaaaaaaaaaaaagaaaaacagacttaaaggtagcactgaaaaagtctgcttcaagttaatgtgtcttccctaaacagcactttcttggccagctaagagaatccctgctttatgagatactcagatacaaaaaaaaaagcacaatgaaactatacatgcagatttaacttctgtagattcaacaaagtgagtttatgtggcgggggagaaggaaacaagaaaaaaaaaaaggcaattcccacagaaccctgaagtgtgtgcaagctgggagatgtgaggtttttgttcctcagcaggccttggttcctacatgcttctcatggcatgagcatctctccgactacattaagtgtgaccctgctgtctaaaggcacaggtttgagaactagtccatttggtgtttaaccaaagaagccatgatagttctaatgctggaggaaacgctggcagtggggactgactgactgactggggcggtgtccaacaaggcaccttcctaagggactgtcaagggcagttctgaccttcaggggactttgatcagatatgctcattctggaactttagaactcctctgcaatcttgacaaggttttgttttgctactgctttttttttcccttttttttttttgagaaaacacaagattagattaagaatgagaataaacaataaataagtttgtggtgcgctaaatcaaaactgaccattctgggccatcaccaagttgggcgtgcccttgctcctggctgtgatggggccacaggtgctatctagtcggccctgcggctacagcacccaactctgagacaggcagctgcactcagaaggtagcctgtggccaagaagtagagcaaagctacctggtccaaatcttgacctcactgtcaccaggttcagggtgactcacaaactggccatacagaagttgtgacctgatgttggcaaaaaatctacagcagcaggataaccctgcagaagccaagtgcagggcaaaaatacacagattgatgtttttgttacaggggccccagccccttaatcacacgtgggctttcaccactccacggcagctgaaactggaaaaaggtatgtgtgtgttgagggggagtccactgagtcttctatctgagctccaaacgctcagctcaccactccaggacctccttccctctcctgcatagacccctccagagtcaccaccttgctctcagccttacaacttaccaaagtgttgtgccaggtattgttggtcctacttgatcttgcccctgctgacctcccatttgactcgccgcccactcagcctcctttcctggcagcctattcgtgagccctactgcagtatctgcagttttctgaaagggccctcttaaaagtccaacttaaacaccatcatagaaacccacatatctctgtttaagtatttgtagtagactatcaagaagtcaacaaatatgccaggtgcggtggcttacgcctgtaatcccagcactttgggaggaagaggcgggcagaacacgaggtcaagagatcgagacaatcctggccaacatggtgaaaccccatctctactaaaaatacaaaaattagctgggcgtggtggcacgcacctgtagtcccagcttctcaggaggctgaggcaggagaatcgcttaaacccaggaggtggaggttgcagtaaatcaagattgcgctactgcactccagcctggcaacagagcaagactccatctcaaaaaaaaaaaaaaaaaaaaaaagtaacaacataaagctaattattctggaagcatccagctaaatgtctacaagccacatataatggaaaaggaatttacttaataccaagtgcccagatgtgccagttttctctcactcagcccaggactagctggtatttattgcaaagattctaaacttaaaattcctttggcactgtggggacttattacatctgcatgtcagtttttctttaaaaaaaaaaaaaaagtaaagaatgggatgcgatggctcatgcctgtaatctcagtactttgggaggccagggcagaagtactgattgaggccaggagtttgagaccagccccggcaacatagcgagaccctgtttctaccaactacaacaaaaacaacaacaacaaaataagctgggtgtgatgacctgcgcctgtagtcacagctacttcagaggctgaggcaggagaatcacttgagcccaggagttagaggctacagtgagctgcggctgcgtaccactggtttcaggctgggtaacagagcaagatcccatctctaaaataaataaataatgaagaaagaaaaaagaaaacccatcgacagatgtattccactgaaataggctccaattaagtagtacacttaattgaaatagttgctgagaatactcccgaacaaagagaaactgttaatactgcctgattgttttatgttacaaagtaatttctaaaccattggagttgtaaaaattcgagtcagttggttcttaggaatgtgaaacataatgtacttcatatacacattgttaataaacccacagtggccctaaaagttgatttaactccaaatgaactgaaacgcagtaatagcctgaatacaaggttaagagaaaaacgtttctcccagtttgaaaggtacaatttctgaactggccatttttcttagggtaccttttctctatgcctccctacatccctttcccaagtgagcctctactgagctctggggaagaataccaagttctgcaacaagaacctgcaggctattccaacctctcaaaggtcttgtgtcctaaaattatggctttctgctctggcctgtggtcacttcccttcctcggggcatcccggcactggcaggaaagctgtgcacatgcttgtgtgaatgacaggaagctcttccgtgggatgagtgccagggtagggtctctcaggtcagcagcgaggcccacaccaaagcctcgcccagagaaccaaagcaagagggaccatctgctcaacggaggggcttttccgatctcacacataacaagtgacctggacccgagagagcagcagggaggtgacaggacagcctggagttgaggaccagtgggctccgttcagagattacatccaccctgagctgcaggggggcggaggggttccagaattcgcactaccttggtcttcccggggtagctcagcaaccctcctctgcccggaccactccttcctatcccacaaaagacgcacaaagtgggaaaccacaccttcctgggttctatttttcagttaaagcctctggaaggggacgtgcccgcagtctgtcccagccgaccccggtggccgcggcagcagcaaggccgctctggtgagtgcacgtggcccacgggcaggccgcgcgtccggccggcacaggaagtttggggcgctgggcagggaccgcggggtgacatttggactcccggctgcccgaaagggcgacgaccccaccttcccctccctcggtgccgaggtgcaagaggcggttgaattcaggagcgcggcgcagggcgggcttttcccggctgtcccctaggggtccgccccctcctcccgcaccgccccggccgccgagcgccacgtcagccgccagtgcccggcccgctgagctcacgcctcccgacccggagccccaagccctcggtcccctgcagtccccggctcccggccccgagccgcggcgcccgcgccccccgctccccgccagccggagccccgaacccgcagggtccccgcgctcccggccccgcgcccccagtattacaccccgcacccctgagccccgagccccgcgcccgtagcacgcacgccgcagaccagagccgtcggcgtccacgtggccccgggaccccccgcccgcggcgcccaagcgccccacgccccgcgaagcgccaagtgcggggcagggcgccggcctgcgcggcgttaccagggcgcgaagaacatgacgaagtgcgcggcgctctggatcccgtgcgtgaacatgtcggccgtgtacaggtgcttgctgtgcgggtcctgtccgtcctcgccgtctgccgcggggggcccgtccgccgccgccgccgccgcctcctgggcccgggcgccccagcgcccgccgccgccatggcccagcagcagcagcagcagcgcagtcagggccgccggccgggccagcagcgggaggaggcgtcctgggcgcgcgggcatcgcggcggggctgggcgcgctctcgccgcggcctccggtcccctcgcagcgcccgccccgcgccccgccccggagaggccgcgccccttcctctccccgcccgcccgcgccggcgcgcgaccgctacccgcccgagccccggctccgcgcaccggcagggaagggctggagcgagggaccgagtctgggagagccttccgagtccggcctcctgccttcccgccatgggacggctcgccccaatcccgcgaggctcctgcgcctccgcaacccaggcccgcacccctttccccaggggcccgctctgctcagagcggcggtgaacacacgaagtaacgatgaggccagcgggaagccacggaggggcaggtcagcctcggctaatctcagctcacacaagcaccccgcgatttcaggccaaaggaaggagagagctgctgtcagcagaatataggaaatcgggcaaaagacggtggggtttgcacctgaattagttagattcttggccagagctcaactgtgattctcgacctgggctcagaggggtgatgaaacccgcttcccaagtgaaccccttgctggttacccctgcccggcctcaactcagggatgaagaggaaagaaagtcaaagcggcctcttctagacaagaaggcacctagcaggactgactggggtcctactgtgccctcatttatgccggttactaaaatgaatgacagcacgcctgctatggctgaactcagcctgtggaatggcccgaaggcatccctgcccagcgactcataactcgcacctgcacacacaccttacagcagatggtaatcgaaagctccagccctaccccggggatctgaagctaaattagaatcaccgggttgctctccgggatcctgcctgct

SEQ ID NO: 1203 - DNA, 6000 bp, Homo sapiens
ctgcttggcgatgggaatctaagcaggaccatgtgtggctgctaccatatgaagcaacatgtcagtcccttgggagggctgggagttcagaggaagtgacgctgagcagcctgtgtggaggggtggccgggtcatgcaggaaaggccgcatgtgagagaaggtgccaggcacagtgagtcagtttgttttggtggagcctgggaaagagatgtggttagaaagaggggttccttcatccaacacttgttgagcctcaactgtatccaggcatttgggtgctagggagagagaagtgaatgtggcaaatagcccctggccttcggggagcttattgatggagaagacggccaccttaaccagctaagtctgcaacaaaatggcatcaaatgacaaaaagtgttatgcagaaattaaacagcatggcactggtgagagctcagtgggcagagggaggctgctgcagagaggggctttgacttgtcaatgtggaaaggcaatcgccaggcactgaggaggtggcgtgggggcaagagacctgagggtgcagggagtccagtcacagaagacaggaagggaacaagcacagggcaccacacacaagggcctgagaaggggaatgctgggagggtatctagaatcatccctaatggctagaatctaggcgagcagagggcagagtggtatgggttgagattgcatctttcctgaaggcccttgcaagccaaggcaaagagctggaatttgactgtatgtgaagggaagcccctgaaggaagttaagcaaaggagtgacacgattcaattctagctgctggatgaaggatggatgggaaggacttaagagtggaaacaacattcaggaggctactgtagcagacaggaagagaaggatatggcagcagtggagagatatcagtcagtgggagctgtggctcagagatggcaatgattggacttgctgatggggagatcgagtaggaggcggggatcaaggcactgcaataaagaaaaagggtaacaaagtttacaactcagaggtcgggggtggtggctcacacctgtaatcccagcactctgggagcctgaggcaggcagatcacttgaggccaggagtctgagacaaagtttgcaactcaggtttctggtttgtgcaacagcgaggaagaactatttactgaggaggggaaatcggaggacaagcagattgctgcagggaagcacaaggtcagcttcagcacacctgcaggacaaacaagaggaggcatcctgtagatagtgagagctcagagagaggcctcggctgcaaatgtacactttggcagcagcatatagatggtgttaaagccatggctatggatgagatcacctagggagtgatgcagagaaacaaaagtgggttggaggctgagcgctgaaaactgacatcaaaggttgggttgaagagactgaggagtgacgtggggatggtaggaggtagatcagagaagcagaaaggacggtggatgcagatggggccaatggcagttgtaccaacgctgctgagaagcccaggaagatgaggaacataaagtgttcatttgacttgtcaatgtggacatcttcagtgactttgagaagacttggtgtgtggcaggtttgagagtcagagtggcatgagctgaaggatgaatggaaagtgaaatacagataattttttttttttttttgcttatacactgatgaaaatggtccagtaggaaggagtgatgagtaacttgtgcaggagagaaagagaggagctgaagaacaaagcctttgagcagggagcagggagggcatatgagattcctagggctgctgtaacaccacactcttggtggcataaaaccacgtacgtttattctcttacagttttggaggtcagaagtccaaaaccagttgcactggactataaattgtccacaggactgcaggtccctccagaggctctgagggggagtctatttccttgctttttccagcatctagagctgcttttcctggctcttggccccttcatcttccaaaccagcagtttaacatcttcaaatctctttctgcttttgttacgtcgcctccggctgtgtagtcaaatttcctactgcccctctgttatgaggacacttgtgatcacatttaggacccaccgagataatccagggtaatctctccagctcacgacccttaatttaatcacacctgcaaagccttctgccatataaagaaacaatcagatgtttcaggaattaggacctggttatccgtgaggggcattattctggaggactgggctttgctaggcagggatatactgacttgctcctttgtgggcagagggaaaggcgcctgtgcaggggtgtgtagatttggcgggggagggataagggagctcatgcttttggcttcatttttctcagaaacatgagataaagctggcagctgagaggatggcgactgacagggtggggtggggagaggagaggaggagcagtgtcagtggaagtatggaagcatctcagagagtggggcagcacactgcctaggcagaggtagtcagttttagggcaggggtgaggaggaatttaaggcttatttttaccagtgtgaaggagacatgcggcttgactgtgcgatttttctccagcagagtctggctacctggttgaaggcacagggaacccagagagacaaagctcaccagcatctgtggggagaatgtggcagggcaggaagtgaagggtgagactccatgggctgtaacttggccaagaggcaagagaagacatagcagtctgttgggctgcgaggggattgtagaagatggtggggtgggtagctcagaggtcatgatgagaaagaagcattgcagaaatgggtttcttgagcaaacagtcgaggaggtgctgggcagagtggatgccttcagattttggagatggtgcagatgctggtgatgacaagtgctagggtctcccttttgggtgtgagttactgagggaaaggtagatggagcatccacctggatgctgaagatgccaggaatgaaagacaggaaaggggtggccaggaacactgtgagccaggaaccaaagtcttcactgaaccaggaagagtgatgtggaagaatgacaggaactggcagggaagagggtgccatgcccagtggcatcaatttaaggagtactgaaggttttgtaggatttggaaggagcaatggggaaccaggaaggcatcagctttacttcctggctctgagggactccaggtgtgaaagaatgagcagccaacacttgagagagctcctagaactgtgtttcagttaaaaacgaaagacactgatgctgtaagagtgtatggcgatgcttgtgggaatttcccaacagcaccgtggaagggtttgggaggtttgaggtgttggagaacacagggattagagtttggcaataacagttattggagagaatccctggatttctagtgttgagtgagtttcacagggacacaaagcatgatgcaaccacatcacggaaggccttgaatggctgccccaggcatgactatttcaccccatcggccaaggccatggggacagtggtggcgttttggtccaagtttaagcagcaaactgtcttggtcaaaggcaggctttaggaaaattaattttccagccatgtgaatgaaagagactcttagaaagctactgcaataggccaggcttagtctccgttcagggtatgaacactgagaatgctggaaggaaatcatggttacaggaaatgcggttgaattttgagacacacgggaaaagagcgagcaatacaagatgcctcccatgtttcaagcttaagtggctggaagaacagactttggagggagattgatggttttggtgtttggcaacccatggttaaaggttcataagtggctgggcctaaggcgggagcagaataatgacaggtgagacagtgggcgcgtcccctgttgccaagccaggagttaactacctggggcttcctggattgaggataatcaaagagcaggcaggatcccggagagcaacccggtgattctaatttagcttcagatccccggggtagggctggagctttcgattaccatctgctgtaaggtgtgtgtgcaggtgcgagttatgagtcgctgggcagggatgccttcgggccattccacaggctgagttcagccatagcaggcgtgctgtcattcattttagtaaccggcataaatgagggcacagtaggaccccagtcagtcctgctaggtgccttcttgtctagaagaggccgctttgactttctttcctcttcatccctgagttgaggccgggcaggggtaaccagcaaggggttcacttgggaagcgggtttcatcacccctctgagcccaggtcgagaatcacagttgagctctggccaagaatctaactaattcaggtgcaaaccccaccgtcttttgcccgatttcctatattctgctgacagcagctctctccttcctttggcctgaaatcgcggggtgcttgtgtgagctgagattagccgaggctgacctgcccctccgtggcttcccgctggcctcatcgttacttcgtgtgttcaccgccgctctgagcagagcgggcccctggggaaaggggtgcgggcctgggttgcggaggcgcaggagcctcgcgggattggggcgagccgtcccatggcgggaaggcaggaggccggactcggaaggctctcccagactcggtccctcgctccagcccttccctgccggtgcgcggagccggggctcgggcgggtagcggtcgcgcgccggcgcgggcgggcggggagaggaaggggcgcggcctctccggggcggggcgcggggcgggcgctgcgaggggaccggaggccgcggcgagagcgcgcccagccccgccgcgatgcccgcgcgcccaggacgcctcctcccgctgctggcccggccggcggccctgactgcgctgctgctgctgctgctgggccatggcggcggcgggcgctggggcgcccgggcccaggaggcggcggcggcggcggcggacgggccccccgcggcagacggcgaggacggacaggacccgcacagcaagcacctgtacacggccgacatgttcacgcacgggatccagagcgccgcgcacttcgtcatgttcttcgcgccctggtaacgccgcgcaggccggcgccctgccccgcacttggcgcttcgcggggcgtggggcgcttgggcgccgcgggcggggggtcccggggccacgtggacgccgacggctctggtctgcggcgtgcgtgctacgggcgcggggctcggggctcaggggtgcggggtgtaatactgggggcgcggggccgggagcgcggggaccctgcgggttcggggctccggctggcggggagcggggggcgcgggcgccgcggctcggggccgggagccggggactgcaggggaccgagggcttggggctccgggtcgggaggcgtgagctcagcgggccgggcactggcggctgacgtggcgctcggcggccggggcggtgcgggaggagggggcggacccctaggggacagccgggaaaagcccgccctgcgccgcgctcctgaattcaaccgcctcttgcacctcggcaccgagggaggggaaggtggggtcgtcgccctttcgggcagccgggagtccaaatgtcaccccgcggtccctgcccagcgccccaaacttcctgtgccggccggacgcgcggcctgcccgtgggccacgtgcactcaccagagcggccttgctgctgccgcggccaccggggtcggctgggacagactgcgggcacgtccccttccagaggctttaactgaaaaatagaacccaggaaggtgtggtttcccactttgtgcgtcttttgtgggataggaaggagtggtccgggcagaggagggttgctgagctaccccggga

SEQ ID NO: 1204 - DNA, 6000 bp, Homo sapiens
tttggcttgccattcctgctgggtgtcatctgtcctcgaagtcttgcagtggataatttttgttctccccaccttcatctgcttgagaaatttgtgcctcgcaggcctgtctgtccaagttaagcttgaaatacagtagccatacgaccaatttgacaaggcatagctctaaacaataaggccacaggcttgctttgagcaagatgagaaacttccagccacctgattacaaattccaaagcttctttggtgcagtcgataaactagtctgttcatgtaatgtaagttctccttctcccccatccccatttttcctgaccttctgcaacacacataccttgtcataaaaacccttagaagttttaaactctttgacctcatgaagtttccagttcctgaccattttcaccatttggtttgaaccctgtcacttggataaaagaactctatcattgactctcattatcagatgctgaggaaacaggtaatagacattgcaataaagcactggttcgcagacttagcatgcgtgggaatcacctggggcttctcaaaccacagatttctgggatccaatttgagtttctgattcaggaggagtctaatactgctgctgtgatgaccataccatgagaaccactgtactacacgtgtccaaagcttaggtgacaggcatacgtagagctagctgcatgcacacaacaactcatgcttttgtctttttgcacagctgagtccagtttaatgaaggtgtgcccagggtggtggatggaatgcattctgtgttccaatgggttggctttgtcaccggagcagttactttctagtggctcttgcagtaagccctgcgtgttctccaaatgatggagctacaccagaagcttctctagggggaactagcagcatttggtacaggaagattcagcactggattataaaattgcttcagcctagaagaccgctaatgctaatacaaagtgtgctacttcacactaaactggctttcatgtccagtgtgccctaagcatttccaaaactttttttttttttttgagatagagtcttgctctgttgctcaggctggagtgcaatggtgcaatcttagctcactgcaacctccgcctcccaggttcaagtgattctcctgcctcagcctcccaaatagctgggattacaggtgtttgccaccacacccggtgctaatactaaaattttttgtatttttagtagagatggggtttcaccatgttggtcaggctggtcttgaactcctgatctcaggtgatccacccacctcagcctcccaaagtgctgggattacaggtgtgagccaccgcacccggccgcatttccaaaatgttatgagattgctacacagtaatatttagtacctcacccaaaagaccacctactctttttttgtttttgttttgagacagtttcgctcttattgtccaggctggagagcaatggtgcaatctcatgtcaccgcaacctccgcctcccgggttcaagcgattctcctgcctcagcctcccaagtagctgggattacaggcatgtgccaccatgcccagctaattttgtatttttagtagagacggggtttctccatgttggtcaggctggtctcgaactcccgacctcaggcgatccgcccgtctcagcctcccaaagtgctgggattacaggcatgagccaccacgcccagcaagaccacctactcttttctcctcctttgctttaatcagtttttgcattttttaattttttaacccatttctaaaataggttagacaaacaaaaataagaaataatgtcaataaaagatgttgcagaggaaatctcatggagtggatgtgatagaacacaaaataaacttaggagtccctctatctcccaccctgtgccaattatggttccccttgatgggcttatactaaggaataaattataattttattcttggtatacatgtaataactcatttattttttaattttcaaaagattcaacatgggattacagcaaaaaatttcccccaaagtcagaactttacttctactaaattgacaatatctccatgatttagatgtcttgagtctcaaaaagcacagtaattggaaaaatccctttacaatcccatgcttatatttgtatatgatattgattctccaatcttgtatagaggttatgatgtgagtacagctattcttaaaaacataaaggtacttaatgtatgatttcatttctataatatttttgaggtgaaaaagtttttagaaatagaggacagatgataggttgccagaagtcagggtggggacagggaggaaggtaaatgtggttataaacaggaaccttaacgagatccttatggcatcagaactggtcagtatgctgactgtgatgatagatgcataaatctacatgtaataaaattgcataaacttaaacatatacacacacaatgaatacaaggaaaactggtgaaatctgaataacattggtggattgtatcaatgtcaatatcctggttgtaacattagcatttgcaaaatgttaccactgggggaaactaggcaaagtgtaaaaggaaactctattatttcttacaactgcatgagaagctacaaatacctcaataaaaatttcatttaaaaatacagggaaagtcttgtcaatccagagacaataagagacaatacaagaccttcagggaaaggataagagtcccattttagcctcaaaactcttgagatttcatgggtcaaagaccaaggacacactcatagcagctgaatgtgccaggcgaaatggcactgccaatgttgcttctcagtctcctagctgtctgagccgcagtgtaaagatttatataaaagcggagagagaacagaggcatatgctggacctcaccatcccagagaacaatacaacttaatagtgtataatcaaatggctagaacacatattcacaggctacaagcaacagacttgcagaaaagtaattgtgtacttattcagtgttggctcccctgcaggctgcatgaggaaaggaaaaggctgcattagtcttgttcaccactgtgtcttagctcctagcactatgctgggcacgtagcagctgctcaataacgtatttgttaaatgtttttgaatgaaaaaatgaaaagcccatgtggcctgttaaagttaatatggcttctctctcccttctctccaaatctcccttccccactctctcttcacccaccacctatgcttaaacacatacacagagacacagaggcagttgtttctgccacatacaagtcaggcagtcatttaacctctctgtgcctcagcctcctcgtctgtaaatgaggacattaataataactacttcaaaggccggccatgaggattaaatgaatgcaaatttgtagaccacttacagtattacctggcatgtagcaagtgccatgtaagtgtttgttaaactgcagtgctatccgaagttagcacagacttcagaggtcaaagcatggtcctcctcaagactccccttcagacacctgccacaagctttggggttcccaggccacctgcacttctgaccagctgtctctgtcatatgcccagggcctgagcactgtctgctagggtgcctcagttctcacccacgcagcttctctctacacatgatgtttcattgctattcgctttactccctcaggtttcacagaatgactcatagaactcaagaaagtgctttccttgctattacagttttattataaaggacacatatcaggaccagccaaatgaagagatgtatagggcgagatgtgggagatttcccaaatagaagcttacgtgtcctcaggaacgcttccccctcctgacactttgatgaatgattatcgaccagtaagctcacctgagcttccacatccagagtactcactggggttccattatgtaggcatagttggttaaatcactggccacatggctgaactcagtctccagccccaatctgctccccagaggtgggcctgcttatgtgactcaaagcctaagccctcatggttggccggcccttctggtgtggccagcctccattctgaaatcatcttgggccctccatgagccatctcattagcataaactcaggtgtatttccagaggcccaccatgaataacaaagacacttctatcacttgggaaattctaaggattgagggtacctcccaggaaccagagtcaaagtccagtcaaattctttattatacaacgtgagtttactgacttgaacagaaagagggagcaagagaagcattctaggaaacaggtgtctaaaaagaaaggcaggaatagtcagccacactcatggcatagtagggaaacagcccccagctaattggctttgctatacagtagtccccccttatctgaggtttcactttctgtggtttcattacccgcaggacggtacaataagatattttgggagagagactacattcacataacttttattaaattgttctaattgttcatctcttactgtgcctaatttataaactttatcatatgtatatacaggaaaaaacatagtatatacatggttcagtactatatgcagtttcaggaatctactgggggtcttggaatgtattctcagcagatatgggaggacaactgtactggaatgcaccagctttgagccaaataaccagggctctgagtttagctccaaagttcaagcaccttcctattctagcagcatccgccctgatccagcatggcggcaagagcttctgccagttcacagcctgactacacggcaggcgcctttccggaaccgcccgctgggtagattaaatttctccggcgccctgtaatgacacacacacaaaaaaaacccgggcgcgccttgtaagagggcggccgggtttgcgcaggcgcagcgtggccgcgggtgggcggaactggtcgggatgagtggcggagggacagagacccctgtgggttgtgaggccgccccgggcggtggcagcaagaagagggactccctggggactgcgggctcagcgcacctcattatcaagggtacggagtgtcagggctatagttcctggtggatcccagcacagcctcatctcccaggcggcgccctctgacccgggccgacccccgggtcccgggctggcgcgcgtgcgtttgtgcgggtgggggagtcgtggtcggtccccgcctttttccccgcgccaaatgcgtcccaccacaaccaaccagcccaactcttcgtgtttccccgctttcctctgtcgcagcctgagccatcaggcccgcccccgtccattccgcaagctcaggacccctgggcgcagagcctttgggcagcctcgccaccgacgtgtagtggaaagggcattggacctgggaggcgggaggcagtcgcttaggagttgagtgacttcgggtcactggctttactcactctcctacccgatctgttcctggtcgtgcgaggagtaagtgagatacacttacgaaggcgctctatagcactgtaaagaaccattcacgttcagaaatgtccatgtgttctgtgtgctttgagctgggagaaggttacaacctagattctcacagaatctgctttaggtttgactcctaaagctcacaacgctgtttgctgcgtgaaagtctttgacagttgagttgtagtgctttatatataccagatataaagtgcttatatacagtgcttgtattattttttctacttgacatgcttaagaagatatgtactaataaaattcattaaaatagagaattgaaacctgcccatcgtatgtctgcaaaaatgaaaaatttggggaacattgccagtgaatgaatatgaataatacattgtcttagatttaatttctcaaggaattttgagacttacattttaaactacatagttgtaactaagaagaataataaactgactcaccaaaagact

SEQ ID NO: 1205 - DNA, 6000 bp, Homo sapiens
ccacaaagaaaggtctctctgtgccgggaggacagcgaggataactagacccagctggaggcccagattccagatgtgggaggtagtggcaaaacaagatcctggcatccccttcatttcccctcctctgcctaatgccctagagaaattttccatcataaacaagtaatgcattcctaacctttggtgcttctctctctctcccacccactagttttcttccatcatcactatctccccctactcccaatttatgtttatgtgagtgtgagggtctgtccacatgtgtaagtagtcatgggtttatgttggtcattgtgtagcgtgcgagttgccttggaataaggatgttgggggtggtgggctccctgtgcttgggtgtaaatgtaagaatgatggcaggtgtgaagacaggcgtgggaaagcaatgcgcctttgtttacagaggaggtgtgttttatgccagccaggaagaagtgtgtaatgtggaagggatcttgtgtatttagataagagtagtgagtataaaataaagtgacttgtaggcccaggaattgtacacagagcagtagtgtatttctagccggttgtggcctgtcctcttatttgtgttcctacatgttcttgattgaaaaatccttttaagtgtttcctaagtgggaggggagaaaagtgtttcctgtttggtgtctgtgtaagaattgtcccagcttttctaaagatgttgtacatttgtatgagtggtttggaggagtgtagccacatctcagaagcttggtgtgacccagccaaggtgggaatactacatgcacacttacagttgtacatttcacctggcatttaacaagattattgagcaactgctgcctacaaggtaccatgctgggttctctggaggacacaaagatgtgtatgacacagcctccagtggaagagatcatatatgtattcactttgtgcaccaggcttaaaatgatggtagaaagatctgagccagatgtatttcaaatctctggagtcatctcagatcttttcatcctcttgctgtcggcaactctccctctcccatgctcccttcccctaatgatatccatctcattgcccaattctgattatcttatgctaggaatgtctcttagggccaccttctcaggctcttgttatcatctacctgagcccctccaatagcctcctgtctactgccttagtctctacccgtccagagcatcactcctcatcccaatcagtttcctgcttgaattttcctccctttatctcatccagcaacccacaagctctacagtctagagtgaaacccaggctcctgacctggcagctctgctctccccactctgcccaattccactcctttccagccattattacttcccactactccgttacaggaaacttactctgagattgtttttcttgtgattccccaaacacatcctgtacttttccagctcaaggtctttgctaattccattcttacagtcatcctccacatctgaatttgtcatatcccacccactgttcaaggtcaccttcagtgccactcttccatgaagcctcccctgattgattggacagatgtgaacactagctcttttgggtcccccccttaacacttagtcttcagttttcttaggtttttttgtttttgtttttgttttttgttttgttcttgtttttttgagacagggtctcactctgtcacccaggctggagtgcagtggcacgctctcagcttgctgcaacctctgcctcctgagttcaagcgattctcctgcctcagcctcccgagtagctgggattacagacatgcgccaccatgcttggctaatttttgtatttttagtagaaacagggtttcaccatgttgaccaggctggtctcgaactcctgacctcaaatgatccacccgcctcggcctgccaaagtgttgggattacaggtgtgaaccaccgtgcctggcctttcttaggatcttcaagaaagcttgcctttccttcaggcagaaactcaatataacaaaaaaagagagagagagagagcaacagagacagacagatagagagctctcctggccatggttccctcctcatgccggagggtaaggccctcatggctggagtatcagctttatctggctttcctcaggcagctgcatggcacagcacttatactgaaactagcctcaggactctcaacagtagtaccctcaacagagggcgcctgaaacaggtgaatgctcaaaagatgttaaattctgcacggtggctgccagcactttgggaggccgaggcaggcagattggttgagctcaggagttcaagaccagcctgggcaacatggcaaaaccctggctctacaaaaaattttatatatatatatatatatatatatatatatatatatatatatatatatatattagccaggcatggtggtgctcacctgtggtcccagctactcaggaggctgaggtaggagtatggcttgagccaagaggcagaggttgcagtcagccgagatcatgccactgcacttcaacctgggcgacaaagccagatcctgtctcaaaacaaaaaaaaaaagttaaattctgtgtccatgagcagctgtctgtaaggaagttatggaaatgtgaatctgctttaagttgagtaattaccattactgtaacatttgtataatgtctcacaatttagaatgtttgtcccataaatttggttgtttgacttacagcaaggggcaaatctgggtggctgctaacctattgcctttgtatttgtggccctctgcaccagcctttatgtgaatatttctgcacgctcctaagagagtagttttgctgaactgtccctatacagtctttgcacctttactgtgtacatgtgtgttggtaggtgtacgtggtatgttttcctttttttccaggattgcattctttttatggctgaataatatttaattgtgtattgttgttgttgttgttgttattttatagtgacaaggtctcactatgttgcccaggctcctgagctcaagtgatcctcccaccttagccccccaaaatgctaggattacaggcaagagccaccatgccccaccattgtgtattacttttttaatctttctatccttccctccctccccaacttttattttaaattctggggtatatgtgcaggtttgttacctaggtatactgcatgatgctgaggtttggggtatgaatgatcctgtcacccaggtactgagcatagtacccaatagttagtgtttcaacctttgccttactccctccgtccttcttctactggtctcaagttgctattgttgccatctttatgtccatgagttcccaatgtttggttcccacttataagtgagaatgtgtggtatttggttttctgttcctgagttaatccgcttaggataatggccaccagccgcatccatgttgctgcaaagcacataattttgttcttttgtatggctacgcggtgtgtgtcttcatgtgtgctcaggcaggcaggtttgtgtctgtgtgtgctagtgtgttcatttctcccttaatcttgactatttctgtaacaatttccttcttggggagtttatattctaaggatacctacaagtgcatgaatgcgtgcatataactgggtcagtattgcagcaggatggcctgatctccaataaaaagccctcttggcagggcacggtggctcacgcctgtaatcccagcactttgggaggccgaggcgggcaaaccaaataccatacattctcacttataagtgggaaccaaacattgggaactcgtggacgtaaagatggcaacaatagcaacttgagactactagaagaaggacggagggagcgaggcagatcacgaggtcaggaaatcgagaccaccctggccaacagggtgaaaccccgtctctactaaaaatacaaaaattagctgggcgtggtggcgcgtgcctgtattcccagctactcaggaagctgaggcaggaaaatcgcttgaaccagggagtcaggggttgcagtgagccgagatcgcgcctctgcattccagcctggcgaccgaacgagactgctccatctccaaaaaaaaaaaaaaaaaaaggcctgtgagggatcctgtggctaaagtgagcccctctccaggtgccacatgcctcgacatgtgcctgcagcccgggatctcacccacccccactcacgactcacacactcacaacgtgcagttgggcgcctaggattgtgcatgtcaagtctccacccactccctttgtttaatcgtcggaatttccagcccgctgctgccaaccgctccccagctgcgggaggaggagttagaaggacccgcccaattttcaggagcacataaattacctctgccggcagccgaccctcacttggccttacactccgctcggctcaccatgtgtcactctcgcagctgccacccgaccatgaccatcctgcaggccccgaccccggccccctccaccatcccgggaccccggcggggctccggtcctgagatcttcaccttcgaccctctcccggagcccgcagcggcccctgccgggcgccccagcgcctctcgcgggcaccgaaagcgcagccgcagggttctctaccctcgagtggtgagtatcgccgaagtgggcattcgcggggtgcgctgccctggagtcactggggaacgacccgactccagaggcctcgacctgacctgtctcctgttttgtctccccttaggtccggcgccagctgccagtcgaggaaccgaacccagccaaaaggcttctctttctgctgctcaccatcgtcttctgccagatcctgatggctgaagagggtgtgccggcgcccctgcctccagaggacgcccctaacgccgcatccctggcgcccacccctgtgtccgccgtcctcgagccctttaatctgacttcggagccctcggactacgctctggacctcagcactttcctccagcaacacccggccgccttctaactgtgactccccgcactccccaaaaagaatccgaaaaaccacaaagaaacaccaggcgtacctggtgcgcgagagcgtatccccaactgggacttccgaggcaacttgaactcagaacactacagcggagacgccacccggtgcttgaggcgggaccgaggcgcacagagaccgaggcgcatagagaccgaggcacagcccagctggggctaggcccggtgggaaggagagcgtcgttaatttatttcttattgctcctaattaatatttatatgtatttatgtacgtcctcctaggtgatggagatgtgtacgtaatatttattttaacttatgcaagggtgtgagatgttccccctgctgtaaatgcaggtctcttggtatttattgagctttgtgggactggtggaagcaggacacctggaactgcggcaaagtaggagaagaaatggggaggactcgggtgggggaggacgtcccggctgggatgaagtctggtggtgggtcgtaagtttaggaggtgactgcatcctccagcatctcaactccgtctgtctactgtgtgagacttcggcggaccattaggaatgagatccgtgagatccttccatcttcttgaagtcgcctttagggtggctgcgaggtagagggttgggggttggtgggctgtcacggagcgactgtcgagatcgcctagtatgttctgtgaacacaaataaaattgatttactgtctgcagtcttgagtgtatctttgcaagcgccgactccccactcctcccggccttcagatggcaaggaccggcgggaggcgccgtggccgagtccccagcccgcgcacctccctgggcccaggagccccttttcctggagtcacagaacccagcatccggttgccggatgtagtctttcattgcccagtctgcggttttcccaggtagttgccccgcggcgaatcc

SEQ ID NO: 1206 - DNA, 6000 bp, Homo sapiens
actggagatactacagagatctaatgagaaaaaggtcagatgtggccctgtacactcgtggagattatattccagtaggcgggacaaacaacagcaaaaagcaaatacataaaatgattccccaacgtgatatgtgtcatgaagaaaaacaaggggctgagaaggaggctagcagtggtgatggatcaaggcaaaggtcaaacgagggaaatgaaggaacatggtgatctgggggaagatgggaaggaaatgaggaggagagctggaaatggaggaggctaagggcctgtttctccagtatcagggcagtgggagccagtccagttgctcgtctcagcccctggcactttctggccttaactcattccccagcctgcactcccccacccccttattggcttaatgattcacccccaacatttccctagcttcctgtgtggcaggaaggagcaggagcagagccctagggctctgagggtagcaggaatggggatgggattggttgggaatggtgagcagtccgggttctcaggtcttctctttgtcccattctggtcttgccacaaagaaaggtctctctgtgccgggaggacagcgaggataactagacccagctggaggcccagattccagatgtgggaggtagtggcaaaacaagatcctggcatccccttcatttcccctcctctgcctaatgccctagagaaattttccatcataaacaagtaatgcattcctaacctttggtgcttctctctctctcccacccactagttttcttccatcatcactatctccccctactcccaatttatgtttatgtgagtgtgagggtctgtccacatgtgtaagtagtcatgggtttatgttggtcattgtgtagcgtgcgagttgccttggaataaggatgttgggggtggtgggctccctgtgcttgggtgtaaatgtaagaatgatggcaggtgtgaagacaggcgtgggaaagcaatgcgcctttgtttacagaggaggtgtgttttatgccagccaggaagaagtgtgtaatgtggaagggatcttgtgtatttagataagagtagtgagtataaaataaagtgacttgtaggcccaggaattgtacacagagcagtagtgtatttctagccggttgtggcctgtcctcttatttgtgttcctacatgttcttgattgaaaaatccttttaagtgtttcctaagtgggaggggagaaaagtgtttcctgtttggtgtctgtgtaagaattgtcccagcttttctaaagatgttgtacatttgtatgagtggtttggaggagtgtagccacatctcagaagcttggtgtgacccagccaaggtgggaatactacatgcacacttacagttgtacatttcacctggcatttaacaagattattgagcaactgctgcctacaaggtaccatgctgggttctctggaggacacaaagatgtgtatgacacagcctccagtggaagagatcatatatgtattcactttgtgcaccaggcttaaaatgatggtagaaagatctgagccagatgtatttcaaatctctggagtcatctcagatcttttcatcctcttgctgtcggcaactctccctctcccatgctcccttcccctaatgatatccatctcattgcccaattctgattatcttatgctaggaatgtctcttagggccaccttctcaggctcttgttatcatctacctgagcccctccaatagcctcctgtctactgccttagtctctacccgtccagagcatcactcctcatcccaatcagtttcctgcttgaattttcctccctttatctcatccagcaacccacaagctctacagtctagagtgaaacccaggctcctgacctggcagctctgctctccccactctgcccaattccactcctttccagccattattacttcccactactccgttacaggaaacttactctgagattgtttttcttgtgattccccaaacacatcctgtacttttccagctcaaggtctttgctaattccattcttacagtcatcctccacatctgaatttgtcatatcccacccactgttcaaggtcaccttcagtgccactcttccatgaagcctcccctgattgattggacagatgtgaacactagctcttttgggtcccccccttaacacttagtcttcagttttcttaggtttttttgtttttgtttttgttttttgttttgttcttgtttttttgagacagggtctcactctgtcacccaggctggagtgcagtggcacgctctcagcttgctgcaacctctgcctcctgagttcaagcgattctcctgcctcagcctcccgagtagctgggattacagacatgcgccaccatgcttggctaatttttgtatttttagtagaaacagggtttcaccatgttgaccaggctggtctcgaactcctgacctcaaatgatccacccgcctcggcctgccaaagtgttgggattacaggtgtgaaccaccgtgcctggcctttcttaggatcttcaagaaagcttgcctttccttcaggcagaaactcaatataacaaaaaaagagagagagagagagcaacagagacagacagatagagagctctcctggccatggttccctcctcatgccggagggtaaggccctcatggctggagtatcagctttatctggctttcctcaggcagctgcatggcacagcacttatactgaaactagcctcaggactctcaacagtagtaccctcaacagagggcgcctgaaacaggtgaatgctcaaaagatgttaaattctgcacggtggctgccagcactttgggaggccgaggcaggcagattggttgagctcaggagttcaagaccagcctgggcaacatggcaaaaccctggctctacaaaaaattttatatatatatatatatatatatatatatatatatatatatatatatatatattagccaggcatggtggtgctcacctgtggtcccagctactcaggaggctgaggtaggagtatggcttgagccaagaggcagaggttgcagtcagccgagatcatgccactgcacttcaacctgggcgacaaagccagatcctgtctcaaaacaaaaaaaaaaagttaaattctgtgtccatgagcagctgtctgtaaggaagttatggaaatgtgaatctgctttaagttgagtaattaccattactgtaacatttgtataatgtctcacaatttagaatgtttgtcccataaatttggttgtttgacttacagcaaggggcaaatctgggtggctgctaacctattgcctttgtatttgtggccctctgcaccagcctttatgtgaatatttctgcacgctcctaagagagtagttttgctgaactgtccctatacagtctttgcacctttactgtgtacatgtgtgttggtaggtgtacgtggtatgttttcctttttttccaggattgcattctttttatggctgaataatatttaattgtgtattgttgttgttgttgttgttattttatagtgacaaggtctcactatgttgcccaggctcctgagctcaagtgatcctcccaccttagccccccaaaatgctaggattacaggcaagagccaccatgccccaccattgtgtattacttttttaatctttctatccttccctccctccccaacttttattttaaattctggggtatatgtgcaggtttgttacctaggtatactgcatgatgctgaggtttggggtatgaatgatcctgtcacccaggtactgagcatagtacccaatagttagtgtttcaacctttgccttactccctccgtccttcttctactggtctcaagttgctattgttgccatctttatgtccatgagttcccaatgtttggttcccacttataagtgagaatgtgtggtatttggttttctgttcctgagttaatccgcttaggataatggccaccagccgcatccatgttgctgcaaagcacataattttgttcttttgtatggctacgcggtgtgtgtcttcatgtgtgctcaggcaggcaggtttgtgtctgtgtgtgctagtgtgttcatttctcccttaatcttgactatttctgtaacaatttccttcttggggagtttatattctaaggatacctacaagtgcatgaatgcgtgcatataactgggtcagtattgcagcaggatggcctgatctccaataaaaagccctcttggcagggcacggtggctcacgcctgtaatcccagcactttgggaggccgaggcgggcaaaccaaataccatacattctcacttataagtgggaaccaaacattgggaactcgtggacgtaaagatggcaacaatagcaacttgagactactagaagaaggacggagggagcgaggcagatcacgaggtcaggaaatcgagaccaccctggccaacagggtgaaaccccgtctctactaaaaatacaaaaattagctgggcgtggtggcgcgtgcctgtattcccagctactcaggaagctgaggcaggaaaatcgcttgaaccagggagtcaggggttgcagtgagccgagatcgcgcctctgcattccagcctggcgaccgaacgagactgctccatctccaaaaaaaaaaaaaaaaaaaggcctgtgagggatcctgtggctaaagtgagcccctctccaggtgccacatgcctcgacatgtgcctgcagcccgggatctcacccacccccactcacgactcacacactcacaacgtgcagttgggcgcctaggattgtgcatgtcaagtctccacccactccctttgtttaatcgtcggaatttccagcccgctgctgccaaccgctccccagctgcgggaggaggagttagaaggacccgcccaattttcaggagcacataaattacctctgccggcagccgaccctcacttggccttacactccgctcggctcaccatgtgtcactctcgcagctgccacccgaccatgaccatcctgcaggccccgaccccggccccctccaccatcccgggaccccggcggggctccggtcctgagatcttcaccttcgaccctctcccggagcccgcagcggcccctgccgggcgccccagcgcctctcgcgggcaccgaaagcgcagccgcagggttctctaccctcgagtggtgagtatcgccgaagtgggcattcgcggggtgcgctgccctggagtcactggggaacgacccgactccagaggcctcgacctgacctgtctcctgttttgtctccccttaggtccggcgccagctgccagtcgaggaaccgaacccagccaaaaggcttctctttctgctgctcaccatcgtcttctgccagatcctgatggctgaagagggtgtgccggcgcccctgcctccagaggacgcccctaacgccgcatccctggcgcccacccctgtgtccgccgtcctcgagccctttaatctgacttcggagccctcggactacgctctggacctcagcactttcctccagcaacacccggccgccttctaactgtgactccccgcactccccaaaaagaatccgaaaaaccacaaagaaacaccaggcgtacctggtgcgcgagagcgtatccccaactgggacttccgaggcaacttgaactcagaacactacagcggagacgccacccggtgcttgaggcgggaccgaggcgcacagagaccgaggcgcatagagaccgaggcacagcccagctggggctaggcccggtgggaaggagagcgtcgttaatttatttcttattgctcctaattaatatttatatgtatttatgtacgtcctcctaggtgatggagatgtgtacgtaatatttattttaacttatgcaagggtgtgagatgttccccctgctgtaaatgcaggtctcttggtatttattgagctttgt

SEQ ID NO: 1207 - DNA, 6000 bp, Homo sapiens
cctctacctacctcccacctgtcctcagtgtctggggaaccagaagcctgcctttgcaaaacagtttcccattgatctgccttaggtttgacccaggcccaagggcaaagagcccatagtgaggggacagtgtatgtgtcatgactaggcagaaaacagctggtctgggagtgggaatgcagggactggcctagggatgggtggggtgcatcaggcataaccttgggttggggttacttttcaggctggcagtgatggggccaagattgggaactgcccattctcccagagactgttcatggtactgtggctcaagggagtcaccttcaatgttaccaccgttgacaccaaaaggtaggcctgcttatgttccttgaaacacccctggtgtacacatgtgtgcaaacacacacccacccgagtccttctgtcatgaacatttttgccctccccctggagtccctttcttatcccacgtcctccattccccctttctggttcttcctgacccccatttccagtcctgattcctgatcctttctccaggcggaccgagacagtgcagaagctgtgcccaggggggcagctcccattcctgctgtatggcactgaagtgcacacagacaccaacaagattgaggaatttctggaggcagtgctgtgccctcccaggtataggggcactcagaaagtggagaggtggagcagggagattctgggaaacagacagtttgcagaaatggaaaacagagatggtggtggggctggggcaggagagctagctgaggttcctcccaggaagacatcttacctcatttttcccattggctttcaggtaccccaagctggcagctctgaaccctgagtccaacacagctgggctggacatatttgccaaattttctgcctacatcaagaattcaaacccagcactcaatgacagtgagtcttgtgggtcagaggcctgggtcctgggaggaatagagaggacccagcgggtaggagacattaggggcacctggacgttcagatatcagggagatgaagcagatgttcgtaaatttcccccagcttcccatttttgctttacctctatatttccctgcattttcattggccaagacttttaagcttttctcatttgttccctagcctcttctgccccactgaggacgttagttggctgctggcctgttttctggcagaatagggtcatgcttaagaacagtcatcactctagatccagactacctgagtacaaatccaactagccgtataattttgagcaatcatttcacctctctgtaagtccatttccagatccacaaaattaggatgacaatacctatttcatgggttgatataaatttttttttttctttttttttgagatggagtctcgttctgtcgcccaggctggagtgcagtggtgcaatcagctcactgcaacctctgcctgccgggttcaagcaattctcctgcctcagcctcctgagtagctgggattacagacgtgcatcaccacgcccagctaatttttgtatttttagtagagacagggtttcaccatgttggccaggctggtcttgaactcccgacctcaggtgatccacctgcctcggcctcccaaagtgctgggattacaggagtgagccactgcacccggcgatataaatgagtttgtaaaatgtaaagtgttcactttgggaggccgaggctagcgcaccacctgaggttaggagttggagaccagcctggccaacatgactggtctctactgaaaaaaatacaaaaattagccagttgtggtggcaggcacctgtaatcccagctactcaggaggctgaggcaggagaatcatttgaatctaggaggcagaggttgcagtgagccgggatcatgccactgcactccagcctgggcaacggagcaagactccgtctaacataaaataaaatgtaaagtgcttagaataacacatagaaaagtaactacatgagtgttagctattattattttggactcaccattagtatccacccccaacgggccttttcggactatgtcaatcttttcctgaagttctaatcagttccctctcttgcacagatctggagaagggactcctgaaagccctgaaggttttagacaattacttaacatcccccctcccagaagaagtggatgaaaccagtgctgaagatgaaggtgtctctcagaggaagtttttggatggcaacgagctcaccctggctgactgcaacctgttgccaaagttacacatagtacaggtgtgtggttattgcgggaggagaggatgaccactggagtggccctttaaggagctcccacatgggcttcccctgacaaccactctaaagacgatttctttcttagggtggttttcataaattgctaccaatggcagaccccaccccagtcctttgcagcagtcattgctaacaagaccactgcttgagataattatattccatgatgtaagtcatgggtgcaaacagactagcaaagaggaatacatcccagtattacttttgaagaatgctcttcctgtctcggtatcactgccaaattcccagattagacagagcaggcttttcctaaagtcaaagctttaactttctttataacttcagtcttcacttcctcttgtggaagatcaaaactgctggttcccatgtttttgtcatagtctcaaagctatggtttagtttgtgcaacatgggcctgacatcagtctgccacacaactatgtagtgaacatctgtgtactaagcattgaaagatacacaagtgtatggtgactgggccttgctctcaaagggttgaaatctgagacaataaaatattcacatgaaagttaagaatatatgatgaaaagtcagatgggccgggcgtggtggctcacgcctataatcccaacactttgggcggccaaggctggtggaccacctgaggttaggagttcgagaccagcctggccaacatggtgaaaccccatctctactaaaattacaaaaattagccgcacatggtggtgggcacctgtaatcacagctatttgggaggctgaggcaggagaatcacttgaacccgggaggcggaggttgcagtgagccaagatcgcgccattgcactccagcctgggtgacagcaagactccatctcaaaaaaaaaaaagtctgatgaaaaatatagagacaaaagtcacctgtgtcagtgcctgaagtggtatagggggaaaaagtcactgtggaaattcaagaggagaattttataagtaaattatatctcaagttttaaaaactcaggaaaaatggctggttattaaaagccaggatttcagtaagtgagaaggaaggctaacgacagtacaagacagtgaggagttgagctggttttatcatgtcggcctggggagaagggaaagccaaggtggcttccctgggtctaacatgttggtccctctcctctccccatcctcaggtggtgtgtaagaagtaccggggattcaccatccccgaggccttccggggagtgcatcggtacttgagcaatgcctacgcccgggaagaattcgcttccacctgtccagatgatgaggagatcgagctcgcctatgagcaagtggcaaaggccctcaaataagcccctcctgggactccctcaaccccctccattttctccacaaaggccctggtggtttccacattgctacccaatggacacactccaaaatggccagtgggcagggaatcctggagcacttgttccgggatggtgtggtggaagaggggatgagggaaagaaatggggggcctgggtcagatttttattgtggggtgggatgagtaggacaacatatttcagtaataaaatacagaataaaaatcaagtgtttttacgcaatggggatttaaagtgtgggcgacatggaatgaggggtgggtcagtgatcttgagctcagggcagaagccaggaattaagaagggaaatgtttgtggtggggctgctatgtttcgtgccggtccgccggtccgccgttgcgctgttctgaggtctacgaagcgtttgcagccccgtcgccagggccggccagatctgggtgggcctgggcagcgctcgctgggcggtgccgatttctggcaaggggggcgcagtctggatgtaatgggcgaggcttagcagggcggaatgggcgtggcccgaagaagccccgccccgtcccgcttagacaatgccccggagccgccagaccgtcgcgcccctgccccatcgtagtatatgagctcgcctacacaaggacccgcgctaaaagccagagctcccagtccccgaggcttgaagacggggactcccttctccaccaactctgtcctcggggggtggggccccagccgagatcacagcgcgacaggagtgggggtggccgctggaggtgagtcttgcgtggggggccctgaaccgtgtgggggccggagtttgggggtgccgggcccatgcctgcaccagacagagagtatggggagccggtatttgggcgcggagctaggcggggtggactttgggacatagacggggaaccgggtcctggagccgggagtagtgccagcgccccggaaccacgccccctgttaccccgcccctcgcatttcgttttagacctctcccagtccttcgggactcggtctggtttatactaggtcgcgctaggggcagcgtgaccagccagggcggagagaggatgcttaactccttaggctcgaactcctcccttcctacccacctctctcccttctcgttcgggtattcaggacttccattccccagcccctgcctctccagctttctccttctgtcccataacccctgcgggtcgcgggctggacttccagtccctgcggtagcgagcagctgagggttaagggggcggggctgctgcatttttggggagtgagcgcatcctagtggctgccaagaggggcgcccgacagggacctcacaagcccccaagcaggggcaacaggtgttttggagattagagaccctagccttgttcctcaggctcctcttaaagaatctgacccctgagggtgctgggtagagtgaggtcgacaggagcggaaggtctggagtgggtggggcggagtgggagggacgcctagagatggcaggaggaagacctgggcgctcttaaccacccccaacgcccttgtctgcatgtctttttctctgtctcctccttttctgtttcttctcccagacaggtgaagaaacaagaaaactaagaaatccgagcggttggagggggagtctgtgtggatgggatggggacgccgggggaggggctgggccgctgctcccatgccctgatccggggagtcccagagagcctggcgtcgggggaaggtgcgggggctggccttcccgctctggatctggccaaagctcaaagggagcacggggtgctgggaggtaaactgaggcaacgactggggctacagctgctagaactgccacctgaggagtcattgccgctgggaccgctgcttggcgacacggccgtgatccaaggggacacggccctaatcacgcggccctggagccccgctcgtaggccagaggtgagcgccgtggcgcgggtgtggtatggggaaaggcagaaggaactggatgtcggggctttggggaagaattgaggatgggggtgtcacagctccgtgccctcttctcctatcctaaggtcgatggagtccgcaaagccctgcaagacctggggctccgaattgtggaaataggagacgagaacgcgacgctggatggcactgacgttctcttcaccggtgaggctggggggaggcataggtcttggcacagggaagtagagtttgggagactcggccgtctggagccttgtttctaactcactcccgccctcaaacctccgcggcctcccggactcaggccgggagtttttcgta

SEQ ID NO: 1208 - DNA, 6000 bp, Homo sapiens
gtgtgtctctgcctgtgtctccctctcccttctgcttgggtttctcgggcagccattccctctccctgggcccagggaagtcggagcctgcttgggtccgcccccttaggtgtggtccccacctcactctcacattcgcctccggggctatttttactcgtgggtgaggctgtgccgcagagattccggccctgtgtcctgtgagaggatggttattgcagtcagaggacttgtgctgggagaccctggcagcaggttaggggtagccttagctgcccaggcctcatcctcactgtcccttcccccacatccttgacaggaaggaagccggagacagagagatgaatcaccctcagcttagggggaggtgtcccttgggccaatgaggtcaccacttgctaattagagggcagcccctctctgtagggccctccacatctctagcgcgaggcccagggccccttgactagactccccacccaaagacaccttggattggaggtgtagagaaccaaaactctggctcccaaaccccacccacctctcctgtcttcagactctactcccttcaggaacccagaaatccaggcttctagcctacaactctggcctcactgaagttccacacccttccctctctaggattcagatcctcccaagttctccaggacctcctccctctacctacctcccacctgtcctcagtgtctggggaaccagaagcctgcctttgcaaaacagtttcccattgatctgccttaggtttgacccaggcccaagggcaaagagcccatagtgaggggacagtgtatgtgtcatgactaggcagaaaacagctggtctgggagtgggaatgcagggactggcctagggatgggtggggtgcatcaggcataaccttgggttggggttacttttcaggctggcagtgatggggccaagattgggaactgcccattctcccagagactgttcatggtactgtggctcaagggagtcaccttcaatgttaccaccgttgacaccaaaaggtaggcctgcttatgttccttgaaacacccctggtgtacacatgtgtgcaaacacacacccacccgagtccttctgtcatgaacatttttgccctccccctggagtccctttcttatcccacgtcctccattccccctttctggttcttcctgacccccatttccagtcctgattcctgatcctttctccaggcggaccgagacagtgcagaagctgtgcccaggggggcagctcccattcctgctgtatggcactgaagtgcacacagacaccaacaagattgaggaatttctggaggcagtgctgtgccctcccaggtataggggcactcagaaagtggagaggtggagcagggagattctgggaaacagacagtttgcagaaatggaaaacagagatggtggtggggctggggcaggagagctagctgaggttcctcccaggaagacatcttacctcatttttcccattggctttcaggtaccccaagctggcagctctgaaccctgagtccaacacagctgggctggacatatttgccaaattttctgcctacatcaagaattcaaacccagcactcaatgacagtgagtcttgtgggtcagaggcctgggtcctgggaggaatagagaggacccagcgggtaggagacattaggggcacctggacgttcagatatcagggagatgaagcagatgttcgtaaatttcccccagcttcccatttttgctttacctctatatttccctgcattttcattggccaagacttttaagcttttctcatttgttccctagcctcttctgccccactgaggacgttagttggctgctggcctgttttctggcagaatagggtcatgcttaagaacagtcatcactctagatccagactacctgagtacaaatccaactagccgtataattttgagcaatcatttcacctctctgtaagtccatttccagatccacaaaattaggatgacaatacctatttcatgggttgatataaatttttttttttctttttttttgagatggagtctcgttctgtcgcccaggctggagtgcagtggtgcaatcagctcactgcaacctctgcctgccgggttcaagcaattctcctgcctcagcctcctgagtagctgggattacagacgtgcatcaccacgcccagctaatttttgtatttttagtagagacagggtttcaccatgttggccaggctggtcttgaactcccgacctcaggtgatccacctgcctcggcctcccaaagtgctgggattacaggagtgagccactgcacccggcgatataaatgagtttgtaaaatgtaaagtgttcactttgggaggccgaggctagcgcaccacctgaggttaggagttggagaccagcctggccaacatgactggtctctactgaaaaaaatacaaaaattagccagttgtggtggcaggcacctgtaatcccagctactcaggaggctgaggcaggagaatcatttgaatctaggaggcagaggttgcagtgagccgggatcatgccactgcactccagcctgggcaacggagcaagactccgtctaacataaaataaaatgtaaagtgcttagaataacacatagaaaagtaactacatgagtgttagctattattattttggactcaccattagtatccacccccaacgggccttttcggactatgtcaatcttttcctgaagttctaatcagttccctctcttgcacagatctggagaagggactcctgaaagccctgaaggttttagacaattacttaacatcccccctcccagaagaagtggatgaaaccagtgctgaagatgaaggtgtctctcagaggaagtttttggatggcaacgagctcaccctggctgactgcaacctgttgccaaagttacacatagtacaggtgtgtggttattgcgggaggagaggatgaccactggagtggccctttaaggagctcccacatgggcttcccctgacaaccactctaaagacgatttctttcttagggtggttttcataaattgctaccaatggcagaccccaccccagtcctttgcagcagtcattgctaacaagaccactgcttgagataattatattccatgatgtaagtcatgggtgcaaacagactagcaaagaggaatacatcccagtattacttttgaagaatgctcttcctgtctcggtatcactgccaaattcccagattagacagagcaggcttttcctaaagtcaaagctttaactttctttataacttcagtcttcacttcctcttgtggaagatcaaaactgctggttcccatgtttttgtcatagtctcaaagctatggtttagtttgtgcaacatgggcctgacatcagtctgccacacaactatgtagtgaacatctgtgtactaagcattgaaagatacacaagtgtatggtgactgggccttgctctcaaagggttgaaatctgagacaataaaatattcacatgaaagttaagaatatatgatgaaaagtcagatgggccgggcgtggtggctcacgcctataatcccaacactttgggcggccaaggctggtggaccacctgaggttaggagttcgagaccagcctggccaacatggtgaaaccccatctctactaaaattacaaaaattagccgcacatggtggtgggcacctgtaatcacagctatttgggaggctgaggcaggagaatcacttgaacccgggaggcggaggttgcagtgagccaagatcgcgccattgcactccagcctgggtgacagcaagactccatctcaaaaaaaaaaaagtctgatgaaaaatatagagacaaaagtcacctgtgtcagtgcctgaagtggtatagggggaaaaagtcactgtggaaattcaagaggagaattttataagtaaattatatctcaagttttaaaaactcaggaaaaatggctggttattaaaagccaggatttcagtaagtgagaaggaaggctaacgacagtacaagacagtgaggagttgagctggttttatcatgtcggcctggggagaagggaaagccaaggtggcttccctgggtctaacatgttggtccctctcctctccccatcctcaggtggtgtgtaagaagtaccggggattcaccatccccgaggccttccggggagtgcatcggtacttgagcaatgcctacgcccgggaagaattcgcttccacctgtccagatgatgaggagatcgagctcgcctatgagcaagtggcaaaggccctcaaataagcccctcctgggactccctcaaccccctccattttctccacaaaggccctggtggtttccacattgctacccaatggacacactccaaaatggccagtgggcagggaatcctggagcacttgttccgggatggtgtggtggaagaggggatgagggaaagaaatggggggcctgggtcagatttttattgtggggtgggatgagtaggacaacatatttcagtaataaaatacagaataaaaatcaagtgtttttacgcaatggggatttaaagtgtgggcgacatggaatgaggggtgggtcagtgatcttgagctcagggcagaagccaggaattaagaagggaaatgtttgtggtggggctgctatgtttcgtgccggtccgccggtccgccgttgcgctgttctgaggtctacgaagcgtttgcagccccgtcgccagggccggccagatctgggtgggcctgggcagcgctcgctgggcggtgccgatttctggcaaggggggcgcagtctggatgtaatgggcgaggcttagcagggcggaatgggcgtggcccgaagaagccccgccccgtcccgcttagacaatgccccggagccgccagaccgtcgcgcccctgccccatcgtagtatatgagctcgcctacacaaggacccgcgctaaaagccagagctcccagtccccgaggcttgaagacggggactcccttctccaccaactctgtcctcggggggtggggccccagccgagatcacagcgcgacaggagtgggggtggccgctggaggtgagtcttgcgtggggggccctgaaccgtgtgggggccggagtttgggggtgccgggcccatgcctgcaccagacagagagtatggggagccggtatttgggcgcggagctaggcggggtggactttgggacatagacggggaaccgggtcctggagccgggagtagtgccagcgccccggaaccacgccccctgttaccccgcccctcgcatttcgttttagacctctcccagtccttcgggactcggtctggtttatactaggtcgcgctaggggcagcgtgaccagccagggcggagagaggatgcttaactccttaggctcgaactcctcccttcctacccacctctctcccttctcgttcgggtattcaggacttccattccccagcccctgcctctccagctttctccttctgtcccataacccctgcgggtcgcgggctggacttccagtccctgcggtagcgagcagctgagggttaagggggcggggctgctgcatttttggggagtgagcgcatcctagtggctgccaagaggggcgcccgacagggacctcacaagcccccaagcaggggcaacaggtgttttggagattagagaccctagccttgttcctcaggctcctcttaaagaatctgacccctgagggtgctgggtagagtgaggtcgacaggagcggaaggtctggagtgggtggggcggagtgggagggacgcctagagatggcaggaggaagacctgggcgctcttaaccacccccaacgcccttgtctgcatgtctttttctctgtctcctccttttctgtttcttctcccagacaggtgaagaaacaagaaaactaagaaatccgagcggttg

SEQ ID NO: 1209 - DNA, 6000 bp, Homo sapiens
tggggaaagggacagaaggggaggtggcaagaagacgtgagtttaacgtagctaccacaaggatgggtgggagagagatcagacggaggagaagagctcggttagggcattttgggatttgggggttggagaagtagaagacttgccccaactctctcctctctctgcgggtgtgggtaaggagagatggtcctatggcatttgggtagcaaaactgcaggcagcaggcttctcggtgtcacccagcccccctctgattgcagcggccgctcccctccctaccgctgctgcattcatttcccagtcttgggacctcctggctgtgcccctccctcccttccttaacagtgtcctcttctccccgctccgtttgtgtctctccgttggcacgcacgtctccccactctccactttcctgccgcctttctttccccttccccccttttgtttctctcatctttgtgtgtctctgcctgtgtctccctctcccttctgcttgggtttctcgggcagccattccctctccctgggcccagggaagtcggagcctgcttgggtccgcccccttaggtgtggtccccacctcactctcacattcgcctccggggctatttttactcgtgggtgaggctgtgccgcagagattccggccctgtgtcctgtgagaggatggttattgcagtcagaggacttgtgctgggagaccctggcagcaggttaggggtagccttagctgcccaggcctcatcctcactgtcccttcccccacatccttgacaggaaggaagccggagacagagagatgaatcaccctcagcttagggggaggtgtcccttgggccaatgaggtcaccacttgctaattagagggcagcccctctctgtagggccctccacatctctagcgcgaggcccagggccccttgactagactccccacccaaagacaccttggattggaggtgtagagaaccaaaactctggctcccaaaccccacccacctctcctgtcttcagactctactcccttcaggaacccagaaatccaggcttctagcctacaactctggcctcactgaagttccacacccttccctctctaggattcagatcctcccaagttctccaggacctcctccctctacctacctcccacctgtcctcagtgtctggggaaccagaagcctgcctttgcaaaacagtttcccattgatctgccttaggtttgacccaggcccaagggcaaagagcccatagtgaggggacagtgtatgtgtcatgactaggcagaaaacagctggtctgggagtgggaatgcagggactggcctagggatgggtggggtgcatcaggcataaccttgggttggggttacttttcaggctggcagtgatggggccaagattgggaactgcccattctcccagagactgttcatggtactgtggctcaagggagtcaccttcaatgttaccaccgttgacaccaaaaggtaggcctgcttatgttccttgaaacacccctggtgtacacatgtgtgcaaacacacacccacccgagtccttctgtcatgaacatttttgccctccccctggagtccctttcttatcccacgtcctccattccccctttctggttcttcctgacccccatttccagtcctgattcctgatcctttctccaggcggaccgagacagtgcagaagctgtgcccaggggggcagctcccattcctgctgtatggcactgaagtgcacacagacaccaacaagattgaggaatttctggaggcagtgctgtgccctcccaggtataggggcactcagaaagtggagaggtggagcagggagattctgggaaacagacagtttgcagaaatggaaaacagagatggtggtggggctggggcaggagagctagctgaggttcctcccaggaagacatcttacctcatttttcccattggctttcaggtaccccaagctggcagctctgaaccctgagtccaacacagctgggctggacatatttgccaaattttctgcctacatcaagaattcaaacccagcactcaatgacagtgagtcttgtgggtcagaggcctgggtcctgggaggaatagagaggacccagcgggtaggagacattaggggcacctggacgttcagatatcagggagatgaagcagatgttcgtaaatttcccccagcttcccatttttgctttacctctatatttccctgcattttcattggccaagacttttaagcttttctcatttgttccctagcctcttctgccccactgaggacgttagttggctgctggcctgttttctggcagaatagggtcatgcttaagaacagtcatcactctagatccagactacctgagtacaaatccaactagccgtataattttgagcaatcatttcacctctctgtaagtccatttccagatccacaaaattaggatgacaatacctatttcatgggttgatataaatttttttttttctttttttttgagatggagtctcgttctgtcgcccaggctggagtgcagtggtgcaatcagctcactgcaacctctgcctgccgggttcaagcaattctcctgcctcagcctcctgagtagctgggattacagacgtgcatcaccacgcccagctaatttttgtatttttagtagagacagggtttcaccatgttggccaggctggtcttgaactcccgacctcaggtgatccacctgcctcggcctcccaaagtgctgggattacaggagtgagccactgcacccggcgatataaatgagtttgtaaaatgtaaagtgttcactttgggaggccgaggctagcgcaccacctgaggttaggagttggagaccagcctggccaacatgactggtctctactgaaaaaaatacaaaaattagccagttgtggtggcaggcacctgtaatcccagctactcaggaggctgaggcaggagaatcatttgaatctaggaggcagaggttgcagtgagccgggatcatgccactgcactccagcctgggcaacggagcaagactccgtctaacataaaataaaatgtaaagtgcttagaataacacatagaaaagtaactacatgagtgttagctattattattttggactcaccattagtatccacccccaacgggccttttcggactatgtcaatcttttcctgaagttctaatcagttccctctcttgcacagatctggagaagggactcctgaaagccctgaaggttttagacaattacttaacatcccccctcccagaagaagtggatgaaaccagtgctgaagatgaaggtgtctctcagaggaagtttttggatggcaacgagctcaccctggctgactgcaacctgttgccaaagttacacatagtacaggtgtgtggttattgcgggaggagaggatgaccactggagtggccctttaaggagctcccacatgggcttcccctgacaaccactctaaagacgatttctttcttagggtggttttcataaattgctaccaatggcagaccccaccccagtcctttgcagcagtcattgctaacaagaccactgcttgagataattatattccatgatgtaagtcatgggtgcaaacagactagcaaagaggaatacatcccagtattacttttgaagaatgctcttcctgtctcggtatcactgccaaattcccagattagacagagcaggcttttcctaaagtcaaagctttaactttctttataacttcagtcttcacttcctcttgtggaagatcaaaactgctggttcccatgtttttgtcatagtctcaaagctatggtttagtttgtgcaacatgggcctgacatcagtctgccacacaactatgtagtgaacatctgtgtactaagcattgaaagatacacaagtgtatggtgactgggccttgctctcaaagggttgaaatctgagacaataaaatattcacatgaaagttaagaatatatgatgaaaagtcagatgggccgggcgtggtggctcacgcctataatcccaacactttgggcggccaaggctggtggaccacctgaggttaggagttcgagaccagcctggccaacatggtgaaaccccatctctactaaaattacaaaaattagccgcacatggtggtgggcacctgtaatcacagctatttgggaggctgaggcaggagaatcacttgaacccgggaggcggaggttgcagtgagccaagatcgcgccattgcactccagcctgggtgacagcaagactccatctcaaaaaaaaaaaagtctgatgaaaaatatagagacaaaagtcacctgtgtcagtgcctgaagtggtatagggggaaaaagtcactgtggaaattcaagaggagaattttataagtaaattatatctcaagttttaaaaactcaggaaaaatggctggttattaaaagccaggatttcagtaagtgagaaggaaggctaacgacagtacaagacagtgaggagttgagctggttttatcatgtcggcctggggagaagggaaagccaaggtggcttccctgggtctaacatgttggtccctctcctctccccatcctcaggtggtgtgtaagaagtaccggggattcaccatccccgaggccttccggggagtgcatcggtacttgagcaatgcctacgcccgggaagaattcgcttccacctgtccagatgatgaggagatcgagctcgcctatgagcaagtggcaaaggccctcaaataagcccctcctgggactccctcaaccccctccattttctccacaaaggccctggtggtttccacattgctacccaatggacacactccaaaatggccagtgggcagggaatcctggagcacttgttccgggatggtgtggtggaagaggggatgagggaaagaaatggggggcctgggtcagatttttattgtggggtgggatgagtaggacaacatatttcagtaataaaatacagaataaaaatcaagtgtttttacgcaatggggatttaaagtgtgggcgacatggaatgaggggtgggtcagtgatcttgagctcagggcagaagccaggaattaagaagggaaatgtttgtggtggggctgctatgtttcgtgccggtccgccggtccgccgttgcgctgttctgaggtctacgaagcgtttgcagccccgtcgccagggccggccagatctgggtgggcctgggcagcgctcgctgggcggtgccgatttctggcaaggggggcgcagtctggatgtaatgggcgaggcttagcagggcggaatgggcgtggcccgaagaagccccgccccgtcccgcttagacaatgccccggagccgccagaccgtcgcgcccctgccccatcgtagtatatgagctcgcctacacaaggacccgcgctaaaagccagagctcccagtccccgaggcttgaagacggggactcccttctccaccaactctgtcctcggggggtggggccccagccgagatcacagcgcgacaggagtgggggtggccgctggaggtgagtcttgcgtggggggccctgaaccgtgtgggggccggagtttgggggtgccgggcccatgcctgcaccagacagagagtatggggagccggtatttgggcgcggagctaggcggggtggactttgggacatagacggggaaccgggtcctggagccgggagtagtgccagcgccccggaaccacgccccctgttaccccgcccctcgcatttcgttttagacctctcccagtccttcgggactcggtctggtttatactaggtcgcgctaggggcagcgtgaccagccagggcggagagaggatgcttaactccttaggctcgaactcctcccttcctacccacctctctcccttctcgttcgggtattcaggacttccattccccagcccctgcctctcc

SEQ ID NO: 1210 - DNA, 6000 bp, Homo sapiens
agtcctaataatggtccccaacttttaaacacctaaataagaatgactacgagtcatatccgagagtatgggatccccaataaaaggagggagaagatcatattctctttgatcatgtagggaaaaaaaatttttttattcgagacaggatctctgtctcccaggctggaatgcagtggcgtgatcatagctcactgcagccttgacctcttgtgctcaagcgatcctcctgcctcagcctcccaagtagctgggactacaggcacctgccaccacgcccagctaacttgtaaagtttttagtagagatggtgtcccactatgttgcccaggctgatcttggacttctgagttcaagtgcctgccttggcttcctaaagcactgggattaccgacctgagtcaccacacgcagttcagttattgttaattatgttttagagatgaacacgtcgaaacttgtgttatttagtcaatgtacaagtacttccttgttgaaaagaaaaacagcctcaccaaagaagtagagcgcagatgcaaatccaggattttcccttcccagattttttctttccatgctgctagaaatggccagggttctctttgtcattgaagcatttgtcattcattcagttaagaatgcctgcctctagatttcatatcaattaactcttttgctttcatttaagttcatttggataaacttaaaattataacagcttttttttttaatttattatttttttgagacagagtcttgctctgtcacccagactggagtgtagtggtgcgatctcagctcactgcaacctccacctcccaggttcaagtgattctcctgcctcagctcctgagtagctgggattacagatgtgcaccaccacgtccggctaatttttgtgtttttaggagagaaggggttttgccatgtttgccgggctggtcttgaactcctgatctcaggtgatccacccatctcggcctcccaaagtgctgggattacatgcatgagccatcgcgcccggcctataccatcttttaaaatgaacaaaattaagaaaactactgtttgaggaactataaaaaggagagggagaaggaaggaaaagaccctgcagcgtcagcctgaagaaggctgtcttaccccacactgctgtagcaattatgttcttggcactccctcttcagttctcttgtccctttgaaagcatctaacctggctttcactttggggactctgagctctgatccttccaaacacagaatccaataaaaacctaattctgaaattaatcacattaaagttctgaaaaatctcctggggttcttatatattcaccttagacagcaattaaacttgtgactggatttctgccttgggaagcatccagtctgaaaggaaagaaaaggccggcgtggtgcttcatgcctgtaattccagcactttgggcggcccagacgggcggatcacttgaggtcaggagttcgagaccagactggccaacatgacgaaaccccctctctactaaaaatacaaaaattagccaggcgtggtggtgtgcacctgtaatcccagccactcaggaggctgaggcaggagaatcgcttgaacctgggaggtggaggttgcagtgagccaagactgtgccattgcactccagcctgggcgacagagcaagactctgtctcaaaaaaaaaaaaaagaaaaaaaaaagaaaattcaggtgaccctctccttgtcaggaaatggacaaggaatatgtatgtgtgggtttccagtctagtccacagaggcttcacttaaaagctaggtcaactatagcactgtagactctgactagtgtgactgattgaagaaaaacagcatttatattggatttttctgctatccagagagcacccaagatttggggtcccaacaccacatctacttgctaggcagttgagacagtgatgccctttgcttcatgccaatagagaggttttttctccccctctcccaccccccactccccactttttatgtttctcagcagaatcagagaagtattttatttttgagaaggagtttcgctcttgttgcccaggctggagtgcagtggcgcgatctcggctcaccgcaacctccgcctcctgggttcaaatgattctcctgcctcagactcccaagtagctgggattacaggcatgcgccaccatgcccaggtaattttttttttttttttttttggtatttttagtagagaccggctttctccatgttggtcaggctggtctcgaatttctgacctcaggtgatctgctgcttcggcctcccaaagtgctgggattacaggtgtgagccactgtgctggccttttaaattgtggatttggaaggagggaaggaatgaatccagacctgccagtagtagcagttgatggtgaggaagtttccagagggaggggtgaggttaagggtctctggaagtgttgatacactgtgcagctaagatgaacatagtttgggagaatctccagccagacatttcatagagaaatgtttgggaaaattcctgaagtttgaccggtttgactagtttagagaggtgattcattagggagctaaagctgaatgtgaaagttatcacctacctgcacatacagacacacacatattgttaaagcaatttatttgcaacatgagtttagatcagtgaattataaacaaatgaatacccttaaattccaggaagaggtgttttgatagtggacaggtgtgtgtgtgcaggtgtgcatatgaaaagtgccaattgagcaaagtgtttaaaaacaggattattccttcatcagtaacttcttcctttcatttgtgctcaaggaatatcgccatggcaatgaggctattttttttttcttttcttttttttttttgtggtaggttgtaaacacagtactattgcttcaaccccctcacattttcctttcagacgcctaacaaagggtcttgcattcacactaagaatgaaggaaaaaaacaaagggaaagtaaattactaaatgcaaccgtatttaaaacaggaggaaggagaatccgcaggaagttggaatctaggataaaaacttagacacattcagcctggccaacatggcgaaaccctgtctctattaaaaatacaaaaattagcccggcgtggtggcacatcctgtaattccagctattggggaggctgaggcagcagaattgtttgaaccccaggggcagaggttgcaatgagcagagatctcaccactgcactccagcctgggcgacagagtgagactcagtctcaaaacaaacaaacaaaaacaacaggccgggaatggtggctcacgcctgtaatcccagcactttgggagcccgaggtgggcggatcacgaggtcaggagttcgagaccagcctgaccaacatgggcggatcacgaggtcaggagttcgagaccagcctgaccaacatggggaaaccctgtctctactaaaaatacaaaaattagccaggcgtggtggcgcacgcctgtaatcctagctactcaggaggctgaggtaggagaattgcttaaacccgggaggcggaggttgcagtgagccgagatcacgccactgcactccagcttgggcgacagagcgagactgtctcaaaacgaaaacaacaaacttaagacacataacctgaggtgttaagaggagctagtaactagaacctgggtcccaacccctcctgctttccagcatcactccacacagtttgcttaaagagggccacctgccaaacagctgtagtatgtgatgttaaagagagctaaacaccccccgcacctccctcccagggtcaccatcttgttaaatttgacctaaaaacggtaacagcctaggggtttcagggacagacagaaaatcttactcgggactgtgaggtcctacttctacacaccgtccaggagtgaaccaggaattgagaaagtaggaaggaggtgtcccagaccccaagctaggaatggggagggaaatggaggaatcccaaatgccttaaggacggcctacatactaaggaaaatttttttctaactcctggttgcagctgaggggagcggctgagggcggggacaggggtgcggcggacccactgctcccattacccgaccagcgcctcccttcctccttggatgggtgcccctgtcttgctaagaactgcctgtttacacaactgctttccttgtgaaaatttaaaggctcctattcccagttgttctatccttgtaggttaaagattatgtcaaaaactatattgcattatctctttccttctccttcccattaagacggaaaaaacatccgggagagccggtccgtttctcaggcagactaggccattaggtgcctcggagaaaggacccaaggctgctccgtccttcacagacacagtccaatcagagtttcccaggcacatcgatgcaccgcctccttcgagaaacaaggtaactttcgggttctggttgtctccaaagtcatccgaccaatctcgcaccgcccagagcgggcccttcctgtcaattacctactgaagggcaggcggccagcatcgccatggagaccaacacccttcccaccaccactccccctttctctcagggcccctgtcccctccagtgaatcccagaagactctggagagttctgagcagagggcggcaccctgccctctgattggtccaaggaaggctggggggcaggacgggaggcgaaacccctggaatattcccgacctggcagcctcatcgagcttggtgattggctcagaaggggaaaggcgggtctccacgacgacttataaaagccgaggggcgcgcggtccggaaaacggccagcctgaggagctgctgcgagggtccgcttcgtctttcgagagtgactcccgcggtcccaaggctttccagagcgaacctgtgcggctgcaggcaccggcgtgttgagtttccggcgttccgaaggactgagctcttgtcgcggatcccgtccgccgtttccagcccccagtctcagagcggagcccacagagcagggcaccggcatggccaaagccgcggcgatcggcatcgacctgggcaccacctactcctgcgtgggggtgttccaacacggcaaggtggagatcatcgccaacgaccagggcaaccgcaccacccccagctacgtggccttcacggacaccgagcggctcatcggggatgcggccaagaaccaggtggcgctgaacccgcagaacaccgtgtttgacgcgaagcggctgattggccgcaagttcggcgacccggtggtgcagtcggacatgaagcactggcctttccaggtgatcaacgacggagacaagcccaaggtgcaggtgagctacaagggggagaccaaggcattctaccccgaggagatctcgtccatggtgctgaccaagatgaaggagatcgccgaggcgtacctgggctacccggtgaccaacgcggtgatcaccgtgccggcctacttcaacgactcgcagcgccaggccaccaaggatgcgggtgtgatcgcggggctcaacgtgctgcggatcatcaacgagcccacggccgccgccatcgcctacggcctggacagaacgggcaagggggagcgcaacgtgctcatctttgacctgggcgggggcaccttcgacgtgtccatcctgacgatcgacgacggcatcttcgaggtgaaggccacggccggggacacccacctgggtggggaggactttgacaacaggctggtgaaccacttcgtggaggagttcaagagaaaacacaagaaggacatcagccagaacaagcgagccgtgaggcggctgcgcaccgcctgcgagagggccaagaggaccctgtcgtccagcacccaggccagcctggagatcgactccctgtttgagggcatcgacttctacacgtccatcaccagggcgaggttcgaggagctgtg

SEQ ID NO: 1211 - DNA, 6000 bp, Homo sapiens
ggccacgctggtcttgaactctttttttttttttttttttgtgacagagtctcctgttgcccaggctggagtgcagtggcagtgatctctgctcactgcagcctgcctccacttcccagattctagcgattctcctgcctcaggcccccaaatagctgggactacaggtgtgtgccaccgtgcccagctaatttttgtatttttagtagagacaaggtttcatcatgttggcaaggctggtctggaactcctgacctcaagtgatccgcccacctcagcctcccaaagtgctgggattacaggcatgagccactgcgcccagcctatttattgatttattgagatgaggtctcactatgttgcctaggctggtctgtaatcctgagatcaagcaatccacccacctcaacttcccaaagtgctaggattataggcggtgagccacagctggccacattttattttatttatttattttttgagacagagtcttgctctgtcacccaggctggagtgcagtggcaccatcttggctcactgaaatctccgcctcctgggttcaagcgattcttctgcctcagcttcccaagtagctgggactaaaggcgcgagccaccacgcccagctaatttttgtatttttagtagagacgggggtgtcaccatattggccaggctggtctcgaactcctagacttcgtgatctgcctgcctcggcctcccaaagtgctggaattacagcatgagccactgcacctggcctatttatttatttttttgagacacagtctctctgtgttgcccatgctggagtgtagtggtgcgatcttggcttccggcaacctctgcctcccgggttcaagcgattctcctgcctcagcctcccaaatagctgggactacaggcgcccgccactacacccagctaatttttttgtaattttagtagagacggggtttcatcatgttgggcaggctggtctcgaactcctgacctcaggtgatctgcctgcctcggcctcccaaagtgctgggattacaggtttgagccaccacgcccggcctatttttttattttttgagacagagtcttgctctatcgcccaggctggagtgcagtggcgtgatcttggctcactgcaacttttgcctcccaaattcaagggattcccctgcctcagctcccaaatagctgggattacaggcgcccacgaccacgcctggctattttttgtatctctagtagagacgaggtttcctcatgttggtcaggctggtctcgaactcctgacctcaagtgatctgcccgcctcggcctcccaaagtggtaggattacaggcatgagtcaccatgcctggccccacattttaaaataaaacaattagatcaccatttattgtccagtggaattgaaatatcatagtgatggccgggcacggtgcttcacgcctgtaatcccagcactttgggaggctgagttgggtggatcacgaggtcaggagtttgagaccagcctggccaacatgccaaaaacccatatccactaaaaaaaaaaaatacaaaaaatacaaaaaattagctgggcatggtgttgtgtgcctgtaatcccagctgctcaggaggttgaggcaggagaatcgcttaaacccgggagtgggaggttgcagtaagcagagattgtgccattgaactccagcctgggcgacagagcaagactccatctcaaaaaaaaaaaaaaagtataaattagttcttaccagttgggaatcattccttttttctttcatcacctcttttttccttgagctcctactactactccacttccccacaaactttatgcttttatacttgaaagtcctttattgaccaatcttttacatcttcctgcatatacatgtatattaattgagatgaaaaatatctttcttgtgattgtaagactctagttgttaaaaattattctggaggagttactgttacaattattataagaacagaatgttcttataaacatgtgatcgtacacttttttttttttttttaagacggagtctcgctctgtcgcccaggctggagggcagtggcgcgatctcggctcactgcaagctccgcctcccgggttcacgccattctcctgcctcagcctccggagtagctgggtctacaaggcgcccaccaccacgcccagctaatttttttttttttttttttttggtatttttagtagagacagggtttcaccgtgttagccagggtggtctcgatttcctgccctcgtgatcctcctgcctcggcctcccaaagtgctgggattacaggcgtgagccaccgtgcctggccgatcgtaaacatttttataactgttaaaaagaaatatttaataagatagtagtctgggagtggcggttcacgcccataatcccagcactttgagacgctgaggtgggaagattgcttgaggcaaggagctcaagatccatctgggcaacacagtaagaccctgtcgctataaaaaacctttttttttttttttttgagacagagtcttgctctgtcgccaggctggagtgcagtggctgatctcagctcactgcgacctccgcctcccgggttcaagcgattctcctgcctcagcctcccgagtagctgggactacaggcgcgtgccaccaagcccagataatttttgtgtttttagtagagacggggtttcaccatgttggccaggctggtctcaaacttccgacctcaggtgatccgcccgcctcggcctcccaaagttctgggattacaggcatgagccaccgcgcccagcctccacaaaaaactttttttaaaaaaattagccaggtgaggtggtgtgcgcctgtagtcctagctacttgaggtgggaggatggcttgagcccaggaatttgaggttacagtgagctatgaccgtaccaccgcattccagcctgggtgatagaacaagaccctttttttttccttttttttttttttttttttttttttttttgagataatctcgctctgtcgcccaggctggagtgcaatgacgcgatctcggcttactgcaacctccgcctcccggattcgagcggttctcctgcctcagcctcctgagtagctggagctacaggcgcctgccaccacgcccagctaatttttttgtatttttagtagagacggggtttcaccatgttggccaggatggtctcgatctcttgaccccatgatacgcccacctcggacccccaaagtgctgggattacaggcgtgaaccatcgcgcccggccgaccctgcatttaaaaaaaaaaaagacaaaagaaaggaaaaaaaaaaaaaaaaaaaagaaaaggtggtattcatggtgccttggtgaaagaaacagggtacatttccctttattttaaacaggtaagattacccccaggagatttcatggttgagaactatacttttgaggggggaggggaaaaaagagaactattcttttttttttttttcttaagagggtgactctattgtaaaaggagaagtgaagaatgagaacctgtactgcaggtgtttccttaggaagaccaattttgggaaagttgaggttcttgaaattaaatcccttacatcttccaagtcccagtcctcgcggagagtttttatgttccccattttgaaagctgtagactttgacgactggagagaagtgatgtgggattgttcaacggacgggtgtttgcgattctaggactcagcgttagggatctaataagctctgtgaccctagttaagtggcaagatgcccaccacttgtggaaatgggaatcttagcgattgggaccctgttaatctttctggtttcctcataagctcacctctggacccagccttgcctccacgagtccctccagcctccctaaacacaacgaggtgggtatcaaatctgtttcttcatccttcattcttttttcccctctccccgaagaggaggaggaggagacccaaagtattttatgagcctcatttcgcctcacagcagccctcgcagcggcaatttgcacaaactctcctccaagccccaccccatcatcgcccatccgcagaccctaggcctcccacgacaaagcacggccacctggtcagcacagacggcccttcgaggaccccctctggagaagaaccattcaggtcccaacggtctggctggtcattagttctgtggtgaagcttgaaaagcaaatcagcaacaatagtaataacaataacacttttatggcgcgttgtgctcatttgtacgcatgtgttataacgatcgcgggacgcagcacctggcagtagaaacagctgctggacagcggcaaggagcgcgccgcccttgcaggggaaggggctgggtcagccgaataagccgtggaaatgggaacctgggggacaggaaagcagggccagatagcttgccaatagcccaactgaaagaaaaggttttacttcccttttaagagacttctgcccttccctgaaactctgcacagctttggaaagcccaattcctaatccaccctgttcggttcccctgcccctccttggaaacgaggctcggtcctccctacgcgctactctccggcggttgggccccaggcaggaagtttctgattggcggagtcgtagaagcaccgggtgaaaagagctccactggctgcgcaccggagtccgggcgtagccagtgccgtacggcaaaatggcggcccccagctgctttgggacgcctgggttcggggagacaaactccgacctggaagagaccgctgactatgtgggccgcactggaggtgttcgcggggcgggcctactgtcacctccggccacaggaagcctgtgttccgtacgacaatatggcggcgcttagttgcatgaaggcggaaactctgtgacttccggtccgtagtggggcctgcggtgggagtgggaaggaaggcggagggaaccatgcgaggttctgagaattgcggcgagggtcgcctcgagagacggtttctgaggtgggggccggacggtgcggggatcagaggcgggggcggggatatagagggagaggtattggggagagctgggcgctgagtctgaggggaaagctgtggtaccttcctgtccctgaaagggagtggagcggccgggggctgaactgggggagggggatttggcgggaagcgcatctagcggaccggccggacccacggttgggatctaagaggaatcgcgagagcgtagcgcggtgcggggggacttttgatcagttacgggtcaccgagagaatggggaaaattagggtggggtgaaagggaggggacttgggtaaaatatcttcaacctaaagccccagtttgaggagactcatcggagggtgaaatatggagataattcaaggaggagaaaagagaacggactgttgggagggaacctctttcacctcagagagtctaggagttggggtgatcattcaggatagggtgggtgtggggttgacttgtttgagagcagagggggcaaacacatgaggtggcgcccacaggagtgtgttgtctgtgcaagggggtgtcaggacgatttggggtgcagtgtgggaggaagaatcaacttgccaactctaagaaataggggggaaatgcaacagaaagaccggaaatcgacgtgaggggtggagcagaaggtggcaacttaaggtgtgggggtggtttgccccccccccacaccacttgaagggccccaaaaagcatatagaactaatggttattgaaatcaggtggtgaagacagtgttggtcagggctggatgttactgaaacccaaggagttcagaaaatgtgtgaggtgaagggatggggctatgctggaggggctcattctgaggccccatccccttccagcaggaattctgaaatccccaccacttcctccctccgggggatttgatcccctatggccaccgctaacagcatcatc

SEQ ID NO: 1212 - DNA, 6000 bp, Homo sapiens
caaatgcctactgtgtgccacacaccgttctgggcattttacaaagagtatctcagttcatccttgcaacttccttcaaggatagctactattatattcccactttaaagacgaggaaacagacgcagagaggttgagcaagctgccacccatcgcacggctcagcatgttagaactggcatttgaacccaggcagtctgactccagcagtccctcaaaatgtgtcccgtgtcctgccaggccccacacccctaagaagttctacaggaagagggtccgtttctggcgcttcccctatgcctatggccaccacactcaccttcaagcagacactccttctccctggtggagggctcagggctgacctcacggggccctgtggctctctgcaggtattcttccttcaactgcaggatctggataaagtggctgctaatcccaaagcacagtcaggtgagggaggcaggtggggctcagagatgtgacagagaccccctaaacctcccccaaggctcacctacaggtctgctggccctctgcagccttcctctcccatcagccccctgctctgcatctggggtcctcatcatagagggggattatcgctctcaaaagtagggtgatgagggggtggggaacagagagaggtgggtccctgtcctcacaggggatggctgccaggcctgtagaaggagctgggagcaacaggaccccccgtccctctggccctggcatattccctttctactccctagcctgtcctctttcatatctggtatcccccatccacaacccctcacttgtgggaggaccccatctctccctccttcccaaaccaaatccccatctccagcctcctccccaccagatgcttctgtccgttggccccacccacatctccctgtccttccccaccaggtgccctgttccagacctttacccacccaaggcctccctccccagaccctccccagcatgggtcccccatctcaggcccatgcccttcccccatctcatgtccaggcctcttctcagtacctctgtcccaggccttgccaacctgggtaccccccaattccagcccctcacctgtctgaggcccctgttttcccagaggcgtcccctgctggctccttcccctccttctcaggcaggttgcccaacacctcctggcttgctatgggcagaactgacttcacctctccgccaggccttcttgctcttgcaggtgtaggtcaccatacgccccatgcccagctttaagggaggctgctgtgaccgttttgagaagcccctgggtatggccacagagaaggggtggggcggcaaggcagatggtcccggccccctcctcctcacatgtccctcttggctcatcatcagggaaatggcaccctggtggcggaacatggaggagcagcctgaaattcatgatcagggcttcggagctggggcctccatcctgagaaggtccccaattcagatcctgtaacagccaccccaggaccaactgcttaagaacaggaagagttttcaaattaaaacctccagttggaaacttcccagaattctgggaagcaaagactggggaggatgggaggttgggggagattagttggaggtagagggggcaggggtttgatgaagcagggaaggaggtgtggggggcaggcagggattttgggggaaagggggtggagacttggaggaaaagatgtgagagccccaggaagcttggcagggagcaaacagggagaggcagggagggaactgaaccctgagggcaggggctattgaggactgcacacacctctgtccttcctgggtttgttctgtcctcaagaacactcccagcagccagacagtatctgtcttccctcttagcatccaggttttgtgtccaggtggtagcacagaccccactaagtctatttatttatttgtttttatttttatttatttatttttttgagacagagtctcgctctgtcgcccaggctggagtgcagtgggctatctcggctcactgcaagctctgcctcctgggttcacgccattctcctgcctcagcctcccaagcagctggaactataggcgcttgctacggcgcccagctaattttttgtatttttagtagagatggggtttcaccgtgttagccaggatggtctcgatctcctgacctcgtgatccacccgcctcggcctcccaaagtgctgggattacaggcgagagccaccgggcccggccttgtttttatttttatttttaatttcttgagatggagtctagctctgtcgccaggcaggagtgcagtggcacaatcttggctcactgcaacctccgcctcctggcttcaagcgattctcctgcctcagcctcctgagtagctgggactacaggtacccgccatcacgcccggctaatttttgtatttttagtagagacagggtttcaccatgttggccaggatggtctcgacctcttgaccttgtgatccacctacctcggcttcccaaagtgctgggattacaggcatgagccaccgtgcccggccctatttttattttatttttttgagatggggtttcactcttgtcacccaggctggagtgcagtggtacaatctcagctcactgcaacctccgcctcctgggttcagcaattctcctgcctcaacctcccaagtagctgggattataggcgcacgccaccacaaccggctttattttatttatttattattattattattttttgagatggagtttcgctcttgttgaccaggctggagtgcaatggcgcaatcgcagcttaccacaactctgcctcccgggttcaagcaattctcctgcctcagcctccagagtagctgggattacaggcatgcgccaccacgcctggctaattttgtatttttaataggggtggagtttctccacgttggtcaggctggtctcgaacttccaacctcaggtgatcagccagcctcggcctcccaaagtgctgggattacaggcgtgagccaccgtgcccgaccaattttttttttttttttttgagacggagtctcattctgtcacccaggctggagtgcagtggcgtgatctcggctcactgcaagctctgcctcctgagttcacgccattctcctgcctcagcctcccatgtagctgggactacaggcgcctgccaccatgcccggctaatttttttgtatttttagtagagacggggtttcaccatgttagccaggatggtctcaatctcctgacctcaggtgatccacctgccttggcctcccttttgtgtatttttaaaagagacggggtttcgccatgttaggcaagctggtcttgaactcctgacctcaggtgatctgcctgcctcgggctcccaaagtgctgggatgggattacaggcgtgagccaccgtgcccggccttttttttttttttttttttttttctagagacagactctccctctgttgccctggtgcaatcatagcttactgcagcctcgacctcctgggctcaagcaatcctcccacctcagcctccccagtagctaagaccacaggcatacaacaccatgccttgctaattttttttttttttttttttttttttggtataagcagggtattgctgttgcccaggctggcctggaactcctgcacctggcctcaagcgatcctcttgccttggcctcccaaatggctgggatgggattctaggcgtgacacaccgcagctggctgccttttttgttgttgttgagacaaggtcttgctctgttgcccagggcggaatgcagtggtgcaaacatggctcactgtggcctcgacttcctgtgctcaggtgatcctcctgcctcagcctcctaggtagctgggaccaccaaatgcacaggtgtgcactaccatacccagctaatttctaatttttttttgtagagacatggtctcactttgttgcccaggctggtcttgaactcctgggctcaagcaatcctcccacctcagccttccaaagtgttgggattacaggcgtgagccactgggcccagcctctattgagttttaatctccgtttacttgactatcaccttcaggatttcaaacatccagagaccaccaaggtgcatggtgcacaggtctaaattgcaggttgaatctcaatctagtattagtattccccaatgcgactacagaactgattattactatttattttttttgagatggagtcttgcactgtcaccagggctggagtgcaatggcgcaatcctggtttactgcaacctccacctcccaggttcaagggattctcctgcctcagccttccaactagctgggattacaggcgcccgccaccacacccagctaattttttgtatttttagtagagacggggtttcaccatgttagccagaatggtctcgatctcttgacctcgtgatctgcctgcctcagcctcccaaggtgctgggattataggcgtgagccaccgcgcctggcccagaactgatgattaacccagctgagcctctgttcatctgaatgggtattgtcaacagcactcacttacaagagttgctgagaagatccaatgagacaaatagttgctaaagtgccaggcatgcagcagtgcttaagaaacttctcaccctgggttttttattggtattgattgatgtagaggtgggggagaagatcaaagacaaggattgagaatcagggatgggaaaagcagtgggccactgacagccgccctgcctgcctgggaggtggggtggggaaagtgggcgggacatgctcctgggcctggcccacccagatcaccctacaggctgtcggcctgtgcgtctgcatccggtggccacagagcaacttcctctagagggagctgattggagccgggtgccgctggcacctctatgatcactggagtctcgcgggtccctcgggctgcacagggacaagtaaaggctacatccagatgccgggaatgcactgacgcccattcctggaaactgggctcccactcagcccctgggagcagcagccgccagcccctcgggacctccatctccaccctgctgagccacccgggttgggccaggatcccggcaggtaagctggaagggtcttgtccatcctcccagatctcagcagccccagccccagggtggggcagggagcctgccgggagccgggtggggaaggggaagctcaaggcttccctgggcaggtctgccgccccggctggggacctgatcctgccatgcctgcctctggctgcccctcacagcttcccctcttggcccagccctggatgccggagaactgtaagaactgggtcctttaacagtctgggagatgggagtggaggtcagagccaaggtcaagggcagagagagaactttctcagcgcttgctgctgcccaacatccctagactgggtccagggcctggccaggcatgtatccctgggcaacattcatcggggcccagcaagcccaggaagtcgggggtggctcccctcaccgggaatttaggccacttggatgggggaggcagagctaggcctgagtcagcataggttgctggccttggtgggtgttctgaggctctacctgctcccctcggaagcctggggtgttggtagagggagttggaggtgcagtcagcatcctccagccctactgtcctgggggtgccgggtcctggagactggggaagaaggaaggccatcttatgtaaggagctacggggggtgggaggcaagcaaaactctttttttttgttttttgaaatggagtctcgctctgttgcccaggctggagtgcagtggcgcaatctcggctgaccgcaacctccgcctccaaggttcaagcgattctcctgcctcagcctcccgagtagctgggactacaggcgcacgccaccatgcccagctaatttttgtatttttagtagagatggggtttcattatgt

SEQ ID NO: 1213 - DNA, 6000 bp, Homo sapiens
atgaagtccttgccgatgcctatgtcctgaatggtattgcctaggctttcttctagggttttcatggttttaggtctaacatttaagtctttaatccatcttgaattaatttttgtgtaaggtataaagaagaaatccagtttcagctttctacatattgctagccagttttcccagcaccatttattaaataaggaatcctttccccatttcttgtttttgtcagatttgtcaaagatctgatggttgtagatgtgtggtattatttatgaggcctgtgttctgttgcattggtctatatctctgttttggtaccagtaccatgctgttttggttactgtagccttgtagtacagtttgaagtcaggtagtgtgatgcctccagctttgttcttttggcttaggattgtcttggaaatgtgggcttttttggctccatatgaactttaaagtagttttttccaattctgtgaagaaagtcattggtagcttgatggggatggcactgaatctataaattaccttgggcagtatggccattttcacgatattgattcttcctatccatgagcatggaatgttcttccatttgtttgtgtcctcctttatttcattgagcagtggtttgtagttctccttgaagaggtccttcacatcccttgtaagttgtattcctaggtattttattctctttgtagcaattgtgaatgggagttcactcatgatttggctctctgtttgtctgttattggtgtataggaatgcttgtgatttttgcacattaattttgtatcttgagactttgctgaacttgcttatcagcttgaggagattttgggctgagatgatggggttttctaaatatacaatcatgtcatctgcaaacagggacaatttgacttcctcttttcctaattgaataccctttacttctttctcttgcctgactgccctggccagaacttccaacactatgttgaataggagtggtgagagagggcatccctgtcttgtgccagttttcacagggaatgcttccagtttttgcccattcagtatgatattggctgtgggtttgtcataaatagctcttattattttgagatacgtcccatcaatacctagtttattgagagtttttagcatgaagggttgttgaattttgttgcaggtacttgaaaggaagaggggctgggacaggagctttatgctgaacaggttggctaaacatacatattctggctaatttttttgtgtatttttagtagagatggggtttcaccatgttagccaggatggtctcgatctcctgacctcgtgatctgcctgcctaggcctcccaaagtgctgggattacaggcgtgagccgccgttctttttttttttttttttttttaagagacagggtctcactatgttgtccaggctggtctcgaactcctgcgctcaagcagtctgcccccctcggcctctgaaagtgttggaattacaggcgtgagccaccgtgcctggcagaaaatatagtttattctttaggtgtaggcgtgtgtgacttaacccttacctgacacggccttaggtcctgattataatttggtatcttattgccataaagagtgcattctgttagtctatgatctctattttaacattgatgctggtcagatgttgtgtctgaactgcaaaagggagggagtataaccaggcatgtctgaccccctgacctgtcatggctggaaactcagtttttaaggtttttctggggtctccttggccaagagggtccattcaattagttagggggcttaggatttgtttttagtttacaggggaaataagcctattaggggtagacagatctgcaaagcatgagtgttggcaggaacttaagcaacaaagagatacggttaaaatgtcgctttctctttctccgtagaaagccagaggaatttgtgttttctccagagagggtgggacagaggagagaatggtggggcaggagggagagttagtgattttggaggaggctagagggtgcagggccagttagaaaacctcagctgggggtgtggaaaggacttctaaaaacttctgaggggccccctccccctcccccgctccctctccccacggtctccctctctttccacggtctccctctcatgcggagccgaagctggactgtactgctgccatctcggctcactgcaacctccctgcctgattctcctgcctcagcctgccgagtgcctgcgattgcaggcacgcgtcgccacgcctgactggttttggtggagacggggtttcgctgtgttggccgggccggtctccagcccctaaccgcgagtgatccgccagcctcggcctcccgaggtgccgggattgcagacggagtctcgttcactcagtgctcaatggtgcccaggctggagtgcagtggcgtgatctcggctcactacaacctacacctcccagccgcctgccttggcctcccaaagtgccgagattgcagcctctgcctggccgccaccccgtatgggaagtgaggagtgtctctgcctggccgcccatcgtctgggatgtgaggagcccctctgcctggctgcccagtctggaaagtgaggagcgtctccgcccggccgccatcccatctaggaagtgaggagcgcctcttcccggccgccatcacatctaggaagtgaggagcgtctctgcccggccgcccatcgtctgagatgtggggagcgcctctgccccgccgccccatctgggatatgaggagcgcctctgcccggcagcgaccccgtctgggaggtgaagagcgtctctgcccggccgccccgtctgagaagtgaggagaccctctgcctggcaaccaccccgtctgagaagtgaggagcccctccgcccggcagctgccccgtctgagaagtgaggagcctctccgcccggcagccaccccatctgggaagtgaggagcgtctccgcccggcagccaccccgtccgggagggaggtggggggtcagccccccgcccggccagccgccccgtccgggagggaggtaggggggtcagccccccacccggccagccgccccgtctgggaggtgaggggcgcctctgcccggccgcccctactgggaagtgaggagcccctctgcccggccaccaccccgtctgggaggtgtgcccaacagctcattgagaacgggccaggatgacaatggcgactttgtggaatagaaaggcgggaaaggtggggaaaagattgagaaatcggatggttgccgtgtctgtgtagaaagaagtagacatgggagacttctcattttgttctgcactaagaaaaattcttctgccttgggaaaaaaaaaaaaaaaaaacttctgaggggtgagtttaaactgtttgccatgtatcatatgacctcccccagggcccagagtaccctaatgtctttgtactcgtcaatgttttgtgtgggaagggtgcgggcagtccttagggagagctgagtttcctctccagacttctgaactgtggtacgcaacagcctggcaaaagcagaaacccagaggcagagatatttaggagaatataaatccccagatatttgcaaatatgttaagggagggactctgactttcaccgtccatttttacctcaatctcaaagggcaaggaggttgacatctaagttacaaatataatgcacaagcatttcaaaaagtaggggaaaaaaaagaaaaagaaaaagagaagcagaaagaagggggaaaaaatcactcatccctgccaggcacggtggctcacgcctgtaattccagcactttgggaggctaaggtgggaggataacttgagtccaggagttcaagaccagcctgggcaacatggcaaaaccctgtctctactaaaattacaataattagctgggcgtgtggcgcatgcctgtaatcccagctacttgggaggttgaggcaggataatcgcttgaacccgggaggcggaggttgcagcgggctgagattgcgcaactgcactccagcaggggcgacagagtgaaactgtgtctcaaaaaaaaaaaaaaaaaaaaaaatcactcatccagatagctaggtgtggcctaaggagcttgcggcctacggaaggtgtggccgaaggagaggggaggggtcatctttaatgatgatggaggggaggcattggtcatatacctgagagtcaagctttgttcatcgtcagatgaaagccaacttcttccaccagattgcctcccagctgctaggtagtttcctgtggtacatcttaagcggtaggttgggataataggtcccttccaggtcttaaagatgtggattaataagaacagaattttctacaacaataaggaggatgtcccctattttaggtgaataagcgtattgcataagcacatgggaagaaaggttaagaactctaagaccgtaaatttccagttgtagaagcctcttgaaggcggaaagcccttttttgaaaattataggcgatatgatctcctccagtggacctagcactgggttaagagtctctccagacttgtcactgcaagtcacgtaccttttctaggactaagtttcttcactggaagatgaggaggttgcactagatgacctagaaattcccttccagctttaaattccctcttgtgtcacttgctggacttgttctactggacctggcgctcccctgctcctcccttagctgctacgtccgcatcccgcaccagagggcgccacaggctggcccggggcagcgtgcggtgggcggagaggcagaattaggggagtctccaggaggcgtggtgattggccgccgccgggcggaagggggcgtggggagggaaaggccgagcagcgcggtgacgtctcgctggcgggggcggggccgggccgcggagcgtgtgacgctgcggccgccgcggacctggggattaatgggaaaagttttggcaggagcgggagaattctgcggagcctgcgggacggcggcggtggcgccgtaggcagccgggacaggtcagtccgagacgagagaagcggtcaggcaagtggcggagggaagcgccgggcctgggccgaggcggccagcgggactggggcgcaaggcccggcggcggggaacggggtgcggggagctgccggggtccgcggacagcgtcacggcggcttcctgatgctccggcccgctccggtcagccgtcgtgcgttgccatgtaggcgccccgctgaccctgcgcccccccgcccttggacccccatagctgcttgagtgagtccgaaatacgggcctccttccaccctactctttgccccctcttgggcctggtggcttcgtcttctcccacttgtgagaaccccgtctcaggcccgggggcctctcccattcccctcccctgcctctgacctcttccttcacccgtttctggtgttcctgaatccactgccctatctagcgagagtcttctctgggatcttttcctctgtccccctcgttatccttgtctcctgccttcatcctcccatccttgctctctcaggctttactctctctccccatccctgtccccttcttatctgtggtctgatccctcctagtattatgggtccccatcctcttccccagggtgttcctaggctttttccaactccgtgcctgcagtccctgtctccctaagactctcaccttggttccctgagaggccctgtttttgctcctttttccgatttccttcgtatcaattctgtcccctacattcctgtcgcccacctccttttctctccctgttcctttcccctgcttcagggagaagccttagctccacactctactctactttcacttgacctgcagttgacataaccatggggtgggggtggaggtgttcagaccttgatcgaattaagaggctgattgactaaaggaaataacagattgtgtgggagaatgtacgtgggtgttgc

SEQ ID NO: 1214 - DNA, 6000 bp, Homo sapiens
taaattgcatttacctatttaccagaaaattggagcaatttttttttcttttactttttttgagacagagtctcactctgtcacccaggctggagtgcagtggcgtgatctcagctcactgcaacctctgcctcccgggttcaagtgattctcctgcctcagcctcctaagtagttgggattacaggcacatgccaccacacctggttaatttttgtatttttagtacagacggggtttcaccatgttggtcaggctggtctcaaactcccgacctcgtgatcctcctgcctcagcctcccaaactgctgggattacaggcgtgagcccccactcccggactctctctctttctttctttctttctttctttctttctttctttctttctttctttctttccttctttctttctttcttcctttctttctttctctctctctttcttccttccttccttccctccctccctccttccttccttcctctttctttctttcctcccttcctttcctttctttcctcccttcctttcctttctttcctcccttcctttcctttctttcctttttttgagacagggtctcattctgtcgcccaagtaacgtgatctcacctcactgcaacctccacctcccaggttcaagtgattctcctaccttagcctcctaagtagctgggattacaggcatgtgccaccacacctggctaatttttgtacttttagtagaggtggggtttcactacgtagggcagacttggagcaatttttcatatgaatatatgctatttctattctctcttttgtaaattgcctattcttctttttggccatttttttctatcgagttatgtgtctctttctcattgatttctaacagtttttacatattctggatactgaacctttgttggctatgtgtgttgcccatactttctcctggtctatggtttaactttttaccttttagggtgtgttttagctttcttttatacttcgtgcttttatatctcattaagaaacttctttctttctttctttctttttttttggagatggagtcttgctctgtcacccaggctggagtgcagtggcacgatctcggctcactgcaacccctgcctcccaggttcaaacaattctcctgcctcagcctcccgagtagctgggactacaagcacacgccaccacgcctggctaattttttgaattttagcagagacgaggtttcactgtgttgcccaggctggtctcaaactcctgaactcaggcaatccacctgtctcagccttccaaagtgctagtgagccaccgcgcccagccttcattaagaaatttctaccatgaattcacaaaggcattttctaatattttattcttcaaggttttaagttttgccttttcacatttatgtctataatcctcttggacttacgttttcctttatggtatgaaatagagatctttttttatcacatacataatcaattgtccttaccccattcattgaaaaaataatcttttccccactagcagtaagataacacataccaaatttatatatatatacacacacacagagacacaaacatggtatgtgtgtatattggttgcctattaatgcacaacaacttattccaaaacttagcagctgaaaacaataaacatttattatctcacagtttctgtggtttaagaatctgggaatggtccagctaggtagttctggatcagggtctctcacaagacagtgactaagaggttggccaaagcagcagtcattttgaagctctactgaaaaaggacccacttgcaattttactgtgtagctgatggcaggtgtctggccttcactggctgttgaccagagacattggttccttgccacatgcatctctccttagagttgctcacaacgtgacaacttgcttaccctccaagtgagagatcaaagaaagtgacagagctcccaagataagaatcacaacatttcattctctaatctcagaaatgacatgaagtgacactttatcatgtctatcatgctctttgtatcagaagtgagccaccaaatccagcccatactcaaggttagggaagcagacaagactgtgaagacccggaggtggggatcattggggttatcttagagtggtctactacagtttccatttgttgatctatgccagcctccctaccatactgtcttttttttttttttcatcctgtcttaattactgtagcttgtacaaagtcttgttatccggtagagaatgttcccctacttaattattattcagtatatctttcctatttggggccctaaaaatagaatgtagaatctgcttgttcattttaattgaaaacccctgggccaggcacagtggttcatacctgtaatcacactttggggaggccaaagtgcgaggatcacttgagctcaggagttcaagaccagcctgggcaacatagtgagatgctgtctctacaaaaactaaaataaaataaattatctggttttggtggtgcatgcctatagtcttagctatttgtgaggctgaggtgggtgggtgggtggattgctggagcctgagaggttgaggctgcagtgagctgagacagcaccactgcactccacactgggcaacagagtgagaccctatcttgaaagaaagaaagaagaaagaaaagaaagaaagaagaaagaaagaaagaaataaagaaagaaacaaataaagaaagaagaaagaaagaaagaaagaaagaaagaaagaaagaaagaaagaaagaaagaaagaaagaaaggactctgttgggatttttattggaatttcattacatgaacagattaattagtaaatgaattgatattttatgatattgagtcttcctattcatttacatgctttatatctcacatagtctgagaagctcaccagaaagattagtgcaaaagggctgggaacagtggctcatgcctgtaatcccagcactttgggaggccgaggtgggcggatcacctgaggtcaggagtttgagaccagcctggccaacatggtgaaaccgtgtctctactaaaaatacaaaaattagccagcatggtggcaggtgcctgtaatcccagctacttgggaggctcaggcaggagaatcgcttgaacccaggaggtggaggttgcagtgagccaagatcacaccactgcattccagcctgggcgacagaggaagactccatctaaaaaagaaaattaatgcaaaagaagacaatttgggggtcttttcaataattcagtggtaacacacagtatatggagagtttgtgtattgctccaattcccgagtttaaaaggtttaaggtctagttccatatagaagtcctgcagttctaatagactgtgttttgatgaaatatcctcagtaagttagtatgaggtatgcacaacatttctgctgaaatccttatcctgcctatcattttgcagtggacatccatggttcagtttgcctggcaatcctcccttctcataagaacatcatcgctcttcttttagggaactaacagatcctccccaaactccaatcaggtggtcctaatccaggttgccaatcgcagtgcttcaatcacaggagtaagcacaggtcctaggccaggccaatcacagctccttcttggattttccaatttgataaaatccaggctggctggataaaatccagagggagagtttactcccactcctagtgagagaacagctgccaaatttctagtcttatggagctggtgtctgacaaactgaagctgcgatgcagaaaaaagctgagatgagagacggggacatcttggtggtggccaggtggctagtgccatatacatccctgcccaacctcattttggttaggtgagcaccagtcattcccatttattcttttaacaacaggaagtatttaatgagcatctactattatgagccaatcattgaagacacagtgatgactaagccttccagtgaacacaaaatatatattaatgtaaaaagtactgcaagttatggacatttggaacctaagtaggcaaaccatgacttaaatctcatttaggctgggcacagtggctacacctgtaatcccagcactttgggaggctgaggcgggagggtcacttcagcccaggagttgagaccagcctgggcaacatggtgaaacccccatctcaaaaaaatacaaaaattaactggtcttggttttgcagcctgtagtctcagctaatcgggaggctgaggccagaggacagctagagccccggaagtcgaggcagcagtgactgcagtaagctgagagcacaccactgcactccagcctgggcgacagagcgagacactgttaaaaaaattaaaaaaaaaaaaaaaagaaagaaagaaagaaaagaaaaaagaaaaaggaaaagaaaacttatttaattctcaacaaatcctgttaggaagctcagagagggtcagtaattattgcaagtttctagcgctaatatatagcggaaccaagacttgaacataggttttcgactcaacaattgttttaattactctgcgctgcgtaaactgagaaacctctgaatccttacaattttaaaagaacaacttacagttttcagtttccatcagattccaattttctaccaaattgcagccctgaggtatgaatggttaccaaactttagttaaacaaacaaaattagctcattaagtaacagagaaaccactctgcccagcctgcatttttttttttttttttgtatgagtttgcctcctttatgcgcaaggctccttgggagttgtagtctgaggcatagtcctgtgggtggaggcgctgactcactgggacccaatcagcagagagtcaacttgctctccgcgcagcgattggctggaagtcagcggtctcccgcccgcggcgccatcgcgccattcctagttaaggcggcacagggccgaggcgtagtgtgggtgactcctccgttccttgggtcccgtcgtctgtgatactgcagcgcagccatggcagaaccgcagcccccgtccggcggcctcacggacgaggccgccctcagttgctgctccgacgcggaccccagtaccaaggtgggcacaggaccgaagggaacggctcccccagctccgctgggccgggaccgggccgcattctatccaaccccatcccgccgccgctgcaggtccgccggcctcgggcggacgggagtgtgatgggaagagggataatggtgtttgatggggcgatcgtggggcccgcgaagtgtggaggggatctgttgcctcagctagtttcaaagactgcgaccctgttttgaattggcttgtttatgttgcgacggtggctggaagccaggccaacccagggtcagctttcccaaatcagtcgccaaggcccacgagaacagtagtttcagaactcccagaaataggttcaaagatgcctgtcctgtaccagtcctgcccagcctcgtttttccttaccaccctgactgcagtcttaactcctgcaaactaatttgatcgctctaagtttaaccgcgcccagaatttcacttttgcttgcttggcctttgctgtgggtcacaacagcccttcttgccttcctcatcttcgtggggcccaggagagattacagaatcatagagtttggatctgaaaggaatcttagaaattccttctcttaccctctcgttttacagtaatgacccagtaagagaaatgacctgttgcatacaaaggctttcacttaccgaacatgtctttactgggtaagaatcagtgtaactcactcaggtgtggtgtttcggttgccttgttaagatcagacacagttggcgggcgcggtggctcacgcctgtaatcccagcactttgggaggccaaggcgggcggatcacgaggtcaagaggtagagaccatcctaacacggtgaaaccccgtctctactaaaaatac

SEQ ID NO: 1215 - DNA, 6000 bp, Homo sapiens
gtaaagaggatgtgttaaaggcaagccccatctactcaggcgataaaggcactacacgttgtttggaagtcaccagacacagaatgcctttctatcaaacacttcacatgaataatggctgttcaatgttcttttgaccatacagattgggtttgtttttcacagatgtccaaacagttttgtgatctggttccatcagatgaaaacagcctggtgtgcactaggtggaggaaacatcaaaaaccaatagtaaaaaaagaaaattagtcactcaaaggagctgcacagatggtcttcatccgggcaaaatgcctaccaagagttagaatgaccaatggtgaggaaacaggacccaaatgttgaaaaaggattctgcctgccatctctcagcactcaccattaacaatgactctataaaaacatcctcattgttaatcatgcctttaattcatcatgtcatataaaaagagaattttctccagcagggattccagcacaggatgaagcctgtactcacccccaaagtgttctcatccatcagctcactgttcaggacggccctcaggagcacagccatgcggatacaaacaagcattatgctggagaggaacaatgatgctatcaggttggtaccaagactgatacttcctatttaagaaatcatgttaattatataggtattaagttctggtttttgcaagacaacatcggtaacctcagagatgaacttctagtatgtaatagtattgatatcttcaaattcagggtagatgatctagagcttgataaactgggtctaaatctgagtctcaattaaatcctgattttatcaactccccaaggccttccagatggctctctattgcaaatcttctcctctctaaacatcacgtcttccttttaaatgtctgtttgacattgctccttgtgtgctggcccatttgcaaagtatcagcccctacatttaaaatccaagagaattctctccaacgactcatttattctctctatattaagtgaagatcaagagagtagtcttgcctggtgatgtgcacagcattaatcaaaatggctccaatctttttgaacagccaccatcttttattaactttaagcagaaacaatggcatgatgcctcctcctatactgagacctttgttacttttataaaatggctatagaatataaatttaaaatatattaatctctcaatggtaaccttactacctaagcaaaaattaaaatttatttattttatcttttagcaagccttaattttccaccacactgagacaaaagactcaaaaatactctctccaggacacaaaaggaaaaatttttctttccatcccttacattattctctattgcaagtagaaagaaatactgtttaatggcctaataatttcaaggagccttgaaaatcatttctctaaatcaagaagggcagaaacattttaccactatcatcccttcaaatgcatgtttgtctcctggaaatctttccctgtctccagttgcatacttgcccccacccattgaagctctgaactcacaacatgcagttccccattgcttatggtgatctgtttcaagccctcagagaagcaagattgataaacctggaagacaatcactaacaaaataatcatccctaatttactactcccatttgttctttactatattcatctccagaaaatcatagatgatcaaaagattacctggtgcaaaactcattttataagacaggaaactaagcctcaaagaggtgaggtacccaagggcatgggtagttagtggcagattcacagtgaaaacaaaggtgtcctctcattcagtgttctaggcactctaatgcccagtccagcatgcactccacctcaacggtctcggattgaaacctgagtcagctggctctgcagacaaatgcagaggaagagccctgcccactgtgaacacactcttacacttccagctgctcctccaggagccacaggcttccagctcaagcaaacgtctgggaaatcagccatactcaaggctgcacacacccagctccaaccaccatgtcaaaatgatccttttaacacttctgtgaaaacccattttgtttccccattttattttaaagcatttcaaagcatagcacacaggctgaattacataggcacaggaggcaagactagggaaaacagctagagtcagcttctccccctgcaacttcaatcaaaatagttcacagtaagcacattctcccctccttcttccttgccagaaagcaacaacaaggaatcctccactccagggtgatcctgaataggctatagcctcatcacactaagttcaaaaggatcagaatgcagagccaaggcactagacaactcagtagggttattgagatgcaggtaggttctaagaagaatatagaaaattctgaacttctcaaataacattactcatactgtcaattaatcaaaatgttgaacagctattacttactagacactatgctaagtgctacaaagaccaataagactacttgtcttcaggtagcttgtagtctagcaagaaatgagctacaaagaaaacaagaaagtcagtatgtaaatgaatggcatgcaatacactagaaatatgcatgaacagccctgtatcagagaagaacaagcaacacaaaagcagtctgtgaagacccatgttgtataaagggccacattaggcaccataggagtcacaaagttgaagaacatactagccttgaaggctgacagtaaaatctaaacatggaaataaacacatatcttacccatagcttttaaagccaaatgaaacacattacaaaatgaaagaaaagttactagagaggtaggtgtaagctacatgtgatggatggaactatttatttcaactgaggtaatcaggccagacctgtgagatacatttaaacaggattttgaaggacaagtagcattttgataacctgaggatggggaagggcatttcagaaacaataccttaacaaagggtgggtaagctttgaaagaaggcctggagaaaaatcaggaccccatcatcccaggtcctggagcatggtggggggtaaggctagaaaggaagttgtacgaactcaaatattaattcaaatgctaagaggcttacccttcattctgtatgcaagctaatggcagaagaaaaggcacaattagagccatgctttgagaatcattattgaaagcatgtcgaagatggtctgaaggaagcaattgggaaaagcaagcatagctcatccaagtgggtgagagtgtgagttagaggaagcttggaaattggtgatgtgagagatgctgcagcttctgggattgctgcctggtcgtgtgtagaggaggggcagtagggctcattctgaatcttgtcttgaaaagcacatagatagtgatgccaaaaccaggactacggaaatcacttgaagctgtatcctacctcctcctccatctgtatctgcttcacctatcaaggatatctactattgccactaaaattcaggtgcttatggcctccctcattcatcagccagggtttatctggccaggaaagagaagccccttcaggcatttgcaacagagggagtttaagtcagagaactagtcaccctggtagttgagattgccatcagcaagaagctgttaccatttgaaggctgcagggacaaagggagtgagcagtcctctgggagactgaggaaggaagctcctggcttctccccactttccactttccacttcccacttttactcatctgtcctccaattcccttttggctgagcctagctgaaacccagctgacaggggagtttgagcaagcagcctccagggtcagccctctgagttacaggtagagcaggacagggaggaatggatctcaggacaaacaggttcaggatccggcaaactaattttacactccagccattgagttggaactactggccagcctccccccgagttagcatgtagaatatgggataccagctgagtgcctgagagttatcattcacctcagtgggggtaggggcggagaagggtgacatatagccagccacatctatatccactggcccttccttgtcctagtcctctgtattcctgagaaggaactattctcaaggacctgagtccaagttcatcttacttagagtacagagaaaagaaccgctaactccttctctctttcccccatcatgtctcctctcctttctagttctcatcactctctactcccccctgccccccttttctccatctccatcacctttgtccagtctctatccccattttcaattccttcctcaaaacaccaagttgcttggtagcatgcagggttggaacatgcctttaacagaaaatctcgtgtctcttgaacctagttatttattccttgagcagagtagatattcaacaaaagaattgttaaattcaattaaataggatatatcttattattaaatatttttttcattttttgtttacttatatgatgggaacttgagtagtttccggaattgtctccacaacacctggccaaggaatctgtgaggaaaagaaagatcaaatggaaaatcaaggtacatgacaccagaagacctacatgttacttcaaactttttcttcctcatgaaccattaaaatagagcataactcttctggcagctgtacatatgttcataaatacatgatattgacccatagcatagcagctctgctcagcttctaacaagtaagaatgaaaagaggacatggtctttaggaacatgaatttctgcccttcccattttccttcagaaggagagattcttctatgacctcattgggggcggaaattttaaccaaaatggtgtcacccctgaacccactgcgacacgccacgtaagtgaccacagaaggagaaaagccctataaaaagagagacgatagcgctacattttgtccatctcatagcaggcacaaactcatccatccccagttgattggaagaaacaacgatgactcctgggaagacctcattggtggtgagtcctgcactaacgtgcgatgctcttgctgatttggaccagatagtatttctggaccgtgggcatgaaacgctgggttctgactatggagatccaggaatactgtatatgtaggataggaaatgaaagctttggtaggtatttaagtcattgtgcagcattttcaagaactgatacacagcagtttgaaagataagattaaaactgaaagatagctatattggggctaaaccacacaagaagtgtcacatgatgctgtgcagtaagaaagaaaatttattgaaagtctgtttttctgagtacaaaggatttaatataattctcccacggcatttttctttaaaatgggtcactatccttgagattttgaaagccgtagcagcaacaacctttgtttccattatctcgtaccatattctcagtacattgaaactatgtattctaactaaacataggtataactgtgttttagaataagtggggtttatattttttaaatatttaacttcaagtatcttttttgaaatctgattttattacagaatcaatacatgttaaatttagaacaactggaaaatatacctaagaaaacatgaaggagatcgagtttttagttggatgcctgccagtagcaccaacagcacttctagcatgaatattgataccacatagattttctatagctctttcttccaatgtgaatgtttgacttcacgatgagtttcacagaatatgggactgagaacaatggtgcaggaggatatttctacctagaaaatcaaggttattattccttcccagacctgacaatgatgcatgtgctgataggctaatgacatgccatgacttgacatttttattaaaattattgccaaccaatggataacatgtctttcctaagtcaaaaggagaatgttgaaactagttt

SEQ ID NO: 1216 - DNA, 6000 bp, Homo sapiens
aattttatagatgttatataatttttcctacaatacatgctttttatgtatccttaaaagatgaagactctttacacaagaatacaatatcattatcatgtctaaaaaactgaagaacaattccttaccatcaaatatcctgtgtttgaattcccaatggtctcacaaatgtgataattatttcaaagtatttagtttaaatcaggatcccaataggacccacacattgcaattggttgactttttacttaaatctctttctaatttataggtttcccttctaccccagtctttttactcctttccaattcagttgttggccaaacaatcatttgtcctggagagtttcctacagtccactcactttaccgctacatcattctgcctttggggtactatattgtagacttttcattccatagattttaaagaggggaaaactcaatgaagtgatttctagactcactggagctttcatgaactacatgaaattataagtacatgtgaatgtgtgcattttagggaaccaaagtctaaagcttttacaagattttaaaaatgatcccatgaccctcaaacaattaatggtcattagctctggtcctggcttttcattttagagatgaaaagcaggagacttggataggtaaattgtccaaactcacacaaatattcttaacaggacaggaatgtggctctcaggacctaacctgttctactttctgtttcatgctgcatatgtgaaaggggaaaaggaaagtggtttgagatgctcaatagaaggtgtcaatttccctattgtttcaaagttgccatttacctgaattaatgaattcacttcttgtccacatttggaatctaaaactctagtcaatgttactaccacaacattctcacacttctctttctccgtactattgagagctttattatgccagagatgtctcacaagcaggatgccaagatcaatgatctgtcctgagctaaatgaggactgtctttcctagatgtcagaggattgaggtggagtgtaagaaatactcaattgggaaccagtcattaattgatagttccttgatctcttttggtctggagatttctcattagtaaaatgagctaaccggactgtgtcaattacttttcaagcattttgactgtgatcatgatatactctcactatgaatgtatatgtatgtatatatcttgaaaaaactttcactgaattattcttacaaacaaaatggaatgcatctggatagtttctattctattcttttttaaaaataattctcgttgtggtcacaacctattaagttgatttgaagaactgctaaaggaaatctgcagcagtttgaaaaatactttcccacgtgaccgctgagtcattcattcattaactgtagtaggtcagtaattttccaactatttaatggacatctatgtagtgctaggcactgtgatgagagttaggaaaatggcaatgaaaaaatgaagaccatcttcttatgacgcttatatcctgtgaagtatgttccatcagctttgacaaggaaagagaattccaacggaatcagctaaagctattgaataggtttgacttaagggaggaaaaagcagcagaaatacaggtttttccaaaccccaggcaggagcccacatcaagactaaaatagtctagacccaaatgatgtaatttttgtgtcaaatgaagatctcctgtggatcctaaatctaatcactggatgtttctccttttcccatactttgcaaagatcgaagtggatgactgggccctctttttagataaaatatttcagaggccatggagtgatggaaaggaatgctagagagcactctgactgagggacaccccctggccatattcacgtgctcaccacacccccaagtacctgcaaaacctgcaggtatgtaattggttgttttcttttccagaaattttgctgtaccatttttacccagcagagggaagcagaacaccaaatcactgcagaagtaatccaggacacatgcacacacagccctttggtattttttgtcctgtgaatttaggtattatagaatgagaatgtcacagttttgaaaacaaattctgggtaaagtcagctctgggcaaaatgctgaaagaggagaggtttattttagctgactgcttatggcctgtcccatcaggattgcctggaagacattacccagcccacaaggccctctttcaggcttggctcctggcagtctgacctttcaatttttttccattccccaagttttggaacacctgctaaaatcatgcaatatttctgtggtcttctgagtcaggctttatgcaatggcctttcaatcatggcatttcctactttagctgccaggaatggtcagtttcctgccctcttttatatattccactaagtgggaaatggtgggtacaaactgaagtgcaatgcatgctaagtggtcatgtagactggagtgcagtggcatgatctctgttcactgcaacctctgcctccccggttcaagcgattctcctgcctcagcctcctgagtagctgggactacaggcatgtgccaccacgtccagctaatttttgtatttttagtagagatggggtttcgccaggctggtctcaaaatcttggcctcaagtgatttgcccaccttggcctcccaaagtgctggggttacgggcatgagccactgcacccgactgggatacaaactcttaatcacagcagaccttctgaggatccaggtacctttctgaagccctgcctttcctcccgccccacttctttacagacttgtccctgtgccttttaacactaatgcagtacgtctgacttcccctcctcagagatgatagcatttttaggaggccatagaccaacagaagttgtcttcatgcatttctggggtccgaaagtagttaaaacacaccccttagccatttaactggcgtgcttttctggaaagaaaggcatgagcagagggcactcctcaaatagaaacagatgcgataatggacaataggcttaggcatgactcagcctttccagctccacacgctccttccctacccaacccaggaatatagatccaagtgcaaccatgcacttagtcaagaagagctcttcaaagtgtgtcctaatgccatgaaatttacttttaataagagagtgggtagggagggatcatggaacttctaacagtttaaggttatcatgaagagtcagcaaaaattacagtaaccagtgattctgggtaatcagcgtcaatgaggtggagagaagtgggagaggtgccttatctttgaaaggttaaacttgccatctttttttttttttttcctttttttgagacggagttttgctcttgttgcccaggctggagtgcaatggcgcgatctcggctcactgcaacctctacctcccgggttcaagcgattctcgtgcctcagcctcccaagtagctgggattacaggcatgcgcccccatgcccagctaattttgtatttttagtagaggtggggtttcactatgttgtccaggctggtctcaaactctgacctcaggcgatccacccgcctcggcctcccaaagtgctgggattacaggcgtgagccaccgcacccagcaaacttgccatcttgacatattcctccagtgactggcatccatcctcagttggtgtctaaggtataatacaacggacaggtactttaaaagttttcagtaacttccacaatgctaaccaatgtttgaggaatatgattacatttatttttttaaaaaataagcaagttttgtaaaaagcaccaaaggcaaaaaaacttcattgaagtttttaaaaaatgtattaaactgctgcattaaggtaatgtacttacagaaaaagaaaaagaggtttaaaaaaggacaagaacaggaaacagatgtagtaaggggagaagagttagaaaggaaactctctgggcagggtatggtaagcaggcatcaataactgcctcaggtgccacttaatgcattcatgtcctgggcctcctgagcgtcacacaaattagtgaaacccaacagggggatttgctctgacaagcagcaataaaagtaaagctgctgtctgtattggcagtaaactacctgtgacactgagatatgccttctgtgtctggcttattactctatcatgttcctaaactggcttgtcacaaacgcctgttacaaaaatcagattcctggcctccatgtcagacctaatgaatccaaatctctcggcacgtgggttttgattactttttatttttaagctcctcagcaatgatggatagctttctccccccccccccaaaaaaaatgtttcaggaataggattatgtttcttttaagaaaaaataatttaagcaagttttgtaaaaagcatcaaaggctatacctatgatgctgacaatatttcacctcacttatctgcttctttcccaagacttagtctttctctttgaaggagctgtgttcctcctagtggttctgatctttttcattgcagctgcaggtacaaacgagggattgaggtgaccacccttcaacctgcagctcttcagtcaacaaaaatcaagtacctatcagagtgcaccctgccctgcagcacatattcaaggctttccctacaaaaacaaaggtgtttaaccgaagggattgatggtagaataaagagagctgggcgcggtggctcatgcctgtaatcccagcactttgggaggcgaggtgggcggatcgcttgaccccaggaattcgagaccagcttgggcaacatagtgggacactatctctacggaaggagggaagtagggaaggaaggaaggaagcaaggagggaaggagggacggagggaaggagggaaggaaggaaggaaaaagaaaagaaaggaaagaaagaaaggaaagaaagaaagagaaagattgattttaaaaaagagttaaaaggggaaaaatacaatgtggcagtgggagaattaaggatgagatgattgcattagttcattgaccatccctgagcaacagaaacacaatcatgggtaatcctcggcccctgcctacaagaagcatgggtctagtttagtagcactgccaactggaccgaccatttacacttctgtgtgaaatggggcagaggggggagaaaagagtgcctgagctcacagcgttggcggggcgcagtgaggtccgccaggactaggtggaaggagagaaggaacgtccctctctgcaactcatctaagggcctgctcggaccccggatctcacagcgagaactaccgcctcgctacacccgcctttccccgcgccacccaacagctcccacgtctcatcctccgggagcggggcggggcgaagcggaagaggaggggccgacacaaccacgcccactagccgcgctccaaggccgcggcccacttaccgcgagaacgcggagtcctgcggatggcgcacgcgcaaacctcctgtgatgcctgcgcctcctggccccgccttccgctcgtgggagttccggatgtttagcgttaccatggatcctggaggtgcccgcgaacactgcttgtcgcctgggcaaccggagaggacgaagcaggacctaggtggcggcggtggtaccggctgcaatggtgtccaatcccgtgcatggcttgccctttcttccgggcacgtcctttaaggactctacggtgagcagttatctgccagactcccacctgtccccaccttccagcagcccaggaggtttccccgctcagtgcacctccattcccctccactcaagtctgtcttctctccaaacacgtcttctgtcctgaccctgttctttattctgggccgaacttctgccgttcttccctagccatcctcatcccctctctccgatcctttgccctccgcctcatccctctctagttttttcccactccatcttggcagtgtgttggcgccttcattc

SEQ ID NO: 1217 - DNA, 6000 bp, Homo sapiens
ataggtaaattgtccaaactcacacaaatattcttaacaggacaggaatgtggctctcaggacctaacctgttctactttctgtttcatgctgcatatgtgaaaggggaaaaggaaagtggtttgagatgctcaatagaaggtgtcaatttccctattgtttcaaagttgccatttacctgaattaatgaattcacttcttgtccacatttggaatctaaaactctagtcaatgttactaccacaacattctcacacttctctttctccgtactattgagagctttattatgccagagatgtctcacaagcaggatgccaagatcaatgatctgtcctgagctaaatgaggactgtctttcctagatgtcagaggattgaggtggagtgtaagaaatactcaattgggaaccagtcattaattgatagttccttgatctcttttggtctggagatttctcattagtaaaatgagctaaccggactgtgtcaattacttttcaagcattttgactgtgatcatgatatactctcactatgaatgtatatgtatgtatatatcttgaaaaaactttcactgaattattcttacaaacaaaatggaatgcatctggatagtttctattctattcttttttaaaaataattctcgttgtggtcacaacctattaagttgatttgaagaactgctaaaggaaatctgcagcagtttgaaaaatactttcccacgtgaccgctgagtcattcattcattaactgtagtaggtcagtaattttccaactatttaatggacatctatgtagtgctaggcactgtgatgagagttaggaaaatggcaatgaaaaaatgaagaccatcttcttatgacgcttatatcctgtgaagtatgttccatcagctttgacaaggaaagagaattccaacggaatcagctaaagctattgaataggtttgacttaagggaggaaaaagcagcagaaatacaggtttttccaaaccccaggcaggagcccacatcaagactaaaatagtctagacccaaatgatgtaatttttgtgtcaaatgaagatctcctgtggatcctaaatctaatcactggatgtttctccttttcccatactttgcaaagatcgaagtggatgactgggccctctttttagataaaatatttcagaggccatggagtgatggaaaggaatgctagagagcactctgactgagggacaccccctggccatattcacgtgctcaccacacccccaagtacctgcaaaacctgcaggtatgtaattggttgttttcttttccagaaattttgctgtaccatttttacccagcagagggaagcagaacaccaaatcactgcagaagtaatccaggacacatgcacacacagccctttggtattttttgtcctgtgaatttaggtattatagaatgagaatgtcacagttttgaaaacaaattctgggtaaagtcagctctgggcaaaatgctgaaagaggagaggtttattttagctgactgcttatggcctgtcccatcaggattgcctggaagacattacccagcccacaaggccctctttcaggcttggctcctggcagtctgacctttcaatttttttccattccccaagttttggaacacctgctaaaatcatgcaatatttctgtggtcttctgagtcaggctttatgcaatggcctttcaatcatggcatttcctactttagctgccaggaatggtcagtttcctgccctcttttatatattccactaagtgggaaatggtgggtacaaactgaagtgcaatgcatgctaagtggtcatgtagactggagtgcagtggcatgatctctgttcactgcaacctctgcctccccggttcaagcgattctcctgcctcagcctcctgagtagctgggactacaggcatgtgccaccacgtccagctaatttttgtatttttagtagagatggggtttcgccaggctggtctcaaaatcttggcctcaagtgatttgcccaccttggcctcccaaagtgctggggttacgggcatgagccactgcacccgactgggatacaaactcttaatcacagcagaccttctgaggatccaggtacctttctgaagccctgcctttcctcccgccccacttctttacagacttgtccctgtgccttttaacactaatgcagtacgtctgacttcccctcctcagagatgatagcatttttaggaggccatagaccaacagaagttgtcttcatgcatttctggggtccgaaagtagttaaaacacaccccttagccatttaactggcgtgcttttctggaaagaaaggcatgagcagagggcactcctcaaatagaaacagatgcgataatggacaataggcttaggcatgactcagcctttccagctccacacgctccttccctacccaacccaggaatatagatccaagtgcaaccatgcacttagtcaagaagagctcttcaaagtgtgtcctaatgccatgaaatttacttttaataagagagtgggtagggagggatcatggaacttctaacagtttaaggttatcatgaagagtcagcaaaaattacagtaaccagtgattctgggtaatcagcgtcaatgaggtggagagaagtgggagaggtgccttatctttgaaaggttaaacttgccatctttttttttttttttcctttttttgagacggagttttgctcttgttgcccaggctggagtgcaatggcgcgatctcggctcactgcaacctctacctcccgggttcaagcgattctcgtgcctcagcctcccaagtagctgggattacaggcatgcgcccccatgcccagctaattttgtatttttagtagaggtggggtttcactatgttgtccaggctggtctcaaactctgacctcaggcgatccacccgcctcggcctcccaaagtgctgggattacaggcgtgagccaccgcacccagcaaacttgccatcttgacatattcctccagtgactggcatccatcctcagttggtgtctaaggtataatacaacggacaggtactttaaaagttttcagtaacttccacaatgctaaccaatgtttgaggaatatgattacatttatttttttaaaaaataagcaagttttgtaaaaagcaccaaaggcaaaaaaacttcattgaagtttttaaaaaatgtattaaactgctgcattaaggtaatgtacttacagaaaaagaaaaagaggtttaaaaaaggacaagaacaggaaacagatgtagtaaggggagaagagttagaaaggaaactctctgggcagggtatggtaagcaggcatcaataactgcctcaggtgccacttaatgcattcatgtcctgggcctcctgagcgtcacacaaattagtgaaacccaacagggggatttgctctgacaagcagcaataaaagtaaagctgctgtctgtattggcagtaaactacctgtgacactgagatatgccttctgtgtctggcttattactctatcatgttcctaaactggcttgtcacaaacgcctgttacaaaaatcagattcctggcctccatgtcagacctaatgaatccaaatctctcggcacgtgggttttgattactttttatttttaagctcctcagcaatgatggatagctttctccccccccccccaaaaaaaatgtttcaggaataggattatgtttcttttaagaaaaaataatttaagcaagttttgtaaaaagcatcaaaggctatacctatgatgctgacaatatttcacctcacttatctgcttctttcccaagacttagtctttctctttgaaggagctgtgttcctcctagtggttctgatctttttcattgcagctgcaggtacaaacgagggattgaggtgaccacccttcaacctgcagctcttcagtcaacaaaaatcaagtacctatcagagtgcaccctgccctgcagcacatattcaaggctttccctacaaaaacaaaggtgtttaaccgaagggattgatggtagaataaagagagctgggcgcggtggctcatgcctgtaatcccagcactttgggaggcgaggtgggcggatcgcttgaccccaggaattcgagaccagcttgggcaacatagtgggacactatctctacggaaggagggaagtagggaaggaaggaaggaagcaaggagggaaggagggacggagggaaggagggaaggaaggaaggaaaaagaaaagaaaggaaagaaagaaaggaaagaaagaaagagaaagattgattttaaaaaagagttaaaaggggaaaaatacaatgtggcagtgggagaattaaggatgagatgattgcattagttcattgaccatccctgagcaacagaaacacaatcatgggtaatcctcggcccctgcctacaagaagcatgggtctagtttagtagcactgccaactggaccgaccatttacacttctgtgtgaaatggggcagaggggggagaaaagagtgcctgagctcacagcgttggcggggcgcagtgaggtccgccaggactaggtggaaggagagaaggaacgtccctctctgcaactcatctaagggcctgctcggaccccggatctcacagcgagaactaccgcctcgctacacccgcctttccccgcgccacccaacagctcccacgtctcatcctccgggagcggggcggggcgaagcggaagaggaggggccgacacaaccacgcccactagccgcgctccaaggccgcggcccacttaccgcgagaacgcggagtcctgcggatggcgcacgcgcaaacctcctgtgatgcctgcgcctcctggccccgccttccgctcgtgggagttccggatgtttagcgttaccatggatcctggaggtgcccgcgaacactgcttgtcgcctgggcaaccggagaggacgaagcaggacctaggtggcggcggtggtaccggctgcaatggtgtccaatcccgtgcatggcttgccctttcttccgggcacgtcctttaaggactctacggtgagcagttatctgccagactcccacctgtccccaccttccagcagcccaggaggtttccccgctcagtgcacctccattcccctccactcaagtctgtcttctctccaaacacgtcttctgtcctgaccctgttctttattctgggccgaacttctgccgttcttccctagccatcctcatcccctctctccgatcctttgccctccgcctcatccctctctagttttttcccactccatcttggcagtgtgttggcgccttcattctcatcccgttagccgcgttctttcttacggccctgctcctccaagcccctgcctcttgtccctttagatcactgtttcccccaccctactcccaacctatctctgggccctctccctagctcgttctctcacatcataacctgtctccgtccatcgccgcccttaaaaccccccgccactatgcaccttcaacctcattcccacaggtccgtcattcccgccccacctcttcctcttctgaatcctgtacccggtagtatctcccactcccagctccatttcctgttttgtatgtatatcgattccgctcctcttctttccgccaggtctttttcctttcttctttatgcttgcatccaaccccattcttttttctccatcttctacattttccacaatttagtcccatcctctccccattcctttctttctccgttgcgggttttccccaaaacttgctcaccttcctcccaaagcatctttccctgctttgtaagagatattcctttccagttccctcaagaattgattagttgctgtttattcttccccggccctgttctttttattctaacgtttttgtaaaaagattcctgtttagattttgttttgctccttccccaaccttgtgtttttatttgc

SEQ ID NO: 1218 - DNA, 6000 bp, Homo sapiens
tgacctcaggtgatctgcccacctcagcctcccaaagtgctgggattacaggagtgagccaccacgcctggcctaaaacaggttcttaaaactcatagttctgtctcttattccatactcctatatcaaaagaatgctataatgatcacttttaggcaatgtaaaattctgaagtgttttcctaatcaccaaaatgttaaattacatttactgtcaagacattttggtgtaaaagaagggactagtgtttttagtgtgaagagccacttttcagtagcatgtcctcaggcaagccacttcatcctaattggacctcacttccctcatttctaggagagagagtatgtgccctccacctaactcgaagggttcttaaagtttcaaataacatatatgaagtgttcttttaaattacaggctgtcacacagtattaactatgatgccatcttgttttgtgactcctagaacactggcacaccctaacatgaaactttaagccagacgaatgatccctatcacccccaaccccatcccttcactacctgggtgcaggttaagccacagtgaaaggctgacaggaaggcagaaggagccactgtgttataagttttgggaaacatatgaaaagccaatctcccagtcctatcattttcccctctgccagtctccaaaacccatcccccaaacatcttcattaccatcttgagctttctaggagctacccaatacctaacacatagtgggtgttcaatatccactgaattaaaggccaatttagattgaatttttatctcttagaggaagctcatctattcatccatatatcatttctatattttgaaatgtgatatatttaagaaaattcaggcataaagtattagagcctggagagccagtcttcctgggttcaaatttggagtttactactctctagttgtgtgactttggacaagtcatttaagcttctaagcctcaatttccctatctgtagaatggtgataatagtaacaacgacatggggcctggcacatagtccgtgtacattaaatgaataaacattagcctgtgttttagaaaaaactctcacactgtgtttttcctctgctctcacactgtaacaacacagaaggctgtgaccaaatatgtgggggatttgcagctaagtatcccccaactcagttccaacactccctacacctggagacggtatcagatcccacaagttgaaagctcagtccccaagaccccaccctccaccgttgcaagtctaggcctccagaacttctgaccaactggcttcaaattggggttcccatgtccccctctttgggtttaacttgctgcagcagctcacaaaattcagggaaacacttacttatatttacggatttattataaagggtattacaaaggacatggataaagagatgtgtagggtgaggtacagggggaaggggcacaccaccttccaggagcctccacatgtccagctatccagaagctctccaaaccctgtcctttttgggttcttatggaggcttgcttcttttatataagcatgaatgacaaccatgtagaaaagtgattggacaaaaagagtatgccctcactctaacagactgaatggggaaacccagcaaggccagtctattcagattcttcttggcctctgggtgctaaatgccctcctccagggcatagggcaggaccctctctggaacgagagtcttttgacccacaatcagactagaggtaaggcaggtgaaagaaggtcagagagagagattctttttcctgaggcctaaagcaccccaacattataacgtaagactgtaataagggttatgggagttatgagccaggaactataacataagactgtaacaagggttatgggagttatgagccaggaaaacgttgtatatatacagagagagagaatcgtaatatcatagtattttttacaaattacaataattgttaaaaagtaacaatagtaagcaagatggtttgagccactgaagaatgcaaaactcagagtccatttagaactgatcgtcaaaacggagaaaagggaatcacctctgtagaaggaagaaatacagaagacaaaatgcagtccaaaaaaaagggctactgtattgataaattccattagagataaatggaaatcctttaacagtttgtaaaactgctgccaaacattttaaacatcatgtagatcagttcatactccaggtcataaagtatgaaatttcttccacaattgacaggatcagtgtggttagggaacattaagtgcacacttctaagtacaaactataaggttttattctacacagttacactactttattagtcaacaaaatcaaactattagagcaaaattacatatgagtttcatgttttcttttaaaaatcgatcttctacgcatgattctagtttttaatagtgttcagtgccattgcccatgtggtttcaaaaaaaactttaataggatctacattagcatttttctctatttttgcttaccttcggaaatccttccttttcagctagtattacttttttaaaaagaagaaaaaaggcctacaaaagtccagaattactaaaaaaaagtccttgaaatgaacagccacatattaatcacttttctcctcagctcaaatgttaattaagcaagttgtaatttaatcactgatgtgcaatcagaattcattttacattaatcaaacagtagaatataataatattcaaaacctgaggctttcttttaaagaggagcacttcagagtgcttttgtacctaccacatgtgaggcattaattcaagttggaggacaatgactcagcttgaaggaaggcggagtggagtaacaacctccccattcctttaggaaaacttttctttctggctaagggagaggagaatgaagtggttgagaacatgccctcaacgttctgaagacatggagagatgtgtgttacttgttatgtggctccctaaaaagaaacattaccagttagagggacttcaagtaactgaggccaccaatttctactttcgctctactttttctgggagtggaacggtcaggtttgccagtattgtgaaaatccatgaggaagcattacttctctcttccacttgcctcattctgagtggaaccccagaacctggtgtagggcttaataatccaagaaattattttgagtggagaatctctcactctctggctcttttctcccaatagtaacaataataatgcctcacttgttaagagataccgtggttattgaagtattttctcagcaaacagatacttcatgtttgggtgtattaatgtaggaagataaagacacacatgcagtgtttcctaaactttttggctcacatgcttctttgctcatgcacaacctagacaaaactatgtaaccaactcctgtgtacagtttcacggaattgcaggtgcctaacaagattttcttttaactacacctgctcacaaaatttacacagtaacttgagacaaacgttcacaggaagtagataaaacttttcaatacaccgttaaagtctttccaaaaatctattaacattaaattgtttagaaattctatacaagtctactactgtattaccaaataaattcttaagcaagaaaaggggaaaactatcttttcatgctttcaggccagtaactagcacttagtcttctatgtagggaggtgcccaataaataccgagagacgaacggaaccgctgaatcccgtccgcgaggttaggggagaaacagaagcggcaacgtctctgctgcacgaagcacccggtaacttactgcctacccctcactcctgtctaatctttgctctcaatggattgctgggttggttttgttttattcatttttgttctgaagcaaggaaacttaacttcacgtggagggccactgtaaactgctgcctcccttaaaaaatgcataacgagaagagtaagttaaaacgtttggggccacacagaaggttctagaagttctgcagacccaagctgccacagtccttaatcgcatggaatctcactgtaacttttatctcctctgatttttttccgctccctaacacctaggtaaattaatcaaagtgtggccaccgataacgccctcacaggtttagcttaaatcgaatgcgttttctctcggactaggggagataatccaagaaacaaacaaaactacaccacgtccatccacaacaaatctcaacaagcaacttcggttgccgcagcctcactgtgccccaggccccggcccgccacacgcggcctccgtccgctaaccgcccgcgaaccgcccgcgcggcgagcagaacgcccgagaccgcccgcccggagctcacctgagctccagctggtccaggctctccagcaggcggctggagcggtcagccatggaggaggagcggcagaagcgcccctcgttggctttagcgttgatcttcgcctgagccatctaagcctccgacgcggggtagccaagaggtcaccggcccctccggcggcagcgagtggagcgctccttgggctgcaggcgtcgccgtcaccacgcgggcgcccgccctccctctgacgcccgcgggggcaacccgggaggactcgccgacaccgcggctgcagcgtagccaaagaagggcaggcgcggcgcccgcggggctcggggacgccgggcctgggagggggctgcagcggctggagttagaggttcgcgagccacacgggctcgaggatgggccgacaggggctcgggcctggggagcgcaagtctctgaggcacgggaggggcggacgcagagaccgagcgcctaatgtggctagcggatcgtctgctccccggacccaggaactacccgaagcccgcgcggacccacagaccacccccagctccgccccgcgaggccccgcctcttcatgcaacctaaaagtaaccaactccccccacgcgaaggttcctatcggtcgacgggctgtgggtgtattgctcagtgacggcttcgtttagtttctcccagcacccataattcaaagcaagaacaacgacattatggggagaaaacgtccttttgtgaaacagaaggcagtaagtacagctcgtaggcagcccacactcacctgaccttcctgttaccactttatactgagatgagagtaatgaaagcccggacaacactgaagctatgaagtaaaaaagaaaaagctactccatctttccctgtctagctagatgtgggaagcaaagtgaatttacttcatttttaccattctaattttcttttgtttttgagatggggtctaactgtcgcccacgttggagtgtagtggcgcgatcacgacttactgcagcctcgacctcccgggttcaagcggtcctcccacctcagcctcccaaagtgctgggattacagatgtgaaccaccacgcctggcttaatgaaggggttttaaatttttgctattaaaattattcctgttgagcgagccgagatctcgccactgcactccagcctgggcgatagagcgagaccttgtctcaaaaaaataaataaataaataaatattctgagtgaaataattggcattaaaaagtcctcaacttttaaaaatcctgttaacaaaaaagatgcagtaggcctctaggtcaggcaccagctgtcggtaaaagacggaatagagctgaggatacaaagattagtctacttaaaaagttaggctttagtcccctctcctgatagctctatgcctctcattgcaaggatgacaatgtacagggcacagaaaatgatagataataatagtttaaagctgagccaccacctttaatcagagatcaaagccatttaaatacttgaacagagttgaagcccttaaggctggatcccaattccctctgaactcattttaaatcctaattaactcttggggtaggggattatttgaccttattaaaa

SEQ ID NO: 1219 - DNA, 6000 bp, Homo sapiens
ttcaccctcctggattttagcatcattcccaaggaggagatggaactcaactattgtgaacccaataacgtctgtcttgttcactattacattgctgttcctggtatataatgggcattcaataaatatttgtcaaatgagtttacatacatctgcatacagcatatattatatgcttctcagatgacatttatgtggctatgagtttcactaccttagatgctaggatgctttaagctaatttttccccagctttattgaggtataattaaaaattaaactaaatttttaatggcctgtgacattttgtcatttcatggagttgcctttctgtttaaagtcttatatgtatcacctcaagtcttttagcaaataagtgatacagatttttttttaaatgttgaaacaaatgattacctgtcagtgattttaaaagtttgttgactttctacattcctaagtggaattaacttgcaagttctaagttcatatataaaattcaattcaagatcatgtctagattttcatatttcaaaatactcaattttttagtagagaaactgccaagttatcctgtgtttttccattttgattttactttccttcttgaaaagaatacagtcgatgaaacttaaataaatacagcacatgttgagttttctgccctaagtgttaaaattctatgttttttaatgcagatgtggaattagaagaagctattagaagaagtcttgaggaaatgtaattaaagatattaccacacaacatcaagtggccttgaagagactgagataacgaattcttgagtttgttttctaaaggagaccagaaatccactattacaaatgtatttgaaaacatgtttttgctttcatatgttcaaaatctgatctttgttttgtatttttgtgctaatgtgcaaacatgtacagaagaaatagaatacatgttcatgcaaatataaattatgtattctaatataggtgtaacagtttcccagttaactttgaatttatatatttagatttaaaggattaaaaaaaaggaaagctcttgacagttgtttcccaaatagcattagttctttaattttatttgtactgtacaaatgatgctagtttatttttttagcagtgaaaatgaatataaaaaaggtgacataggtcaagttttccataaattctacttctcatgtggcactattatataatacctttgagatctttgtttatgtttattagaagagggtaatggaaactgatcatggaaacatttaaaattttatcagcaatgttctttgtgggtgccatgcatatgtaaattattgctttaattagagcagcacattgctaaaataaaaaatacaccttaatttttaagaaataatttaaatgaaacaatttccattccttttacctgcttagacttttatgtgacttgtatggtctcctggttaaagggaatggtgtcagaatatttgcataaaattatttttcataacagtccttttttatatattggtgtaaacataatattcttcaagaaataatgttgaaagcctactcaggaataatcttccttaactctttaaatttttatttcatgtgaagtgttttcagtttagttattcactgaattgtcagtttccttcatttggtattacatatttaattcttaaatattgaggccccattgtgagtaataaaaaatacgacataagtagaagactaagaagggcttgtcatattatctttgtgtatatgcttcatgttatttaaccagaaatgtcttatctctaaaaatttttagtagtaattatttaccaaacttaaaaacatttctataaatataaagcttttctttatatttaagacaaaatataaaggctagaatttggttccttctctgtaacactaaatattttagtgtgaaattgaatttttttattactatagtcttttcaatctataatttgtgtttttaatttcttgatatgtcacttctgttcctccctgcttgcattttttaaaaactagacattgtggcttgagaatttatcaatcatctttccgaaatgaccacattgtgcttttagtttgtatgtttaagtggtcaagcaaggctctaggaggtagtcactgagctggaccttaaacacatctgcaggagctcacaaaatgggagcaaaagaggcattccagaaagaagagtagttaagcagatgtgggggcagggcaagaggagacagcaccttgttgccagagattctacacaaaggtgtgatggacactgatgctctattaagaagcttttgtggtgtgtgtggtagagaataattaaggcttctgataagacaggaaagggatatttcatcatgactgttaagaaaaggtaactgggttgtttaatgttttaattgataattgtcactgatcgtatttctacttgttaaataattaaaaatcatcttaaaattcatactttgactttaatttagacacaaggagatgtaatcgctgtgtaacatcagagaaagctatatggattatcgtcagaagtaaatgtttctaacattgacaaagatgcttatcttttcattacatcattcactcattaattcattcaatcacaaaatattgagtacccaccatgtgccagcaactgttctaagcacttggaatataccagtaagcaaaacaaagcccttacccctctgtggagcacatattggtggagaggaggggattgtacaatgttagtaagcaaggcaataaaactgcatatctgatggtgatacgtgtaacgacggaaaataaagaagggaagggaataaatagtgcagggacagggagttggggggaggcttgctatttttaatagggttgtcagaaaagatctcactgataggtaaacttgagcaaagacctgaagaaggtgagggaatgaggatgaaaatacatatcgggaagagagttccaggtggaggaggttaaggtccagacaggagcttagtatattcaaggaaaagcaagaagactagtatggctgacaggatgagctaggagagtaataggaaatgaacttactgaggtttttctaatgacctgggcttttactttgaggtaaggagccagtgaaggtttctgagaataaatggtatgatctgccttatttaggattgctgtagttgctgcactgagataacatgtacatgagaggcaagagtagaagcagggagaccagagaggaaggtattgtagtattccaggtgcaaactcaccaggtagcttgaaccagaatggtggcggtagaattgggaagaatctggatatattctgaaggcaaaattgatggggtttactaatggtgtggatctaggataagagagaaaaagagttcaggatgattctaaagtcacttgatagactttcaaaccactcacaaaatgtgttttgttttcgtttgtgtcatgataaagttatttttaataaggtcaaataatcccctaccccaagagttaattaggatttaaaatgagttcagagggaattgggatccagccttaagggcttcaactctgttcaagtatttaaatggctttgatctctgattaaaggtggtggctcagctttaaactattattatctatcattttctgtgccctgtacattgtcatccttgcaatgagaggcatagagctatcaggagaggggactaaagcctaactttttaagtagactaatctttgtatcctcagctctattccgtcttttaccgacagctggtgcctgacctagaggcctactgcatcttttttgttaacaggatttttaaaagttgaggactttttaatgccaattatttcactcagaatatttatttatttatttatttttttgagacaaggtctcgctctatcgcccaggctggagtgcagtggcgagatctcggctcgctcaacaggaataattttaatagcaaaaatttaaaaccccttcattaagccaggcgtggtggttcacatctgtaatcccagcactttgggaggctgaggtgggaggaccgcttgaacccgggaggtcgaggctgcagtaagtcgtgatcgcgccactacactccaacgtgggcgacagttagaccccatctcaaaaacaaaagaaaattagaatggtaaaaatgaagtaaattcactttgcttcccacatctagctagacagggaaagatggagtagctttttcttttttacttcatagcttcagtgttgtccgggctttcattactctcatctcagtataaagtggtaacaggaaggtcaggtgagtgtgggctgcctacgagctgtacttactgccttctgtttcacaaaaggacgttttctccccataatgtcgttgttcttgctttgaattatgggtgctgggagaaactaaacgaagccgtcactgagcaatacacccacagcccgtcgaccgataggaaccttcgcgtggggggagttggttacttttaggttgcatgaagaggcggggcctcgcggggcggagctgggggtggtctgtgggtccgcgcgggcttcgggtagttcctgggtccggggagcagacgatccgctagccacattaggcgctcggtctctgcgtccgcccctcccgtgcctcagagacttgcgctccccaggcccgagcccctgtcggcccatcctcgagcccgtgtggctcgcgaacctctaactccagccgctgcagccccctcccaggcccggcgtccccgagccccgcgggcgccgcgcctgcccttctttggctacgctgcagccgcggtgtcggcgagtcctcccgggttgcccccgcgggcgtcagagggagggcgggcgcccgcgtggtgacggcgacgcctgcagcccaaggagcgctccactcgctgccgccggaggggccggtgacctcttggctaccccgcgtcggaggcttagatggctcaggcgaagatcaacgctaaagccaacgaggggcgcttctgccgctcctcctccatggctgaccgctccagccgcctgctggagagcctggaccagctggagctcaggtgagctccgggcgggcggtctcgggcgttctgctcgccgcgcgggcggttcgcgggcggttagcggacggaggccgcgtgtggcgggccggggcctggggcacagtgaggctgcggcaaccgaagttgcttgttgagatttgttgtggatggacgtggtgtagttttgtttgtttcttggattatctcccctagtccgagagaaaacgcattcgatttaagctaaacctgtgagggcgttatcggtggccacactttgattaatttacctaggtgttagggagcggaaaaaaatcagaggagataaaagttacagtgagattccatgcgattaaggactgtggcagcttgggtctgcagaacttctagaaccttctgtgtggccccaaacgttttaacttactcttctcgttatgcattttttaagggaggcagcagtttacagtggccctccacgtgaagttaagtttccttgcttcagaacaaaaatgaataaaacaaaaccaacccagcaatccattgagagcaaagattagacaggagtgaggggtaggcagtaagttaccgggtgcttcgtgcagcagagacgttgccgcttctgtttctcccctaacctcgcggacgggattcagcggttccgttcgtctctcggtatttattgggcacctccctacatagaagactaagtgctagttactggcctgaaagcatgaaaagatagttttccccttttcttgcttaagaatttatttggtaatacagtagtagacttgtatagaatttctaaacaatttaatgttaatagatttttggaaagactttaacggtgtattgaaaagttttatctacttcctgtgaacgtttgtctcaagttactgtgtaaattttgtgagcaggtgtagttaaaagaaaat

SEQ ID NO: 1220 - DNA, 6000 bp, Homo sapiens
ttgctctgtcacctagcctggaagtacagtggcgcaatctcagctcactgtgacctccaactcctgggttcaagcgattctcctgcttcggcctcccaagtagctgggattacaggcttctaccaccacacctggctaatttttgtatttttagtagagacagggttccaccatgttggaccaggctggtctcaaactccttgcctcaagtgatccgccagcctcagcctcccaaagtgctgggattacaggtgtgagccactgtgcctggccccagctgtcgattttttaaaatgaagatgatagaatatgttaagctgcaccatgaatttataatcagaaaaactcagactgtgaaagattctacagatcaaaaactcaggtttttcaagacataaatttaagaaaaaagtatgggaggggaaactgtgaattataagaaatggcaaaatgatttaaatgtttgtgaacctccaaaattcgtatgttgaagtcttaataccccagtgtgatggtatttggaagtgagaccttttggaggtaattagatttagatgaggttttgaggatagagtcctcataataggattattgcccttataatgggagggaaagactagagtcccttctctctctgccaagggaggatacactaagaaggtggccatctacaagccaggaagggagccctcaccagacaataaatctgctggctccttgatcttggatctcccagcctctagaactgtaagaaatttttgcttgttgattaagttaaagaggttcagaacgtgcaaccccgaaacagaccattttgacatactgattattttgaagtaaagaaaaatcagaaccagccaactcagtgaaacgtctttacctccccaattgcctaaaataaagtataaacttacccttttgcaaaggaaatttatactcacaaaggaaatttctgttagtaaagctatctgtaccaggaagagagctactccaagacaacttttttcacttaacagactgttatctgtgtcaataaatccactgagaaagtttatgttttaagcctcagcctcccgagtacctgggattacaggcatgcgtcaccacacccggcaaattttgtatttttagtagagacagagtttcaccatgttgtattttagtctccactaaaaatacaaaaattagctgggcatagtggtgcacgcctgtaatcctagctactgaagaggctgaggcataagaattgcttgaacctgggaggcagacattgcagtgagctgagatcatgcactccagcctggggacagagccagactccagctcaaaaaaaatgttagttttattcagtctatagtcgtaccgaggactatagactgaggtctacagcccaggagctgtccttcagagttctgtcagactgctgcagcacagtatttcagcccactgtttatatacctgtggtggaggttcagtatgtgcaaaatcacattaaagttttggtgcaggagtacatctagttatagatttcagaggcataatcactaaccctatcagacgttatctcatgtgtaggaaaaggcactatattcctcctttcctttctttttttttttttttttgagacggagtctcgatttgttccccaggctggagtgcagtggtgcgatctcggctcactgcaagctccccttcccgggttcacgccattctcctgcctcagcctccctagtagctgggactacaggcacccgccaccatgcccagctaattttttgtattttttagtagagacggggtttcaccgtgttagccaggatggtctcgatctcctgacctcgtgatccgccctcctcggcctcccaaagtgctgggattacaggcgtgagccactgcgcacgtccatattcctcctttaagcaatatagtgactcaggcaagagatgttgggggctgtgtgcactatcctggtttgccttcaaagcatcttttcagagagctgcacttcctcacagagtgaggggctttgtgaaattagatggcaagcagaaatgagcaaaatggcttcttaccctttttactttgtctcacaataattagagcactatgtttaaatgtcacttcaaggaattattttctctatggttacatttctctctttttacagtttaactttttcaaataattttccattttaggatttttttctttctgatttaactcagtctttgaatatgtgaaacagttacatggttcaaaagtgaaaggttataaaaatacaaactcaaaaagtaattaattaatttagtttttatttttctcaccctgtcttatggtgctgaaaactcaacagtttaattggggccaggcacagtggctcacatctgtaattccagtaccttgggaggcccaggcatgaggatttcttgagcccaggggttcaaggttacagtgaactacgattgtgctactgcactccagcctgggtgacagaggcagactgtgtatctaacaccctcccacacccaacttatttgggtgaattatatagtatgtaaattatatcccagtaaagctcttattaaaaaaattaaagccggccagacacagtggctcacgcctgtaatcccagcactttgggaggccgaggcgggcggaatacctgaggtcaggagtttgagaccagcctggccaacacggtgaaaccccatctctactaaaaatacaaaaaacatagccaggcctggtggcaggtgcctgtaatcccagctacttgggaggctgaggcaggagaatcacttgaacctgggaggtggaggttgcagtgagccgagaccgccccattgcactccagcctgggcaacaagaacaaaactccaactcaaaaaaaaaaaaaagttaattaattaattaattaaaaaaaagccatgcatatgtgcaaataaaaatacataacttaggtggagtggctcatacctgtaataccagcactttggaaggcagaggtcggaggattgcttgaggtcaagagttggagacgagcctgggcaacaacatggcgagaccctgtctatattaaaaaaaaaaaaaaaaaatgaaagaaagaaaggcgagtgtggtgttgtgtgcctgtggtcccagctacctgggaggctgaggtaggagcattgcttgagcctaggagtttgaggatgcagtaagctatgatcacaccattgcactccagctaggacaacagactgagaccttgtctctaaaaaaataataaaaataaagccaggcgcggtggctcacgcctgtaatcccagcactttggaaagccgaggcgggcagatcacctgaggtcaggagtttgagaccagcctgcccgacatggcgaaaccccatctctactaaaaatgcaaaaaactagccaggcaggcccctgtaatcccagctatttgggaggctgaggcaggaaaatcgcatgaaccccggaggcggaggttgcagtgagctgagatcacaccactgcactccagcctgggtgacaagagtgaaactccgtctcaaaaaaaaaaaaaaaagaataaaaataaaaataaattggttgatatggcagttaagactaaatggggtcaggtgcagtgactcacacctgtaatcccagcactttgggagactgaggtgggaggattgtttgagcccagaagttcgtgaccagcctgggcaacatagcaagaccccatctctacaaaaattttaaaaaattagccaggggtggccgggcgtgggtggctcacgcctttaatcccagcactttgggaggccaagctgggcagatcacctgaggacaggagttcaagaccagcctggtcaacatggcgaaaccctgtctctactaaaaatacaaaaattaggttggcgtggtaacacatgcctgcaatcccagctactcgggagactgaggcaggagaatcacttgaaccccggaggcggaggttgtagtgggtcgagatcgcgccattgcactccagcctgggcaacaagagtgaaactccatctcagaaacaaaacgaaacaaaacagccaggggtggtggtcgctcgcgtctatggtcccagctactctggaggcagaggtgggaggatctctcgagccttggaggtggaggttgcagggagccgaaatcgctccactgcgctccagcctgagcgacaaagcgataccctgtctgaaagcaaaaagaaaaaaaaaagctaagtggacaaacgaggaaatgggtagggatgaatataggcagactataagtagccgaggaaggtggccttattttcgcacctatcaatgctcaggctgagctcctgaggctagacctaccggcaccccccattcctacaggttctataaggcaagtcaggtattccaccctgtaaaaagctcttctctctcctgccccgctagactagtatcccctccttaaggctcccaacatccgaagctaagttgtttgtctgcctatcatccaggaacgcgtctgagggcagggaacaaatttattcatcgtaatcgagcccagcactttgtctcgcacgcagctgacagcagaattttaagataaagtattaaataaatgacagacctctcaaggcttcctgtctttcactaaaaagcttctctcaggccacgcccctacctccactcaggtcagccccttcctattgaagccccgccccatcgccttccccgccaccttacaccccgcccctctctcttaaagccctaggaagattactggagtttggcgccaaccgtgtttttttttttcccttccaaaggcgggaactagttgtgggcgctgcgacgtgctttgcgtctgatatgattggccgtaggcactcagtcccgcctccataccctgatagcgctctggtattggtggagatgccagggagacctcggtgggcagaaaggaaccgggttgtcttgggccgggcagggcgggtaagttgtcgtaggggcccggtccgtgagggactgctaaggaagaggctgcatggcgcggtagtcccccgagtggaggtcggctgcccctgggaaaccagagagtcggagggagtccatctggagcggccaagtaggtcggggaagggccgcgcctgacgtctggccgcaggtagccacgttccctccgcccccggtgcagcttcagggcttgcaccctgcgtccctctgtggtccttcgagagggtctgggcggggactatgggtgggcgcgcccaggaattgtcccttcggcctctcgtcctgcccctcccccccaccatccagtctctccttggaatatactcttaaaatctttcggatggagttctttggagaaatgggtttcctggagtgtcaggtgatcattgatgttgattgtttctgaaatgtttatttaggcatcaaaccaacatgcctaaataagtttttcatttctacagcgcctagattcattcctagcacatagtaggccctaactcagatgtgaatgtaggattcgtaggagctgagcatttgtgcttcaggcatcaagttgtctttgactcttcgactcttccttggtctttttccattctccacacctccagcagcaaacctttcgcctctcctcaaggcctttcccccccatctccctcagcgcctctttgactggagggggacagaggctttcatggcagggattctcccatctcccttcctatccccgctatgccctccaattatcttttcctggcgttccgttttacaagagatggccttctttccaaaaacatttatattgtattgaatattcttgattttggccatcttgctttacagacagacctggggtctaatttcagctctgccacttaccaggtggttgccttgtgcaaatttcttgatcgtctgtgttttcctcatctgtaaaatggggaaaagaataatatggacctcatagaactctggggaggatttaaactaagtgaataatgt

SEQ ID NO: 1221 - DNA, 6000 bp, Homo sapiens
gcgatgtggatcaagatggtgatactaggcgtccttgtgatatgtgctcctgaagtgtggtctttttaatgtgttgctgcctgaccatcatggaagcctagaattctcagtttgtgtgagtagaatcgaagcttatgtactactaccacattcataatattacattttgtatgctgaagtaggttaatgtatgttacagcaatcatacaggttctccagttccagcaggtggaactccagtttgtagcctttttgtataggaattcatgccagctttgtaggagtctccattctagcaggggagaggtatcatttgagtaaggataaacggatagaggaacagaagtgtggttgtgttctgggaatgcactgcagagtgtgcagccaaatggaagaagtgatgcctttccccgtacagatcctaaaactgacactgagacaggatacggtgatggcggaaaactttaactgctagtgactgctggagacccactctgctaatggcagtgcatctcaattactttcaacgtgacttgctgattttctccctcagacatcgatgaagtaacaaagaaaacgaccactttctacctaaactctaagctatatggaacaatttagattatgaggtgaaactgatgggaatcctagaagagagcgcatgttcagcttaggttactttgacaaacatttaataaatgccaggcattatgctgggcattggtgatcaaaaaattaccgaggaaagtatgaggaccaacaaatccaaattgggtgggtcaggaaatactttccaaaacatgaattgagtcttaaaaatgagtgatgtgtgccaagtgaagaagaaagaatgtggtgatggtgctggtgggggtagtgttccgggcagcagggacaacagcaacaaagtcatagaagcatggcatagccttagggctcagaagtcttacaaaatattggatactgttggattttttgaagcgcaaggcagggagagcaggggaaggaagctagaaggaaagaagaaattagccataaaagaccttgtttaccatgctaagaaatttggaatttgcctagaaggaatcaataaaaggtgttaaacagaagagtgacattgttagaatgcattttagataacatacactggttggatgctgggacaggtagagcaggactggaggcagggagatggggggaagctatcctaatagttcagaagtgatgaaggttaaaggaagcattttaataggatgggagaacatttgagcatatgtataggatgaaggaagaaactagtagtaagggaaatctgggagatgggataattagttggagcagtcagaagtgttagagctgaagtattaatagaagaattaaattaggcttaaatcattcctctgaaaccaacaggacagagataaaagagagcagaatgggaccttgggtcaggaagtaatagcatgataacaagtgatggttagggttcatggaggcagtcaagataacttacattttaggaaagtagatttaaataagtttagaataaagttacgatcccacagttttgagtcttgcactttgtgaggtgtgcaaaaataaaagccagactttacaactacaaactattatagtgaaaagaaaagagagcaatttattaacaaagacttctttggagtctctccttagaaaccagaatttgggaggagttgtgtacttgacttttgttgaaaagaggactttataaacaagttcgcacgagtcaaaggctgcctgagagtgccgagaccagctcggtcgggcagaccctaacccagcggcgctagaggaattaaagacacacacacagaaatgagctgagagccccgaacagagatttacccacgtatttattaacagcaagccagtcattagcattgtttctatagctattaaattaactaaaagtatcccttacgggaaatgaagggatgggccgaattaaaggaataggttgggctagttaactgcatcaggagcatgtccttaaggcacaaatctctcatgctattgtttgtggcttaagaatgcctttaagcagttttccgccctgggcgggccaggtgttccttgccctcattccggtaagcccacaaccttccagcgtgggctttatggccatcgtgaacacgtcacagtgctgcagagatttagttgatggccagttttggggccagtttatggccagattttgggggtcttgttcccaacagagagtcacccccaataagctaaaacttggaggaaatggtaaggccaacaaaaagagctctttaaaagttatcttcatagaaaaaaaattaaaaatttgcagtgccactgatttggagaaaaggcataatgttcacaaatggaaatgacagagacgaaacatacaattccctttatttccaaatttttgctcaaggagcatgatcatcatatagaaacaagtgtaacaactatttaataggaatgctgataactggaccatatccagaggagagatatggcatgtgaagaatggctgaaagaaatgacaatgtttatccctgagtgcattacggggcacaagagctaccttttcatattgaaatgctgtcttttagaagaagagttagttatttctgttgtatgttgtagatgggtgaggaagagagaaggacaaggggagaaagaaagaaaatggtcaatttataaaaattacaggaagttgaattttaagtcaaatcaagtaatcacctttcacctattgggtttcttcatacatagtttcccccaaaacaatttttttttttttttgagacagggtctctctctgttacctagactgcagtgatacaatcatagctcactgcaaccttgacctcctgggctcatgtaatcctccttcctcaaccactggagtagctgggactgtaggcgcatgccaccatgccctcctaatttttgtgttttttgtagagatgtggtcttgccatgttgtgcaggctggtcttgaactcctgggctcaagctatcctcttacctgggcctcccaaagtgctgggattacaggcatgagccactgtgcctggtcccaacattttgttaggaaataattttgaacacacagcaaagctgaacaaattttacagtgaatacccatttacaatgaacctagattctaccatctagattctaccattatattttaccattatattctaccattatattttactatatttggttaatcacatatttatccatctatgcgcccctaaatccatcttattttttagatacattttaaaggaaattttatatacttttgtctgacactgggaaggcaatgcaccttaatcccacaagctttcttacagaggctaatagctgtttactggggacactgtagtgaggatttctgcattgagtaggtgaagaggaccataactgtggctttcaaacttttctgactgctacccttactaagaaatgtatttcacattcctatccagtgtacaccacatacatactgaagtaaaaattttgggacacaatatttaccctttacatgtgtgaagcatgctgatattttctattttatttcatttaaaaagatgctgggcatgcttccctaacttgatttagatacccactaatgtactgtaatttaccatttgaaaatcattgtacttagtccaactccaagaagatttttctttttaaaagaatcctgtggctactactagaattttccttatgttcccaattatcaagaacctgttttgagtctcagcacagtacttacttaacatgcatggcgttaaggcacgtgtaattaagagaaaaaccttaaatgcctgctaagacttctggatagagccaattcaaagattctttattagtaagtttaccaattattactattttttttttgagacggagtctcgctctttcgcccaggcgggactgcggtggccctatcttggctcactgcaagctccacctcccgggttcacgccattctcctgcctcagactctccagtagctgggactacagaagcccgccaccgcgcccggctaattttttttgtatttttagtagagacggggtttcaccgtgttagccatgatggtctcgatctcctgacctcgtgatccgcccgcctcggcctcccaaggtgctgggattacaggcgtgagccaccgcgcccggccccaattatttttacaaagagtaagataaagatatgtactcttggatgggtgggagggttcagtgctcatatagtcttctgttaaattaggttattaatgcctgcggtggttccaacaaagtagagaagaagatcaaataagaaaatggatgggaaagtactttgaaaactaatgttttattaatactgttgtgtgatgccaggaagaaagggatgttgcgatcaagctctagggaggcagtgtttcagtattttaaaaactgtttttgtggaactgttaagttaacctccccaagccccaataactacgctttgacgcaagattctcagaagagggtagaagctatgaacttggagaggtttggtcgcgagttcaagcgtactgccccgttggcgcatgctcaagagcgactcgggcctccttgctgggttaggcagaacacggagggcggagttcggaccacgtggggtctcgtgacgtcatctccgggcgccgagggtgactggacttgtggtgcgctgccagggctccgcagcgttgccggttgtattcgctggataccagagggcggaagtgcagcagggttcagctccgacctccgcgccggtgctttttgcggctgcgcgggcttcctggagtcctgctaccgcgtccccgcaggacagtgtgtcaggcgggcagcttgccccgccgccccaccggagcgcggaatctgggcgtccccaccagtgcggggagccggaaggaggagccatagcttggagtagggtacgtgtgtgtgtccaccttgtgtgaggaaattcctagaggaggagggctggggaggggccaggtaggtgtggtaggaaggaggggtgagtagttgcctggaggagcgcccgcccggccgcgatggcgggtgaaggtggttcctccgggcaaggtggagttggcgagacgccggcccggagccctggggccggttggcgggtgtggcctgcggggtccctcttggggtacatgtctgttgcttactaaggtaggaaagcgagagtctagtcgcaggctctagagttcagttcaggacctgaattgtttgtggaacacagttatttaaacctttattgcacagtgcagtgtgagtctgtccaaactcggtgggtatgtcctccaagcaatttatctatttacgatattccctgtctcaataacaatatttagtgctaccaaagacattttctgttggcaagacacttttacatacttcatttgtactttggattattttaaaattatcctgaacttgaggaacctaggaaactattggttctagatttttctgaggggtgaggaggtacagcctgtcttgagcaatcagaacccggagacttaccagacagtagctgaacttccaaagccttccagaattggcttgttaaatttctgagaccttgaaactggatacttggctctgaactgaactatttgtgatttccatagagggagtttctggttgaattttgaatttgaaaataacgatgttgtgctcagggtagtaattgagaggtattttacaccagatttaagcctgtgcttttatcttcaaagatatgctacttaaaattgggggaaagtgtacagaatggaactgtatggatatggatttttagaatagtgcacacacctcaagtgtgtatttatttcattaatttcccccaaactgagtacctcctatgtgttaggcactggacaaaacagtaaacaaaatagtaaacaaaagaataaaaatccctgccatc

SEQ ID NO: 1222 - DNA, 6000 bp, Homo sapiens
aagcaccccctagtgctctaatactaagtgctttagattcataatttcaattatcccaatccttccaacaatcttagaaggtattctcattttaaagataaagacatgaggcttcatgattaagtaatatcccaaggtcgcatggctggtaaatgaggaatcagacttaactcagagcctgaattctcaaccccctgccacttagcactattgtatgtacctcacatggtctttgtgaggtctaagcattccaataaagtgcttaattcaggacctgcaacttactgacaaatcaaggttgggtaatgacaaatatcattatctcctattaccaaaacagagaattcttcccaatttctcttctatccaattccatttcaggtaaatgttcactcttttttggaaccccggcttttttttaccctgcaagcatacatacttgccctccaaatgcatcatcgtaacaacctaggggacgctttgccagggtttgtcatgccaagggaagaaagggaaagagagaggacaggagctgcagatacttgtggagagcgtggtgatgaaacctgtctggaatgatgccccaaagggcgagccacagctcatagctgtttggtacacggtgttcaataaagacacactgcatgagagtaatttgctgaggagagggtaagcagagaaagggtctaatgagggtgtcagacatagactggggagcagctatatcagatgggtcacatactcgttaggaacctcatcctactggtttcctgtcttcattgagatggacacagaagccaacccaagaggaaaatgtgcacttgctgaagggcagtaggctcagttcctagaatgtgggctctggggtcagagggaggctccagctggcctaggtacaaggagaactgggctagcacacaagtgctgagtgagtggtgtttcctcagagggagagccctggtctctaccacgaatcccctcacaactaggtgtttgaaatggtgatttttacccagcttacttaggtaaacatcttaaattttgtccctccagtgactggatttgcaaaatagagtgaacaatcaccaccttaaattattaatagaaataaataggatataaaattgttcaataagaggtgggaaaagttttgaccaaaaattctgccttgaagggaatgctggcatttcctctcaattaacaaccataacttctggtaggaagaaatggagaaggaacaaggaggcctacaagaggaaggcaaaggtcgaggcaatttgtggctaaaagagaacagtctctgagattcaacctcttagttctcaaaggtttgcccatatgcacaaattacaagggtaaggtgcacatttacaaagctgcaagtttatagtcacttccaagtgaagctttttgatcttcaattcacttgaaacttacccaacactctatgtatgacctcttgtatttgtcttctactgttttttttttttttcctttgtggtgagggagggaggacagggcctcactctgtcacccacgctgcagtgcagtggtacaatcatggctcattgcagcctggacctcctgggaccaagcgatccgtccttacacctcggcctcccatagctgggacttcttgtatttttgtagacacctgggtttcgtcatgttgtctaggctggtcttgaactcctgggctcaaggcatcctcctgccttgggctcccaaagtgctgggattacaggtgtgagctactgcacccggccttctactatttttaaacttgcaatatttctttttaacatgttttatacccccaagtaacatgtcttataccctcaagtaagctctttgagggaaatggctttatcatgtgcctgccccccattcctcactgtgaagtgaagctcacaaggctctgttaatccactgaatctttgactcctccactcttttggaatgcccctgggatatgtgttctgtaaatggacactcaacatgtttatagtgaaaatctaatggccgagagcccagccactgtaaacacattctttctacttttgcaggtctgcactctaatgacaaaagattgcttagatttagagaagaaaacgcgtggatttcttctacagtgttacaagtatttaaagccagcaacgaaaattcttggaattttatgctgcatcacgatgcgcggccctgggtgatctagccttccagttcttcgtgcaaagctgaataccagcttttaaccaccaccatacccaacccgcaccccaagcactggcacttgaagccgagttgtggtcatacatcaccatccacactcccaggctgtaaacccaatgcaaacctggggcttctcagtgggacaggcctacaaggagaggagaggtgcctcgtgaggaggagccaccgcagtaagcagtcagagcccccttccccagactcccccttccaagggcaacccgaaatagcagaaacgcttttatatgtgggcagagccgcatgcccacgagacaggcacatgtggactgcgggcattcggtacaaggaagcgaggacacagagtacgtagggtgctgagggtccacctcgcagccaaagtatgtgtgccagtgagtgtgtgcagcttgtgagatctgctctagaaaccgtggccgcggactggcgcggcctcctgggcgaagcacaaacaggaggctttgttccctgaatgtgagaatgagggagccgagctgggcgcaaagacggcggcgttccgcggcgggaaaccgtcgtctccgccgcggctcgggcagcgcgcgaaactctcaatcaggttccccggcccgggccgccggctatgccagcggcgcgcagtggggacagcctagctgtctcgcgagcagcgcccggagaggccgcgccgcgggccccgccgcgtccctccgccagcgcgggcggccccacgcgcccgccactcggcagcgcagccagcgccacattccatttaaaaataacacccacgtgcgctggtaaacaagcgcgcgcggctaccagggccgcgcgccccggcccagtgtgtgtggcgcgcgcccgccctcctcccgcacgtgtcggccggcgccattcagtccccgccccctcggcgggtcgcgccccgcccccgagcccccagccccgccgctccgggccctagcgccccctaccccgccaggcgcgcccagtcgagtgcgctgcaactttcctcccccgacgcctcctcttcgctggcagacccaccgccccaagtcggctgccttcctcccgtccgctgtcctctcgcgtccccccttgaaccctcccaccgccagcgcgcgaaggattggtttctagtgcgccctctccctttttccctctcctctctctccttccttagaattttactcgattgtttattatttgctggggggcgggggcgggggggcggagaggggcgtctggggcctggagactggtggccgcggccagtcagcgcgcggcgtgccttgacgagtaagcggcgcagcgaatggcgacgcggcggagagctccggggtcacgcgcgtgtggatacgatgacatcatctgtttgtacgcgtcgaactagcttggtgcaggggcggggccgcgcgtcacttgagtgacgggcgctgcgcaaagcccggagcccggaggcggctgggcgggctggctcttgcgtacgctgggctggacctttttgtgtatggggtcgttgaggagcccgcttctacactctgagctatctccggtgacttacaaggattttttaaaaaatatatttatgaactagtgtgtagacttttggtgtgcatgtcgcgtgtggtgcattcgtagagtacaaataaacgatttggggcacggatcgtagaataaggacttgtgcagatgtttttcgtttaacctaaaggatacgtctttttttaaaagtcaaaaatgcccacgtagcggttttgtcgtcatttacaaattagattaaaattatttccccttctcagttgttcggaatctgctcttgaatgtaggacgggggtaaatttgcatttcttccggagttagttacacctctcccccgtttgccatgaaacccatgaaaagtgaaacacgactgtggtccaccgtccgaggtgagagactcagtgcaaaccttttggtgcctgatcgaatctgtgagcatcagcttatcgaagttgtgcaggcaccaacatcttcgccgttcagtatttccacaccgcgataaccctgcccatcttgcggccagcatcttatctcgggtgttacctggtgtcgcgttctaacagggaaccggacaccggggctggcccagagcccggcgggcggacgcgcaggccagggaccccctggtaccaggcgccctgcccggagtcagggaggccacgccgctgcgctccttggagcgtcgggggctgtgcgctcctgccgctcccccttctccctcctctccccacttcttcctcctctcctcccttctccccccttctccctcctctcccgggccagcgccgcgctttgttgtcgttgagactctcgggagggaggaggagcccagcggggacagcagcgggagcccgccgagtcccggcccacggcgcgcgcccggacacccacgcccgcagccccgcggagccgggccgcgcaggcgcgcgcgagctcacacacgcgcactcacacacgcacgcccgccgcgcgcccggcccgccgcccagcccgccgcccagccctccccctgggcggggacccgcccgccgtcagcctaggttgaggcgccctgcgtgtgtctataactttgtgctgctgccgcggccgccctgctcgtggaagggaggaggaggaatgtggaaggtggcggcgcgcgagctgacaggcggttcctcgggcgggctgcggcgacggcccgagcgcttctccttcgccgaggttgcgcgccccctcctcgccgtgccccgggcccgcgcgggatcgtgcgtcgtcccgccgcgtccctgaagggaaggaagcgaggtaggcgccggagccgtgcagcgggcggccgccttcccggtgactccggatctgcttccgagctgggccgggcgcttccctttcccctccctgagccgcggtgtgcgcgccccccttctcgcccgctagtgtttttaaaggactcgggaagggggaaactgtcaagatggcagcagcgggagcaaggaggtgatgaacgtgctggtccgggttttctagcagcccgggagacttggcgcttcccgacctgttggaagatttatgttccgactcgctccctcccccggatcccgactgggaagggggcggaggggacgacgtccgcgagaatgcaaaccacacaaaaccccgaagtggccgtccccgccgggctcgaacctctgcgaacacccgctgggctgctgctcccccttctttctgtctttcctttattttttggaagtgacaagggcccatctgcgcccagacccccgttcgccctctggcccgcgggcgaagaggggagagggagctgcccgcgcagtccccgggctcgggccattcgaccgggtggggggtgacggggggtcgcggaggcggccaggctaggaaaggggagaagagccgaagacagcacagacttgagcggcggcgccgcgggaggcactagagcgggcccgagcgaaacataaacaaacgcacgcacacccgagctcgggctctgaccgcggctcggctgcgccagctccggccgctgcccgctttaaaggcgcggccgcccctcccccgggcgcccctcccccttctccccgccccgccgcctagcccgggagggacctgcggctgggcggcggggggagggggctgccccgcgcgaggccgtcgattcgctcgcggctccatcgcggcctggccggggggcggtgtctgctgcgccaggttcgctggccgcacgtcttcaggtcctcctgttcctgg

SEQ ID NO: 1223 - DNA, 6000 bp, Homo sapiens
ggaagaaatggagaaggaacaaggaggcctacaagaggaaggcaaaggtcgaggcaatttgtggctaaaagagaacagtctctgagattcaacctcttagttctcaaaggtttgcccatatgcacaaattacaagggtaaggtgcacatttacaaagctgcaagtttatagtcacttccaagtgaagctttttgatcttcaattcacttgaaacttacccaacactctatgtatgacctcttgtatttgtcttctactgttttttttttttttcctttgtggtgagggagggaggacagggcctcactctgtcacccacgctgcagtgcagtggtacaatcatggctcattgcagcctggacctcctgggaccaagcgatccgtccttacacctcggcctcccatagctgggacttcttgtatttttgtagacacctgggtttcgtcatgttgtctaggctggtcttgaactcctgggctcaaggcatcctcctgccttgggctcccaaagtgctgggattacaggtgtgagctactgcacccggccttctactatttttaaacttgcaatatttctttttaacatgttttatacccccaagtaacatgtcttataccctcaagtaagctctttgagggaaatggctttatcatgtgcctgccccccattcctcactgtgaagtgaagctcacaaggctctgttaatccactgaatctttgactcctccactcttttggaatgcccctgggatatgtgttctgtaaatggacactcaacatgtttatagtgaaaatctaatggccgagagcccagccactgtaaacacattctttctacttttgcaggtctgcactctaatgacaaaagattgcttagatttagagaagaaaacgcgtggatttcttctacagtgttacaagtatttaaagccagcaacgaaaattcttggaattttatgctgcatcacgatgcgcggccctgggtgatctagccttccagttcttcgtgcaaagctgaataccagcttttaaccaccaccatacccaacccgcaccccaagcactggcacttgaagccgagttgtggtcatacatcaccatccacactcccaggctgtaaacccaatgcaaacctggggcttctcagtgggacaggcctacaaggagaggagaggtgcctcgtgaggaggagccaccgcagtaagcagtcagagcccccttccccagactcccccttccaagggcaacccgaaatagcagaaacgcttttatatgtgggcagagccgcatgcccacgagacaggcacatgtggactgcgggcattcggtacaaggaagcgaggacacagagtacgtagggtgctgagggtccacctcgcagccaaagtatgtgtgccagtgagtgtgtgcagcttgtgagatctgctctagaaaccgtggccgcggactggcgcggcctcctgggcgaagcacaaacaggaggctttgttccctgaatgtgagaatgagggagccgagctgggcgcaaagacggcggcgttccgcggcgggaaaccgtcgtctccgccgcggctcgggcagcgcgcgaaactctcaatcaggttccccggcccgggccgccggctatgccagcggcgcgcagtggggacagcctagctgtctcgcgagcagcgcccggagaggccgcgccgcgggccccgccgcgtccctccgccagcgcgggcggccccacgcgcccgccactcggcagcgcagccagcgccacattccatttaaaaataacacccacgtgcgctggtaaacaagcgcgcgcggctaccagggccgcgcgccccggcccagtgtgtgtggcgcgcgcccgccctcctcccgcacgtgtcggccggcgccattcagtccccgccccctcggcgggtcgcgccccgcccccgagcccccagccccgccgctccgggccctagcgccccctaccccgccaggcgcgcccagtcgagtgcgctgcaactttcctcccccgacgcctcctcttcgctggcagacccaccgccccaagtcggctgccttcctcccgtccgctgtcctctcgcgtccccccttgaaccctcccaccgccagcgcgcgaaggattggtttctagtgcgccctctccctttttccctctcctctctctccttccttagaattttactcgattgtttattatttgctggggggcgggggcgggggggcggagaggggcgtctggggcctggagactggtggccgcggccagtcagcgcgcggcgtgccttgacgagtaagcggcgcagcgaatggcgacgcggcggagagctccggggtcacgcgcgtgtggatacgatgacatcatctgtttgtacgcgtcgaactagcttggtgcaggggcggggccgcgcgtcacttgagtgacgggcgctgcgcaaagcccggagcccggaggcggctgggcgggctggctcttgcgtacgctgggctggacctttttgtgtatggggtcgttgaggagcccgcttctacactctgagctatctccggtgacttacaaggattttttaaaaaatatatttatgaactagtgtgtagacttttggtgtgcatgtcgcgtgtggtgcattcgtagagtacaaataaacgatttggggcacggatcgtagaataaggacttgtgcagatgtttttcgtttaacctaaaggatacgtctttttttaaaagtcaaaaatgcccacgtagcggttttgtcgtcatttacaaattagattaaaattatttccccttctcagttgttcggaatctgctcttgaatgtaggacgggggtaaatttgcatttcttccggagttagttacacctctcccccgtttgccatgaaacccatgaaaagtgaaacacgactgtggtccaccgtccgaggtgagagactcagtgcaaaccttttggtgcctgatcgaatctgtgagcatcagcttatcgaagttgtgcaggcaccaacatcttcgccgttcagtatttccacaccgcgataaccctgcccatcttgcggccagcatcttatctcgggtgttacctggtgtcgcgttctaacagggaaccggacaccggggctggcccagagcccggcgggcggacgcgcaggccagggaccccctggtaccaggcgccctgcccggagtcagggaggccacgccgctgcgctccttggagcgtcgggggctgtgcgctcctgccgctcccccttctccctcctctccccacttcttcctcctctcctcccttctccccccttctccctcctctcccgggccagcgccgcgctttgttgtcgttgagactctcgggagggaggaggagcccagcggggacagcagcgggagcccgccgagtcccggcccacggcgcgcgcccggacacccacgcccgcagccccgcggagccgggccgcgcaggcgcgcgcgagctcacacacgcgcactcacacacgcacgcccgccgcgcgcccggcccgccgcccagcccgccgcccagccctccccctgggcggggacccgcccgccgtcagcctaggttgaggcgccctgcgtgtgtctataactttgtgctgctgccgcggccgccctgctcgtggaagggaggaggaggaatgtggaaggtggcggcgcgcgagctgacaggcggttcctcgggcgggctgcggcgacggcccgagcgcttctccttcgccgaggttgcgcgccccctcctcgccgtgccccgggcccgcgcgggatcgtgcgtcgtcccgccgcgtccctgaagggaaggaagcgaggtaggcgccggagccgtgcagcgggcggccgccttcccggtgactccggatctgcttccgagctgggccgggcgcttccctttcccctccctgagccgcggtgtgcgcgccccccttctcgcccgctagtgtttttaaaggactcgggaagggggaaactgtcaagatggcagcagcgggagcaaggaggtgatgaacgtgctggtccgggttttctagcagcccgggagacttggcgcttcccgacctgttggaagatttatgttccgactcgctccctcccccggatcccgactgggaagggggcggaggggacgacgtccgcgagaatgcaaaccacacaaaaccccgaagtggccgtccccgccgggctcgaacctctgcgaacacccgctgggctgctgctcccccttctttctgtctttcctttattttttggaagtgacaagggcccatctgcgcccagacccccgttcgccctctggcccgcgggcgaagaggggagagggagctgcccgcgcagtccccgggctcgggccattcgaccgggtggggggtgacggggggtcgcggaggcggccaggctaggaaaggggagaagagccgaagacagcacagacttgagcggcggcgccgcgggaggcactagagcgggcccgagcgaaacataaacaaacgcacgcacacccgagctcgggctctgaccgcggctcggctgcgccagctccggccgctgcccgctttaaaggcgcggccgcccctcccccgggcgcccctcccccttctccccgccccgccgcctagcccgggagggacctgcggctgggcggcggggggagggggctgccccgcgcgaggccgtcgattcgctcgcggctccatcgcggcctggccggggggcggtgtctgctgcgccaggttcgctggccgcacgtcttcaggtcctcctgttcctgggaggcgggcgcggcaggactgggaggtggcggcagcgggcgaggactcgccgaggacggggctccggcccgggataaccaactctccttctctcttctttggtgcttccccaggcggcggcggcggcgcccgggagccggagccttcgcggcgtccacgtccctcccccgctgcaccccgccccggcgcgagaggagagcgcgagagccccagccgcgggcgggcgggcggcgaagatggcagaggcaccggcttccccggccccgctctctccgctcgaagtggagctggacccggagttcgagccccagagccgtccgcgatcctgtacgtggcccctgcaaaggccggagctccaagcgagccctgccaagccctcgggggagacggccgccgactccatgatccccgaggaggaggacgatgaagacgacgaggacggcgggggacgggccggctcggccatggcgatcggcggcggcggcgggagcggcacgctgggctccgggctgctccttgaggactcggcccgggtgctggcacccggagggcaagaccccgggtctgggccagccaccgcggcgggcgggctgagcgggggtacacaggcgctgctgcagcctcagcaaccgctgccaccgccgcagccgggggcggctgggggctccgggcagccgaggaaatgttcgtcgcggcggaacgcctggggaaacctgtcctacgcggacctgatcacccgcgccatcgagagctccccggacaaacggctcactctgtcccagatctacgagtggatggtgcgttgcgtgccctacttcaaggataagggcgacagcaacagctctgccggctggaaggtgcgtacccaccccgggctggcagcaggacccgccgggcctcctgcgcagcgcgagacgcgtctcggattcgtcggagtgcgcttgcgggctccagggcaaggggttggcagggggagcctccgctgcgaggctttgggggttatctttgatccccggagtcggggcacctggggacggtctcggaggggtgaatgaggctccccagaagcttggggcatggccaggtgaggagagggggcaggggacgccggcgagggaagggcgaacggacaggagtacatttgctggattctccggacagcaccgaggaggtaggtccgcagccaactttggagtagagtttaccgtagtgggggtct

SEQ ID NO: 1224 - DNA, 6000 bp, Homo sapiens
ttttataaatgctaacccaaactttttcctttcctagctgaaaaatgtgtctccactccttccaatctttccagggtgtgggcctgtgcgtagctgtgtgactgtgcccacacactggcatatatttcagagctaccaaaaagaaatcagttgctcttgaaataacaagacaaaaaggaacggtttttctgagccataacatctgaagagctagaagcagttgtgtttgtatgtgtgacgctaaagccagtaaatttcatgtgaaggaagggattgtaaactaagaacagaaaagcagttttcctggatttcagatgtcaaactctcaagctgtttaactcacccactcagcacctccacatccatccctgtaatgtgcttgcattgtcagtgatttgtttctgcaggttttgatgccagaagacaaataataaaatagtaggcatatgtaaccttaaagcagttttctaccagagtttttgattgaggttaaacagaagtatcctgatcacgtcgtcagttggcaggcaaaaggcatcatattttaagattcacatagttttagagcaagctcatcttttctggctcaataataaactaattacatgttttaaatagtatagagctgagtccctgtttcagattaagcctcataatagcaagggccaggcactagcagacatttgcttgatgtttctggcttgaggatccgtaacgtggtgccagctgttttagggcctgaataggcctgccagggacagccaggtgatattggcttgacgtagtcacaggctaattctcccagaacacagaagcctccagacgtgccaccaaggaaagcctggatatgtagaagttcagtttatggctatagtaatatttgggcattccccaaaatagtgatcccagttcaggttaggacatgatagtagtgtccctttgaggtctgtctgagaaaaggtgtcatttctaaaaaattagtgttagcagatgggcagatgtggctccaacaaggcttgcttcatggcttatcatttttccacattttccatccctttcataagcctagggaccacatgctgaacatttaattgaatcacacagattttgtagtctttaaagcttcttattccttggtcacttgttagtggtgcctccctccttggtcagtttggtgacttcagaaggaaatacacagtgcagtggtgagagcttcacttttgaagttagcctcaggcttgatttctagcaccaccacccactagacaaattgcttaacctttctgcacctcagtttcctcctgacaggcttgtttagaaaataaaatgagatcaaatttgtcaagcacagagcattggccctggtaggcaccacatacatgaatttccttcagattgtaggtgaagtagacttgatttgggatttctcttgttacctaggtgcttgtgtagaggagactttagaaccagaatgtgttatttgtggttttgagtgtgcctgggactctgagccaactgaattaccaagtaatgggggccccatggcatcccatgacaggtggagagccggctcttcaccctggatggacctgaaatgcctgctaaggccttgctccaccgagtagcacacaccctatcagtttgcccttctttccatctcttattctagagaccttaaagcctacttgttggtatatattttcaggtttttggaaattgggctgtttaattgaagttaataccagtgatgagacttttcaacctgagaacaacctagatgctacttcacattttgcagtggaagcttacttccatcttcactcatgtaggacattctttggtctcaatgttttatcacatctcatgttaaagtataattcaggtctattttgtggctcctgcccccttcccattaattcaatggttaaacagatacaattttttgaccccctactatgtaccaggccctctgccgggtgctaaagctatagtaaaacatggtatctggtttaaagagccagactgcaccctgcattttatctttgctattagtgtgctaatccagacattggtactaatgttctctttctgggtggtgggttacacctcaaggccaggtggtgtgagtctgtctctgctctgttgacacttaggagctgattggattcaggtgtggcactgtgcctctttggtcctcagggtctgcgactgtgaagttggggctgcctgtttcatagaaagagggtttcctggccctctccatgttccccagctattgctatttttactgagcttcctgccctggttgcttgtcatatgtcatgaaagtgatgctaaattcttggatgtgctcctgagttctggatgcatgtttcctatgcccttttattcgatttccacacacagtaagttttcaaactggaaaaaggtgcagccttattttgtttaagctaagtgaatattaataataaaactatttctgttccacttcatggcttttataacttcatgcctgttaactctttgaggcaaccattttgtgtggctaatttgagcatggtcttaaaagagaatttcagtagcatgtgtttgctgagcaccttgtgggaaggggaaacagattcaataacatcacaggagaagcttggagaaagacaacaggggcatccaaatgctgcagctttaacctactttctgggactgtcatctcgctgactgcacgcctttagatgcttcttcctcagtctatggggagagggacctggggctagaaataggagagtttgtggggaggggcaggatgctgcagggagtgggtgtgggcagaggttgcaagactgccagggttctctgtgtgccggaagtgcaggtttggctgtgaggaatggaatgttctctcttgccctccaagagcacaaacagctgtggaagagcttgaaaagaagattactaaaagaaaaaataataataattaatatgaaaataaaatccaccctagaaaacccaacagaaccgtgtgtggagtatagtggtagtcatctttttcatgctatttaagagaactttcttcctatctaggatttctttttcagttgagggcaggataaattgtgtacccagccctttctccccttgggaaagcctcatatgtctcattttgtttggatagaaaattgattcattattctgatgaccagatgatgattttattctttttatgagggaccagaacctgtcgcttgcttgctgcttgaaaacttaaatgttagtttccaaaggccatctctgtgggtagagggttatcgtcagcagtttaacgggaaatcttgtttctaactggaaatttaattattcagccaagttcccaacaatgtttactttagagcatcgtctttttttttttttttaagtcccttaatggtttaaacttttaagctttaggcaagagtagagtggagctagatttacatatcaggttgtttgtgcaatcttttacatgaaagtttatgttttcttctcaatctgaaaattggttttggccattatagctggtattatatatgacgtaataactctctctgatctcagatacatttttatgctgtcatactttctgcacctgcttttgaacaacatcttagtcccaaagtagataaaatctagcagaagggagtaggcagctaaaaactagattctagcaatatctaaggaaattacaaggatcagttagtgttccattccttccttctttggctatatcaattcctagttttgtgaaagtccacatgccttctttctgtccatgcctgtgcatgctgggtggagaagcatcacagagcagaatgaggtgactgtccccaaggcagggtaaggtcaaggatctttcccctcacctcatgattttcaaaagaaaagcagatctggacctcagttacctaaaataaaataaaattaccctagctcttattctgcacataaaatcacagctttaatctctcatcccagttctcacctttatcttctcaatgatggaaacttggacttaaaggaagttactgtgctatgttaccagatctaaggagactgggaatcattagattggaatcagatcctcagtcaatggaaatataaggaggaaagaccattggttcttggccctaattgcacattagaataatctggggagctgtaaaaatgtacctatatccaggccttaccccatctattgaatcaaaacctctgagactgggatgtgagtgtttaaagtctccccaggtgattctaataggcggggtgaagaactactactgaagggaaattgagggcctcttccagagaattgcctttgaaagatcctgtcattatacaccgaaggcgcccacccgggcctgctcctgaagctagctgtttgcagtgctctcctgtggcacgcagacctctgggtctccctgtgaattggggttccattgggctgttcaaaaaacctttgtcatctgtggttcagcagacgcgtatgttagaattcaggcatttggcaacctcattctgaattgtcagtacccacaagtcaagcagtgagacccacttgaaatgctggtcctgtacacaaagtgggtgagcactgtattgaaagacagtcctttccagtgctttcccctgaaattccttgtaaggaccaggagacgcctgcagtcggcctggtgggaagtagtgggcctggctttggagttaaccataactcattttgctgctccagacagtcctcctcccaccccaccccaccccacctcaaaaaaaaaaagagagaggagggggttgtctttaaagaaaaaaaaaaagcaggggcttttaagagttaaattacacaactcgctttttatttttaaagtgagcagatttcttgttgtcgttgctgagaaagataaattgataccacatgttgcttccagacaaaaacctctctgtgttccaggggaagcacatgcagctggtgtctgggtgagtggacagtctccacaaggtaaacatggtttggaagggctgaagcggacgtagggtacaaaatttaagaaattaccagttacttctgactggcacggcacctctgaaatacttttttaaagtttgaaatcctttcctggaaggggccgccctggaaccttttggcttaaagtatatgatgctcggaaaacagtaagttaacatttatgatgtcactgcttccgtgtgggatctaacagttgttgggagctgcttttgtacttggcacttcactgagtagtttgcatgcagagctttatttaatcttcccaaagagccaagagatagtcaaagaatgtttttatcctgcctgtgggaattatcccctttgtaaattattggtggaatacttttcatttcaggaagcttctctctcacacctaatctgatctgtttggggtccatgtgtcttcacaaccagttagcatgtatgtagagatcatggatactttagtattagcaataattgtatcttgcaatagaaaacggtcttcattataacaagaaaaataattgccagattctgctaggtgcagtcatctttatgctgatttattcaaggtggaccaaacaaaggaatctctaggcagcaggactgtgaaatgtgaattccatcatgctgcctccttcacacacctattgcacctgcctcctggaagggttatgccactgattgccagttctgtaactgattaactacacctaacgggtttctgccccagtgcagggcttccttcagtgtaaattgttttgtaaaagagaagatggacataaaaatgaaataaagagtattcttaccactgcactctctttagacacattgtgatagaggtgttttaagggttctttaaacctttcggcccacgttggggacaagctggtacatttgtccctgaagctgaagttttttcctagagatctttctttcttgtaatttcatcaaaatcttgatttctaagt

SEQ ID NO: 1225 - DNA, 6000 bp, Homo sapiens
agaaggaatgggtgtagaatattatcacctctgtcttggaaaaaatataaaccctgcgataaatgaaataattagttttgtgggttttaataacttttaacactatgattagagatagtgttctcttagttatctactgtatcacatctttttgcatgtcaaatttgacaattatgaatatggaaggtaataattactatacaacctgtgtctataaatagacatttaaataaccaccattgccagtgacttgtctataatagctataatgaataaactcatttgtcatcatcattttctgtaaaaaaaaaaaaaaaaaaagacatgcctttgctgacaaccttcaacaaaaactgatccattcagtttctctctagagtaataattatgttttctataattataataattatgttttctggtatttctatgagcttttttgagggtgttccagggaaaggtttctgtgagcatcaaacaatgaatcaaaaagtatgggaacttaaactcttcataggattgttctaaaattgatggtactttgaacaatatgaaacaattatattgccttgttatcaatggaagataacatacccggggaatcatgacaattacagctgatacatttaagaagtgtcttaagagtgaatatggttaagtccttataaaaaatatttttcaaaatattttctctaatatgttgagaaatatcaataatttataagccttttaaaattaaatggaaaaagtcatatctttgtgaagctctcaggttttagcatttatagtccatcagactatagagtgacaaataaagaaataaaaaaataaaatagaagagtgaaaaaattttttctgaagcattaaaatgcacatgcactgggaaacgtttagtttcagtgcaaacttttcatcctggtcagtcattcctacttgagggttttgactgcagttttcccagcaccgagacataaatgtgagacaattcgcttggaggagtggggaggtaattagcctatctcctatcaagccgtctatattttctatgactgcacaaggtgttgtagagaaattccctggaccaatagaacctcaggagacaagtgggggaagccgcgtatacgcgtatatggagcaagttctcccagagaactcgatcgccctctaggttgcatttacaaacagttcgggaggctactcggaccacttcgccaccagggagtatgaggaaaggggccggattcctcccagtaggaggactatctggaccaaagaaagaggctggcgacaggaaggaagaacagatcaagagtttgaatagcagctacagggcaacctaatgcctgtgcagtgttaacaggcgcgcgtcacacacagctcccccgtctccccctcccctcaagcacccctccgccgtgtgtcaccttcctgttcggaagtcttagtaggttgctgggacagaacagggggcgcctgctccacccatcacgtatccggttggaagaaaagccagtctcaacaacttgattctctcggttaaatgataagtttagccgaccatccgtctccaagtgctgaacattagggtaggggaggaaggagcacatcagacgttccctttcttttccaaccacaaatcatacggttgcatctattctctattccgcgtagaaccctccgacctgaatgccacgttcctcccggaatgcatgccacagagcctctgagaaaataaatcctgtgcatgtgttttgaattttttccggactgatttgtgaggataatcagttaagttacatttcttgtgtgcgtgctgggggtgtaataaagctaggacactgatgactgtaattttctgagtgatgtcgcaatggggagaataaatggcccagtgttgaactttgcagcttgctcccttcctgtacttaaattgccttgatataaagtggggttcataacagaacagggatagccgtctctggctcgtgctctcatgtcatctcagagttccagcttatcagaggcatgtagcagggaggcttattccagccataactgggctctacctccagcctccagaagtaatccccaacctgcatatccttgggcaacccgaagaatgaaagaagaagctataaaaccccctttgaaaggttcgtacttaccgtactatattttgcagatgcctcaaaggatttggggttacttggcatggggaaggcacataaggtggggtgtaggagagggtctctggttgtaggtttcttaatttaatgtttgaaaacaaacatgcaaaagtctgtgtgcaggttgatgtttctgggcagcctgagcaaaatttgctctctcaagagggaaaggaaccaggtgggagcagagctaggctgggctaggctagttgaatggtgggacatgacatacgggtggcactggcaataacaaagtcacattctatgaagattccctgcaagaggaagcagacatgggccagttactgtgatttgaaattgcctaaacattgctttaggttggcatgtcaatttcaggtactagtgttttttttgtttttgtttttgttttgtttttgtttgtttgtttgttttgagacggagtctcgctctgttgccaggctggagtgcagtggcgtgatctcggctcactgcaacctccgcctcccgggttcaagcgattctcctgcctcagcctcccgagtaactgggactacaggcgcacgccaccacgcctggctaatttttctattttcagtagagacggggtttcaccatgttagccaggatggtctcgatctcttgacctcgtgatccgcccgccttggcctcccaaagtgctgggattacaggcgtgagccactgcgcccggccccagtaaatgctttttataagtgtgggcactgagcaaactttcccagccagactccaggagagagaatgtgtttcccttctctcggtttggggctgttgcaacaaagcaaaccaaggagttgagactagagctcactttagggcaagtgggggtggttttgcctgcaaaacaaacccctgcccaagaccaaggaaaaggcgtttcacatgctattcctggtttgacagctggtatttcgggactgtgccagatccagtaggcaactttaaaatggcagagcctttggtagcaagaggtcatggcagggcagccaccgcagacagcaacagcgagcgccaggtacctggccctgcgaatagtggtaacttgtaactgcccgctccgggcccagtcgccgtgctcgcggcttcccggccagcactggctcacgtccccgcgccggcggtcaggctgcggctcccagacatcccccagccgcggggttactggaaggcaccggcatcgctgttctgcagagcccgggccgccgcctcgagcttccctctcttccctgccttctgcagcggagtcacccggctaatctttcaggataaagtcacagtttatgtgggactcacataaagagcgagcgaggtggcaaaactaagaagccctggggcagccttgagttaaacccagggagggtagggacgattttaagaccatgtatcatgacctgcagggttttcaggtgggacagcgggagaggagcaggccccacagaggaatcgaggatgcccggttcacgccaggtctgcccccgggcaaagctacccctcccttcgcttgttacctcctcacgtgttcttggcatggcagagattaaaaatgcaaggaaaaaaattacatgcggaacggacaaaatgttctcagagattacttcagaaaaaaaaaagtgaaatgcagattgtacttcttcctttagtgcagagacgacttttatttccgccccctcccctccacattcctgacctctccctcccccttttccctctttctttccttccttcctcctcttccaagttctgggatttttcagccttgcttggttttggccaaaagcacaaaaaaggcgttttcggaagcgacccgaccgtgcacaagggccatttgtttgttttgggactcggggcaggaaatcttgcccggcctgagtcacggcggctccttcaaggaaacgtcagtgctcgccggtcgctctcgtctgccgcgcgccccgccgcccgctgcccatgggggagatgcagggcgcgctggccagagcccggctcgagtccctgctgcggccccgccacaaaaagagggccgaggcgcagaaaaggagcgagtccttcctgctgagcggactgggtaagcgccgccgccggccccgctgggggcttggctcacttccccagagcggcttggaggcaggggccggctttcgtcggagttctcggggccggggtcccggcggcgggaacgggaggacctggcgggcgaggtcgcgcgcgcaggcctgcgccccagggataaaccccggagggtggcgcgcaccgccggctcgggttggggaggagggtgggagtccggccgcaggacggcgcctggccggggagagggtatctgcagggacagtgagcgaagccaccgtggccgccgcgcacccgccgggaagcgcttcggcgctgcgaacccggctttctccggcggcggaataaatgagagaggtggaaaactaccccgggctctccggccctccccgcgccctccgccggcgcgttctctctctcctgccccaggagccgatggagactgataacggccctgcgccaggccgtccccgggcggtcctcgcgcccccgcccggggctcgccctctcaatggggacagaaccgcccgccgcaggcagcgtagccgccagcaaaccgcgaggcggccggggcggggcgaggggcgaggcgaagggcggggccacttctcactgtcgcgcaggccccgcccccgcggcggtgccttttttataaggccgagcgcgcggcctggcgcagcatacgccgagccggtctttgagcgctaacgtctttctgtctccccgcggtggtgatgacggtgaaaactgaggctgctaagggcaccctcacttactccaggatgaggggcatggtggcaattctcatcggtgagtgcaggaatcttgcgggacttctgctccaggagacgcaaagtggaaattttttgaaagtcccggatcagattagtgtgtgtggcgccggacgttatgaagccgtctaaacgtttctttatttctcctccttcatccacagctttcatgaagcagaggaggatgggtctgaacgactttattcagaagattgccaataactcctatgcatgcaaacagtaagtttgaccggatttgaggaaataactagtatagtttgaatttgccagcggtaaacattctcatcacggcgtttatcgggaaggcgaagacttcttctggggtggggatctcatttctccttaaattctaatatatttgacacattttaaacattaaagttaatttgctgatttggcttgaactggagatgtaagataaatggttcgtgttggccgaattcacggcctttctccatgagcaacaatccttatttctgtatttaatggggtttattattttctttaactgactaatgtattggggtattttcagtttaaacagtgaattatccgggtagaagtcggtagagccagaaactcacttttgatgttggtgtgccccctagtggcgagctggattctaaatcgtgccctttattccctgcagccctgaagttcagtccatcttgaagatctcccaacctcaggagcctgagcttatgaatgccaacccttctcctccagtaagtttttgtatgtgccgtgcatctgtggagaactgtaagggagtcagttagtattcctacattaatggattaaaatagcatttctagaaattagtatcaaggcaggaatgcttcattatggcataacaagtgatataaatatttaagtattgagtcagagtattattttatttttttcctgggcat

SEQ ID NO: 1226 - DNA, 6000 bp, Homo sapiens
ccaatagtattaaatattgacttacaaatttttccaatttactcttctgtccagaccaatgtatcatttttcataatcttatgtaaagttctgtggacaccattttccaggtcaatcctgagaaccaaaaataaagttgtcacatacatacaattccttacctatcatattgcattctagctgatgttttgtttttttaatcattgattggattatactaaatcagacattgacaacattgccaagatggagatgggtaagttttcagcctgagaaagatctgtttgtttcttgctatgtagattctcattcctcaggtgaggcgcagtggcttatacttataatcccagcactttgggaagctgaggcaggaggatcatttgagcccaggagtttgagaccagcctgggcaacacagtgagaccatgtgtctacaaaagataaaaacattaaccaggcatggtggcatgtgcctgtggtcccagctactcaggagtccgaggtgggaggattacttgaacccaggaggttgaggctgcagtgagctgtgactgtaccactgtactctagcctggacaacagagtgaaactctatgtcaaaaacaaaaacaaacaaacaaaaaaagcttctcattcctcccatgtcaagtattcccactggcttctctttaatttatcccctgaatgacataaaaaatttactaccaaatcttgttcctaccctcccgtcaattttcctatgggctcactttttagaaggaatgggtgtagaatattatcacctctgtcttggaaaaaatataaaccctgcgataaatgaaataattagttttgtgggttttaataacttttaacactatgattagagatagtgttctcttagttatctactgtatcacatctttttgcatgtcaaatttgacaattatgaatatggaaggtaataattactatacaacctgtgtctataaatagacatttaaataaccaccattgccagtgacttgtctataatagctataatgaataaactcatttgtcatcatcattttctgtaaaaaaaaaaaaaaaaaaagacatgcctttgctgacaaccttcaacaaaaactgatccattcagtttctctctagagtaataattatgttttctataattataataattatgttttctggtatttctatgagcttttttgagggtgttccagggaaaggtttctgtgagcatcaaacaatgaatcaaaaagtatgggaacttaaactcttcataggattgttctaaaattgatggtactttgaacaatatgaaacaattatattgccttgttatcaatggaagataacatacccggggaatcatgacaattacagctgatacatttaagaagtgtcttaagagtgaatatggttaagtccttataaaaaatatttttcaaaatattttctctaatatgttgagaaatatcaataatttataagccttttaaaattaaatggaaaaagtcatatctttgtgaagctctcaggttttagcatttatagtccatcagactatagagtgacaaataaagaaataaaaaaataaaatagaagagtgaaaaaattttttctgaagcattaaaatgcacatgcactgggaaacgtttagtttcagtgcaaacttttcatcctggtcagtcattcctacttgagggttttgactgcagttttcccagcaccgagacataaatgtgagacaattcgcttggaggagtggggaggtaattagcctatctcctatcaagccgtctatattttctatgactgcacaaggtgttgtagagaaattccctggaccaatagaacctcaggagacaagtgggggaagccgcgtatacgcgtatatggagcaagttctcccagagaactcgatcgccctctaggttgcatttacaaacagttcgggaggctactcggaccacttcgccaccagggagtatgaggaaaggggccggattcctcccagtaggaggactatctggaccaaagaaagaggctggcgacaggaaggaagaacagatcaagagtttgaatagcagctacagggcaacctaatgcctgtgcagtgttaacaggcgcgcgtcacacacagctcccccgtctccccctcccctcaagcacccctccgccgtgtgtcaccttcctgttcggaagtcttagtaggttgctgggacagaacagggggcgcctgctccacccatcacgtatccggttggaagaaaagccagtctcaacaacttgattctctcggttaaatgataagtttagccgaccatccgtctccaagtgctgaacattagggtaggggaggaaggagcacatcagacgttccctttcttttccaaccacaaatcatacggttgcatctattctctattccgcgtagaaccctccgacctgaatgccacgttcctcccggaatgcatgccacagagcctctgagaaaataaatcctgtgcatgtgttttgaattttttccggactgatttgtgaggataatcagttaagttacatttcttgtgtgcgtgctgggggtgtaataaagctaggacactgatgactgtaattttctgagtgatgtcgcaatggggagaataaatggcccagtgttgaactttgcagcttgctcccttcctgtacttaaattgccttgatataaagtggggttcataacagaacagggatagccgtctctggctcgtgctctcatgtcatctcagagttccagcttatcagaggcatgtagcagggaggcttattccagccataactgggctctacctccagcctccagaagtaatccccaacctgcatatccttgggcaacccgaagaatgaaagaagaagctataaaaccccctttgaaaggttcgtacttaccgtactatattttgcagatgcctcaaaggatttggggttacttggcatggggaaggcacataaggtggggtgtaggagagggtctctggttgtaggtttcttaatttaatgtttgaaaacaaacatgcaaaagtctgtgtgcaggttgatgtttctgggcagcctgagcaaaatttgctctctcaagagggaaaggaaccaggtgggagcagagctaggctgggctaggctagttgaatggtgggacatgacatacgggtggcactggcaataacaaagtcacattctatgaagattccctgcaagaggaagcagacatgggccagttactgtgatttgaaattgcctaaacattgctttaggttggcatgtcaatttcaggtactagtgttttttttgtttttgtttttgttttgtttttgtttgtttgtttgttttgagacggagtctcgctctgttgccaggctggagtgcagtggcgtgatctcggctcactgcaacctccgcctcccgggttcaagcgattctcctgcctcagcctcccgagtaactgggactacaggcgcacgccaccacgcctggctaatttttctattttcagtagagacggggtttcaccatgttagccaggatggtctcgatctcttgacctcgtgatccgcccgccttggcctcccaaagtgctgggattacaggcgtgagccactgcgcccggccccagtaaatgctttttataagtgtgggcactgagcaaactttcccagccagactccaggagagagaatgtgtttcccttctctcggtttggggctgttgcaacaaagcaaaccaaggagttgagactagagctcactttagggcaagtgggggtggttttgcctgcaaaacaaacccctgcccaagaccaaggaaaaggcgtttcacatgctattcctggtttgacagctggtatttcgggactgtgccagatccagtaggcaactttaaaatggcagagcctttggtagcaagaggtcatggcagggcagccaccgcagacagcaacagcgagcgccaggtacctggccctgcgaatagtggtaacttgtaactgcccgctccgggcccagtcgccgtgctcgcggcttcccggccagcactggctcacgtccccgcgccggcggtcaggctgcggctcccagacatcccccagccgcggggttactggaaggcaccggcatcgctgttctgcagagcccgggccgccgcctcgagcttccctctcttccctgccttctgcagcggagtcacccggctaatctttcaggataaagtcacagtttatgtgggactcacataaagagcgagcgaggtggcaaaactaagaagccctggggcagccttgagttaaacccagggagggtagggacgattttaagaccatgtatcatgacctgcagggttttcaggtgggacagcgggagaggagcaggccccacagaggaatcgaggatgcccggttcacgccaggtctgcccccgggcaaagctacccctcccttcgcttgttacctcctcacgtgttcttggcatggcagagattaaaaatgcaaggaaaaaaattacatgcggaacggacaaaatgttctcagagattacttcagaaaaaaaaaagtgaaatgcagattgtacttcttcctttagtgcagagacgacttttatttccgccccctcccctccacattcctgacctctccctcccccttttccctctttctttccttccttcctcctcttccaagttctgggatttttcagccttgcttggttttggccaaaagcacaaaaaaggcgttttcggaagcgacccgaccgtgcacaagggccatttgtttgttttgggactcggggcaggaaatcttgcccggcctgagtcacggcggctccttcaaggaaacgtcagtgctcgccggtcgctctcgtctgccgcgcgccccgccgcccgctgcccatgggggagatgcagggcgcgctggccagagcccggctcgagtccctgctgcggccccgccacaaaaagagggccgaggcgcagaaaaggagcgagtccttcctgctgagcggactgggtaagcgccgccgccggccccgctgggggcttggctcacttccccagagcggcttggaggcaggggccggctttcgtcggagttctcggggccggggtcccggcggcgggaacgggaggacctggcgggcgaggtcgcgcgcgcaggcctgcgccccagggataaaccccggagggtggcgcgcaccgccggctcgggttggggaggagggtgggagtccggccgcaggacggcgcctggccggggagagggtatctgcagggacagtgagcgaagccaccgtggccgccgcgcacccgccgggaagcgcttcggcgctgcgaacccggctttctccggcggcggaataaatgagagaggtggaaaactaccccgggctctccggccctccccgcgccctccgccggcgcgttctctctctcctgccccaggagccgatggagactgataacggccctgcgccaggccgtccccgggcggtcctcgcgcccccgcccggggctcgccctctcaatggggacagaaccgcccgccgcaggcagcgtagccgccagcaaaccgcgaggcggccggggcggggcgaggggcgaggcgaagggcggggccacttctcactgtcgcgcaggccccgcccccgcggcggtgccttttttataaggccgagcgcgcggcctggcgcagcatacgccgagccggtctttgagcgctaacgtctttctgtctccccgcggtggtgatgacggtgaaaactgaggctgctaagggcaccctcacttactccaggatgaggggcatggtggcaattctcatcggtgagtgcaggaatcttgcgggacttctgctccaggagacgcaaagtggaaattttttgaaagtcccggatcagattagtgtgtgtggcgccggacgttatgaagccgtctaaacgtttctttatttctcctccttcatccacagctttcatgaagcagagg

SEQ ID NO: 1227 - DNA, 6000 bp, Homo sapiens
ggcatttcgtttcttgatacagcacattcaggagcactgtctgtgagggagactgaatggaggagggggaggttggattatcattcaggcctttcacggaattcctgtcacataggcctcgccttggcccagcagattaagtggcccatgctgtgcaagtgccttactcacagcccataattacttgatgtattgttttgatttgttggaaccctttgcactgtgcgacagtgttgtttgtacttgtgatgtgcgtagggtggggctggcaaatatacacagatcatattttctacttaaaactccaacatgagagaggcgcttactaaattctttatttccttttttttttttttagacggagtctcgctgtgttgcccgggctggagtgcagtggcataatcccagctcactgcaacctctgccttccaggttcaagtgatttctggctaatttttgtatttttagtagagacggggtttcaccatgttggcctgctggtttcgaactcctgacctcaagtgacccacccaccttggcctcccaaagtgctaggattacaggcataaaccatcacacctggcctatttccattatttttcacaacttatatgaggcaggtataactctccccgctatacagctgacaagattaagggttagagaataccttgtctaaaatctcacaggtatggctaggcacagtggctcacacttgtaatcccagcactttgggaggctgaggaggacagatcacttgagctcaggagtttgagatcagcctgaccaacatggtaaaaccctgtctctactaaaaatacaaaaattagtcgggcgtggtggcaggtgcctgtaatcccagctacttgagagtctgaggcatgagaatcacttgaacctgggaggcggaggttgcagtaagccaagattgcgccactgcacttcagcctgggtgatgaagtgagactccatatcaaaacaaaacaaaacaaaaaaaactcacaggtagcaagcctcagttgtcgccaactagactgacatccccataactggtttttccattgctggttactattacatgtatcttttgttgttacaactggcacacagagtttacaggaaacagtccttaagtccttaggggtggcccgagcttctgttgcctccttctagattgattataggctcagaaatgggagagacttgggccgggcatggtggcttatgcctgtaatcccagcactttgggaggctgaggcaggtggatcacttgaggtcaggaatccgagaccagtctgatcaacatggtgaatccccatctctactaaaagtactcaaattaactgggagtagtggcacgtgcctgtaatcccagctactcaggaggctgaggcgggagaattgcttgaaccagggaagcagagggtgcagtgagctgagatcacgccactgcactccagtctgggcgacagagtaagactcctccgtctcaaaaaaagaaaaagaaagaaagaaaacaaacgggagagacttggagagagatttatactgagcaaatcaaagctttcaggtttcactttagtttgacaaaagatgtccaccagaaatccagactccttatttactattggccctttgtaaataaagtgggggtgaaagagagccctttatattgccttcgtgtcagttacacctttaatatgtgtgtcttaggaaggattctggctgctggacttgtgggggaagtagatgcccacgtagttttaccttggagagaatggagaggaggccgaccaggccagatattgcgggaggcctctcaccccaaagctctcagacctgtttcttgtttgaatgcttgacattttatcattgcaaattaaattttttgagttgacaagtggccttttaaaatgcaaatgcctaacagtaaaggcatgccaaaaatataaggccagagtccttttttttttttttttgagataggatctcactttgttgccccggcgagagtgcagtggcaagatcttggctcactgaaacctccaacaccctgggctcaagcgattctcccaccttagcctcccatgtagctgggactacaggcgtgccaccatgtatggataatttttgtattttttgtagagacagggtctcactatgttgcccaggctggtctcaaactcctgagctcaagtgatcctcctgcttcaacctcccaaagtgctgggattagaggtgtgagcccctgcacctggccaccacagtcctcttgagtttaccaatagtattaaatattgacttacaaatttttccaatttactcttctgtccagaccaatgtatcatttttcataatcttatgtaaagttctgtggacaccattttccaggtcaatcctgagaaccaaaaataaagttgtcacatacatacaattccttacctatcatattgcattctagctgatgttttgtttttttaatcattgattggattatactaaatcagacattgacaacattgccaagatggagatgggtaagttttcagcctgagaaagatctgtttgtttcttgctatgtagattctcattcctcaggtgaggcgcagtggcttatacttataatcccagcactttgggaagctgaggcaggaggatcatttgagcccaggagtttgagaccagcctgggcaacacagtgagaccatgtgtctacaaaagataaaaacattaaccaggcatggtggcatgtgcctgtggtcccagctactcaggagtccgaggtgggaggattacttgaacccaggaggttgaggctgcagtgagctgtgactgtaccactgtactctagcctggacaacagagtgaaactctatgtcaaaaacaaaaacaaacaaacaaaaaaagcttctcattcctcccatgtcaagtattcccactggcttctctttaatttatcccctgaatgacataaaaaatttactaccaaatcttgttcctaccctcccgtcaattttcctatgggctcactttttagaaggaatgggtgtagaatattatcacctctgtcttggaaaaaatataaaccctgcgataaatgaaataattagttttgtgggttttaataacttttaacactatgattagagatagtgttctcttagttatctactgtatcacatctttttgcatgtcaaatttgacaattatgaatatggaaggtaataattactatacaacctgtgtctataaatagacatttaaataaccaccattgccagtgacttgtctataatagctataatgaataaactcatttgtcatcatcattttctgtaaaaaaaaaaaaaaaaaaagacatgcctttgctgacaaccttcaacaaaaactgatccattcagtttctctctagagtaataattatgttttctataattataataattatgttttctggtatttctatgagcttttttgagggtgttccagggaaaggtttctgtgagcatcaaacaatgaatcaaaaagtatgggaacttaaactcttcataggattgttctaaaattgatggtactttgaacaatatgaaacaattatattgccttgttatcaatggaagataacatacccggggaatcatgacaattacagctgatacatttaagaagtgtcttaagagtgaatatggttaagtccttataaaaaatatttttcaaaatattttctctaatatgttgagaaatatcaataatttataagccttttaaaattaaatggaaaaagtcatatctttgtgaagctctcaggttttagcatttatagtccatcagactatagagtgacaaataaagaaataaaaaaataaaatagaagagtgaaaaaattttttctgaagcattaaaatgcacatgcactgggaaacgtttagtttcagtgcaaacttttcatcctggtcagtcattcctacttgagggttttgactgcagttttcccagcaccgagacataaatgtgagacaattcgcttggaggagtggggaggtaattagcctatctcctatcaagccgtctatattttctatgactgcacaaggtgttgtagagaaattccctggaccaatagaacctcaggagacaagtgggggaagccgcgtatacgcgtatatggagcaagttctcccagagaactcgatcgccctctaggttgcatttacaaacagttcgggaggctactcggaccacttcgccaccagggagtatgaggaaaggggccggattcctcccagtaggaggactatctggaccaaagaaagaggctggcgacaggaaggaagaacagatcaagagtttgaatagcagctacagggcaacctaatgcctgtgcagtgttaacaggcgcgcgtcacacacagctcccccgtctccccctcccctcaagcacccctccgccgtgtgtcaccttcctgttcggaagtcttagtaggttgctgggacagaacagggggcgcctgctccacccatcacgtatccggttggaagaaaagccagtctcaacaacttgattctctcggttaaatgataagtttagccgaccatccgtctccaagtgctgaacattagggtaggggaggaaggagcacatcagacgttccctttcttttccaaccacaaatcatacggttgcatctattctctattccgcgtagaaccctccgacctgaatgccacgttcctcccggaatgcatgccacagagcctctgagaaaataaatcctgtgcatgtgttttgaattttttccggactgatttgtgaggataatcagttaagttacatttcttgtgtgcgtgctgggggtgtaataaagctaggacactgatgactgtaattttctgagtgatgtcgcaatggggagaataaatggcccagtgttgaactttgcagcttgctcccttcctgtacttaaattgccttgatataaagtggggttcataacagaacagggatagccgtctctggctcgtgctctcatgtcatctcagagttccagcttatcagaggcatgtagcagggaggcttattccagccataactgggctctacctccagcctccagaagtaatccccaacctgcatatccttgggcaacccgaagaatgaaagaagaagctataaaaccccctttgaaaggttcgtacttaccgtactatattttgcagatgcctcaaaggatttggggttacttggcatggggaaggcacataaggtggggtgtaggagagggtctctggttgtaggtttcttaatttaatgtttgaaaacaaacatgcaaaagtctgtgtgcaggttgatgtttctgggcagcctgagcaaaatttgctctctcaagagggaaaggaaccaggtgggagcagagctaggctgggctaggctagttgaatggtgggacatgacatacgggtggcactggcaataacaaagtcacattctatgaagattccctgcaagaggaagcagacatgggccagttactgtgatttgaaattgcctaaacattgctttaggttggcatgtcaatttcaggtactagtgttttttttgtttttgtttttgttttgtttttgtttgtttgtttgttttgagacggagtctcgctctgttgccaggctggagtgcagtggcgtgatctcggctcactgcaacctccgcctcccgggttcaagcgattctcctgcctcagcctcccgagtaactgggactacaggcgcacgccaccacgcctggctaatttttctattttcagtagagacggggtttcaccatgttagccaggatggtctcgatctcttgacctcgtgatccgcccgccttggcctcccaaagtgctgggattacaggcgtgagccactgcgcccggccccagtaaatgctttttataagtgtgggcactgagcaaactttcccagccagactccaggagagagaatgtgtttcccttctct

SEQ ID NO: 1228 - DNA, 6000 bp, Homo sapiens
ggagtttgagaccagcctgggcaacatggtggaaccccatctctacaaaaactacaaaagttagctgggcatggtgacacgcacctgtaatctcagctactcgggaggcagaggtggaatgatcgcttgagcccaggaggttgaggctgcagtgagtcatgatcacaccactgcattccagcctgggtgacagagagagaccctttctcaaaaaagcaaataaaataaaattaaaaagggtcttttgcatgtacaaaaacaaacccataatccccagcagggtttcctaattcttcattaaatacatcactaccactgtggctggagttttaagcatatgatcgagtcactcaggccaaaaaggaatgtaaaacatttctcatgaggtgatgtatttttatccctttctccttagggacatttgtcactaaacagatactttattgtttgttatcttttgtgtattctggggtgctatcgaaaaaaattacattccattcaacaactaaatgtatcacacaaaaacactttaatctatgggaagatagactttctaaaaagtattacagtggcatatgcctcttgctttagtgaaacaaagaaatgtagagttatttattactttgcaaaaccctttcaaatataatttggtactgacaattcctttaggaggtaggtgaagaagcattttattattattattttacagatgaagaaactgaggcttagtgcgttgagggaacttgttgaaggttgcacaattagggaatggaagtgaggtagaagatgttccaaatcaatacagcagtctttccaccgcaggtacatattggtagttagtcctacctagctactttattttattctttgtgtgacagcctaaacaatattgttgggaggaaaagtaggtataccacaaaaaaatcaaatagaggttcaagggattctttttgtttgtttgtttatttatttatttattttgagagagtcttgctctgttgcccaggctaaagtgcagtggaacaaccatgtctcactgcagcctcaacttcccagggtcaagcaatccttccacctaagcctcctaaacagctggaccacaggcatgcatcaccacaccacctattttttttcctttttgtagaaatggggctttgctatgttgccaggctggtctcaaactcctgggctcaagttatcctcctacctcggcctcccaaattgttggcattataggcatgagccactgtgcctggcccaagggattatttttaacattgggattttccatcaaaaagaagtgtcatcccagggctacagtgtcattgaggcttaaagaggaaatggtgaggagtgaggtcgtttgctcttactggagctcagcatattggctatcatgggagagagcttaatgactgaagaatcttaaaggtatttaatgattcctgcaaatggtctggtgccagggtcactgatgtcagctatacttacttttgtatttaattcgtttgaaaaccatttgttgagtgctagcatggcccaggcactccgctgtgtgctggtgctacaaaaataaataagtgtgttttatgggaacaagaagtgagttaattaattaaattaagtttgatttataaacaagatgttgcatgagtccagagtttttttttttattattataagcaggagcctgtgctcctttataggtatcaacagtggacctgtcaaaggaaacatttagtaaacagtagtcactctgggcttacctgagggcagctttacttatgaaaatagaggtcagagtgagatgaaagatgccttcttttcctgaataaccaacacagtgcagttaatgcatttctctattattgcaccaatcaaaagataatccaaaataattggctgtcagatatagtcagaatccctgccctatacttctcttccttcatctgactgacctactcattctttaaggccatgcactaacatcatccctttaggtaaatttcctggacctctcttacccatccagccccacccttcccccctccaaattaaggcagggttgatgcatacacaccacacacacacacacacacacacacacacacacacacacagagtagtacactcttatccatgggggatacattccaagaccccccccatggatgcgtgaaacttcagatagtaccaaactccatatacattatgttttttcctgtacatacatacctataataaagtttaatttataaatcaagcacagtaagagattaacaacaatagtagaataattttaacaatgtacgataataaaaatgatgtgactgtggtctctctctgtgtctctaaaagtatcgtattgtactcactgattttcagaccattgttgaccttaggtaactgaaactgtggaaggtaaaacctcagataagggaggactactgtatatagtattcttaccacactgtatatttctctactaggctgtgagttccttggtgacaaaaaccagtgacacttacatgcactggaccttccataggatctagcatagaccaagtgacagtggcagcatcttcaagaggtggcatggagtgagggaaaagatagcatttagcttgtcttctcctccctcataatctctattaaccacccgcctgcaccccaaatgaacatacatcctacatgaaaccagggtattagtccgttctcacactgctaataaagacatagtgagatgggtaatttatacaggaaagaggtttaattgactcacagttcagcatggctggggaggcctcaggaaacttacaatcagagcagaaggggaagcaaacacattcttcttcacatggcatcaggaaggggaagtgctgagcaaaagggagaaaagccccttataaaaccatcagatctcatgagaaatcactcactgtgggaactacaattcaagacgagatttgggtggggacacagccaaatgatatcaaccagtatgcatgctaggccaatgtgggattaagcaaagccccagcacctccttcctagcagagtgcttaaaggtcccctcctgtatattactcaaattcaataaatgtctgttaaaacacttttgggggagtggcaatgggacgaaaaagaaagaacttgaatgaccatcattttttaaaatgaggtccattgaggtataatttacatgcagcaaaagtttcccttttcctatataaaatttgatgagttctgacaaatgcatagttatgtaaccaccaccatcatcatgatagagaacacttccatcgtctcaaaataattccctttgaactaccataattttaaatgaactctttagaagaaccacaaaaacttatcaatgttgtagattacataacatatacttgcatcttggacaacttaacatatctctccaaaatgaatagttgttttcccttggttatcatgccatcatttagttgtattgcattttctttttggaaacctcaaggcatttagcaaacaggatttcatgtttattcccaaaaactctggcccaactgtagagatttatagtccaattcaatgaaacccatgcatttctttcccagtttaacctgatgtttctcttcttaccagagacttccatgtaaatactttaacaatgttaggtgtgttatatataatgaggtcataatcagtttcaaattagcattgcgcctttcacttatttatcaattatattcccttgtgatgattatgaaaaggctccacatcctgaggacacttgtcagagttagatttattaatggaatgaaatagcaaataatgaatgactaaataaatgaatgagtgaatgaatgaatgagtggctgcctccattttatggatgaggcagtgtccgaaaggcacagtgaggtcaggtgatggcagaaagccacacaccgatgttggtggctttctgccaggtcagatgccaagtttattttctttgctttcttgctttactatcaactaatctttaaaatcattcccataaaatatcaacattaaagaataaaaatggaaaaataagccacatacaattaaatggcttttttaaaaggagctcagtgtgcaaaggataacatgagtaaggattttttgggaaatttttcacctaataggaagaatgctttactcttttatttatcaaaccttcctcatcattaaatggattcagtagtactttttggtaataactcgtgtgtgtgtgtatgtgtgtaataaagtactttgtatatgttcattgtgttctttttttaataagctgttttaatgaaaaagacacaattaccgtcaccattgcccactatataatgacaagtaggggaggggaggctaaaagagcttctacatagtgagagatcttccattgttatacctacgcttgcactttatttcattttcttccacgtttggacaggtcgagattaaatgtgattacatttccgttgagaggcttttattcagcaacaggattcaaaagaatgtcaatgagcataaaataaaaacggtgtgcaatttatatgaaactctgatttaaatggtcctaaccaaaaaaaaaaaaaaagaaagaaagaaaagaagctatttaaagtaaccctcccaaggggagtcaactgctcttcagtgtgccctgagccggctgtgccttctctccatccgctgctcagatattcatgaaccgttgcttcttccagcctcgccttctcgctccctctgcctttctggcgctgttctccctccctccctctggcttctgctctttcttactccttctctcagctgcttaactacagctcccactggaacttgcacaatcaaaaacaactctcctctctcaagccgcctccaggagcgcatcacctggagaagagcgactcgctccccgcgccggccgcggaagagcagccaggtagctgggggcggggaggcgtacccttctcccgctcggtaagagccacagcatctccccggagattggccgtatcccaccgtccggcccccagggtcctgcagcggtgatgcatatgtttcggagcaatgatggaaggagaaaagccgctgtcggtggcaactgaaagtggggagaggttgctgcagtagctggtgctgcagaatgcgcgagtgaagaactgagccccgctagattctccatcccgctcagtcttcattaactgtctgcaggaggtaaaccggggaaacagatatgcactaaccaggcgggtgccaacctggatctataactgtgaattccccacggtggaaaatggtaaacaaagacatgaatggattcccagtcaagaaatgctcagccttccaattttttaagaagcgggtaaggacaggttttgcttatttcttttgttttctgtgcttctcttaaatgcttttgaatgtttgcctgaagtaagcctgaggttttgttgctaaacccttaatgtaagccgtgcttctgatggcagtggtaaagctgagaactatacctgacttgattagaatttgttggaggaggggcagggggctatgaagagttgcattgggaggagggggttgggctgagatgccttaaacgggtttgagctgggaatggggatttttctctctcaagccacaacaaagattacaaggcagtcgcaaagagaactggcttgagtacaattatggctagtaatttagtcaggggctaatttagcagcttcctctcatctttgaagggttcaacttttctacacctttcatccactcagtctcaagtgatgcattatcatcttcgttcgtcagaagcagcagcttctggtttcccaaatccattcagccaataatttgctgtgtctctatctgtggtataaatagcaaaggagtagaatgaccttttacagaaatgatggaatccagcatttaaaattgtctattttaagttgcctcaatttttgcttttgcttagaataactgcctttt

SEQ ID NO: 1229 - DNA, 6000 bp, Homo sapiens
tagtaattgtttaacacttttaacaatttacaaatattaaatttaggccgtttttctatggcattctcttgagtctgctaacccttaacaagtacatactcattttgggttggcgtttacttaggcagtagtttcattaagaactgtcttattttaagaatttagccacttataagtagcagtaatatttttacatgttgcttttctgggttatatttaaaaatcttggtctctataaaacataaacattgatttgccacagactgatgatgctcactagaatatcaagcaaaattacacactttttccttataaattagttcccaaagttaattattttggtttttacttatgagccattgaaatggcaactttggttttcacatgaatagttaaatttaaaagattttgtatcttatatgtaaaggaatgttgagggaaaagaaggaaaaatatgattcagaagaaaagtctagaactagacattcattcccttaggttctttcagaacaattaaccagtttaaaagagtttgcacatttggatgaaacattaatacttagtaactaacaggccaggcacggtggctcacacctgtaatcccagcactttgggaggctgagacaggtggatcatgaggtcaggagttcaagaacagcctggccaacatgttgaaaccctgtctctacaaaaaaaacgaaaattagctgagcgtggtggtgcgtgcctgtagtcccaactactcgggaggctgaggcaggagaatcgcttgaacccaagtggtggaggttgcagtgagccaaggttgcgccattatactccagcctgtgtgacagagtgagaatctgtctcaaacaaacaaaaaagcttagtaataatagataacatttgttaagcatcatgtactatgctaggtgctgttctgagtgttctgtatgtatgaatacttaaaaaaggcttttgagttggggccattattctatttttgtggatggaaaaaactgaggtacaaaggtggagtagcttaagcagagttatgtggctagtgcaatggggtcaggatttatgcattgggctccagagtcagggttctgaaagtcttgtttgtactatttgttgtccaatactgagttatagtaatctttgttgcattctttttgaattttcctatctctaagctttgttttatgcaaaggtgtggtaatgttttcaataataaaaattccaggaaagatactagttttagttagaacctgaaattctatggaggggtgagtgtgaagagttggagcaagtgggaaagtactgaagtaggcagattctcagtgttgagttgctgtcttcaaaggaagagaaaatcgttggtggggaagggggttcaggattggagttttggttattattcctttgaaacgtgatccttgtatggagaagagaagatgattcagaaggtcttggtttctaatacagactcctttgttaacatgttcttagctgtgtataaatatctaacttctggcccttttaaatctgagataattaaaaattaaacattttaataatgagactgaaatcttcgatataaaacttgagtattaagaatatgtttagcatcaaaaatctcaattaagtagctgccaggatgccctacgaaaggcacagtttaattgtttaggtgctgttgtgtttaccaagtttcagatgattgtatattaaaagcaatggctagtttaaccctagtgtctagctttgctcttggcttttctatttctgctaactcttagctacctggtgtggtaatcatatactgccaccaagatatctgggaaatgtgttttatgggtgatggtcacaaggggtagaagaaagggctagctctgtgaccttgggcaagttacttaatttctcagtgcctcagtttgtttatttctaaagtgagggcagtaatactatcttagagggttgttgtgaggattagttgaataaatacatgtgaagtgttcagaacagggccagatccatattacacactatagaaacatcatttttgccaccatttattgagtgcttgcttgtcagacactgggccgggcacttcctgctgatctgtgttccctcaaggcacacattattaaaatgaagtgaattctagagaggttgcccaaagtcacacagtttctgataagatttaaacccatgcttctactccaaaacctcttcccagaatccatggtgtattgtgtaaaaatcataaaaaaacacagcctctggagttgggtatgttaatgtgataagggagcatgaaattatgtagtggagtgggcattatttttagtggcagactattttaaagtagtttattttgggtttgtaataaactctgccgtatttaaatttacacttttgatagttccaaaattcattcattatagagtcatgtacacctctacctagtaatctttcagtggtttggtaaagatagattattagcagttggtaagttctctttcatatggtctgttagttacccatataattgaacttttcaagtcatgaagggggttaatcagttaaatgaatatatccaaaggcacagtcttatgttttggaaaaaaaatactcatatgccatattacgtaaaaaaaagttttagtggcttttggatggttgctcactactggtactctatagattacacaacattttgtttgcattataccccttttctaataaaggggcattttgctttatttcccatttttgtgggtgacaaagttaataagttagctgttaattaaattacatacaggactcccttggccttttgtatgaatataatacccatctctactcatctacaaagtcaagtacttttcagttttgcagattgttttgcttaatagaacaatttcataatttggggatcatctgtatttgaatacaattaatggttaaagctgggatgtgataactgcagtactttagattgatgaagaactgagtgagatgttaattctagggaccgtgtcatgatttaccattgaaattctctagcccagaacatcgatatgtactgtacattgatctagatttcaatctcagtagatttaaaatctacttttatatgtaaagtataaaattcataccaccagtttcattttagtgaatgttataatattttaatgatatttttatgactttctgctgcatctttatgactaaggtaattttgggaaaaacttaattttatctcattgcatttggtgtaataataagtggacttggattgacataataaaaaaacaaaactcaggattctaaaaatcagtggtaatttagcagttgagatcttccaaatgattgtctgggtaaccttcagtgcttgggttgctaagtagtaagatgtagttattctcttgatgatggaatgtatttttgttgaaaaattcagttttactggttttgttttattgtgttttagaatattaccaatctcatatacccaatcttcagaagattaatactgtgatttatgattggagaaatgatcatctttacaagaaacatttcattgacaattgtttttaacctttctgtagcatgacgacagagatgatggtgtggattattgggccaaaagaggaagaggtcgtggtacttttcaacgtggcagagggcgctttaacttcaaaaaatcaggtagcagtcctaaatggactcatgacaaataccaaggggatgggattgttgaagatgaagaagagaccatggaaaataatgaagaaaagaaggacagacgcaaggaagaaaaggtataaaatttcaacttgtgattctgacagattttttttgatataggtttggtgggtgaattatttcatttttaggaacaattattaatatggttccttttcactctccgcatcttttgttaatctttaattttttctctctcttttaggaataataaatatgaagtaagattacaacagagcagaacttgcacccaccattttttttacctgatttttgttttcaaataagaatgtaagcattttacttaaattttactgtttgcaagtagtctatagaaattttgttttaagtcttcaaatatcttgagaaatagtagactgtatgttgaaaattgtactgaaataaagtagaaaattgttacgtaccatatttgtaactatcaacttttaaaacttttaacgtttttgttacatgcattgtaattctgctttgtctataagatatggtcaagtacagctctgtgaaagttctgattctcttccttccctgtttgtcaatgttttattctgaagtaaacgttagctctacatataaatcctggaacagaaattgtttatagagactacactaattattttaactgtatacatctgtttaatttgaacacactacatcgtagggtgactgatttttgaagtataccacagacaaaaagttgttactatggtaaactaagctagtttaacacttgagcaaatgcttaagaaggaattaaaaaaaaaaagctttgccaatagctaaaaagtacaagctattaaaaatcagattgaaaagttttgagaaaatgttatttttactgaaagcaagcagtggcctataaagaacattcttaggagccttttctatttgcgttcaaaactgtgtgttctctttctattcctatttgatagtttgagtcatggtcttagatattagctatttgtgagaggaaactggtttgtaacaatactgcaaatagaaaccccatttctactgaacatcctagttttaaacagaagaaaaactgtaatcctggggttggtatgtaggaggtctatcctgcagaataagttgatacattagtacctgatttcatatcttacatatttatttgagctgaacattagtttgtagtgtaactattagtaaaaatagagaaacacagcatactgttcattaatagtattttaaaaaaattgtttttcaaatgtcaccaataaaagttttggcaggaagcttgttgcggcattgatctaacctttttcccccccatttcagttgcagtttttgtagaatggctttttctttttcctcttaagagttctattcttcaggtagataatttttcaaatgtgaattatcttttgtgtctatattgatagctcttaaaggagtgaaaatctaaaatagtaaatttcaatgttaagtgtctgctttatgggcatatataaaagtagacacatttcatttgttaatttagttgtgtgtgtgtgttaaaaggagctaatgcttattctgttaatgtaaacttttgaagatcttaagtgtattgctctttcatcttaaacactttcgaggatttgcagtgcgtctagcacctagattacagccaggaacattggttaagaactgttggaaacaaaactaaaagcaaactcaacatatgtgatgtttatggccctcagatccttagtattgtgtgattttcccccgttaacatgtctttctaaaattgtctattaaagcagaggaaatacctgccaaaggaagtatgtattgcattaatcagggcataactaatattctcctgttcagaataatacttatttacgtgtgaaagcaacatggatgtgattcccaacacagaattttcatgacccttttattgtatacaaataaataccataacagttacttggttagacatcaaatctgtgtgcatgactatgtgcttatccacttaagacaataggtaaaaggggatctgagaaattatgtaatagggagtgggaataaaactacttaattcctgtgggcaggttatattttaagttcaaatgcattgctttaacctttggttacttttattctgttaaacagaattgaagaaagagtattataccagagtgtagtaggctagggtgattgtaagaactctgtaatagaatgtcattgtggatgttacctttttcagatccaagcata

SEQ ID NO: 1230 - DNA, 6000 bp, Homo sapiens
gatgttcacctccttctgtgtggactggtctgggagttggagacccttggtctggtctgtaatatctagaatatgacaggtcttcaataaatcagtggttctaaaactttagtgtgtatccttacccccacagattctgcctcaataaatgtgtaatgagactcagttctcttaaacaacctaggttattctcatgagttggcttctgttttacactttaagaaaaccggcattagggcttgtcaatatcaacggtgactccctctccaggccaggcttaattcttagttcttttaaaataagcaatgaggctgaaatttcagcctatctcactcctacctgcaatactctatgctctgtatttcactacttttaaatatcatcattggttgcagccctttgcttaggtgattttagccttctgtgagataaattgtctgggtagaactgagctttcagacttttcagggggcaaacagagatatttgttggcaactggataactgctttaaaagaaggagttgttctgtaactcttataacctctcctaaggaagaaatgatttctgggtatgaatcccatcatgattctgttgccccattttagggggggttccctctttgttcttcaatagttacattaaacagcaagctggcataatttctgggcaaagatttcttatgaaaactttgaaagaatttaatgttctatttgttttttccatctttctgagaaagatgcgcattaatcttgatagaacttagaaacaatagttaacagtcacattttgatatttttctgtttgtttgtttgagacagagtctcgctctgttgcccaggcaggagtgcagtggcacaatcttggcttactgtggcctccgcctcccaggctcaagcaatcctcctaactcagcctcctgagtagctgggattacaagtgggaaccaccacactaggttaatatttaaaattttcggctgggcgcggtggctcacgcttgtaatcccagcactttgggaggccgaggcaggtggatcacgaggtcaggagttcaagaccagcctggccaagatggtaaaaccctgtctctactaaaaatacaaaaattagctgggcatggtggtgcacgcctgtaaccccagctacttgggaggctgaggcagagaactgcttgaacctgggaggcggagattgtagtgagccgagatcccgccactgcactccagcctgggcaacagagcaaggctccgtctcaaaaagaaaaaaacccaaaaccaaaaaacaacaacaaaaaaatccaaatatttaaatttttcgaacagacaaggtctcacatattgcctaggttggtctcaaattcttggctcaagtgatcctcctacctcagcctcccaaagtgctgggattataggtgtgagccaccatacctggctcattttgatatttcaattttttttcaaaatggtgagatgaatattaaggaacaacactgtaaatacataattcttaaataattttggtaattttaaaccaaaataattaaaattgaaaaaataaaattaaaatattttaaataaaataaataactctacattcttagtatgtaaaaggggatagaaaaataaggaaaatatcctagtcaatttgttcaccagtaggaatgaaatagtctagacaaggggaaccatttatttcactggtacagatctaaaaaaatgccagatcatttggaaaactgacctcataaataggacctgcttctactcaaaactgtgacatggagttcagggttcttagcaaacaaaagaaaccaattctgattaactcatcaggaaaagaaatttactggaaggataccagctagctcaaagaatcaatgaacattttatcacttaaaattaaaaaaagaaattagcacaaagcctgtagagggatatgcacaaatggaggccatgcagcaggaactacagccaaagtccggccccatcagcactctagttagggaatctctgttggtcacgtttcctctgctgcctgcttcccactactactgttgggttcccaatgccagtattttcagggagtgggaagagtgagactccaaataccacttcagcttcaatttccccaaatacggaaatagttcagatgttccatctaaaaagataaacaaaacaaaccaagcaaaaccagtcaggtcttggagcttgccttcctgctagacttccaaccccatcctcattcctatcttcttatctttgtccttttcacatatccattcttctccatttctctttttccttttcttgtctccatttcttttttcattttctttctttctttctttctttttgaaatacagtcttgatccgtcgcctaggctggagtgcagtggtgtgatctcggcttactgcaaccgccacctgccgggtccaagcgattctcctgcctcagcctcctaagtagctgggactacaagtgcccaccaccaagcccggctaatttttgtatttttagaagagacggagtttcaccatattggccaggcaggtctcgaactccagacctcaagtgatccgcccgtgtcggcttcccaaagtgctgggactacaggcgtgagccacagcgtctggcccatttctctttttcaattatcttaaattaaaatcaaaccaaaacagaagcaatatctttcaagaaagagttttataatcgtattaacaataacttctccatgaccataaattaaaattaccttgccgggcgcggtggctcacgcctgtaatcccaacactttgggaggctgaggcgggcgcatcacttgaggccgggactttgggacgagcctggccaacatggtgaaacactgtctctattgaaaatacaaacattagctaggcttggtggcgggagcctgtaaccccagctacctgggaggctgaggcaggagacttgcttgaacctgggggtgcggaggttacagtgagccgagatcgcgccactgcactccagcctgggcgacagagcgagactctgttttttttttttttttaaaattaaaatcagcttactaatttatctcagcattctctttgtacctttttagcagtttggtcatttgtttacaacttgtatttcttcttgagataatgttctatttttctgcaatgctcatttgttaaatgggctcttttttcctctgctcttttcggcgtttgtattttaataggaaaaaaatttattacaaagaatgaatctgtaatggtggaatttcaggttttgaaaataagaatgtgcataaaacatctaaattcaagaacctcctactttgtagattgggaaagcatcacgtatcaaatggatctatttcaagggaagtctgtataacttccacttactaaaggctttgttccaaaggatctcctttgttactacctcatgttatgtaaataaaatcataatcagttatattgcctcaaatagatacttcattttcaacacatgtgcaatagaattgcagagggaggtcgaagataatatcctagcctgcaatttggggtattttgaataaatgaataacagcatgtattgggagcgccccgactcccaatacatgcagaatagcagacgtgtattgagcccttagttgttttttttttaaatatagttcattcactcaacaaatatttctgagaacctgcgaatgcttgggacatcagggcacaacaaaaaggccaaggatttctgtgtccacatcctgaggtggtaatggggtgagggacagactgtacaataaaaaacctacgattcactccatgaaaatgttgtcgtttttctagttcagctggtaaactggactgtgaagaaagaatgctctaagcacagtgttaaattcacaaccagggcccaatcctagtttcgattcactcactgacaccctggttgctaattacaagtctgaaatccatcaaggtagttaacatctctaaacatcaaagcaatagcggttttaggccctaagaaagtgcagcccggagaagtattaatgcaaaatgtgctacggctgttatttaaattctattcaaatcgaatgtggcttgcctatttataatctgacttataattctggacaaccaagctacgttgggctgtgttcctcggctgccacaaatcatcgtcacaggctgaaagctcaactgcttcgtgctctttattttttcatgcctatgccaacgttgccgatgtggtaaagctgtcatcacgccgccagaagggcggccttctttggcacgagcagcctaagaggtttccggctgctgcggcttgagctccgatttgatcagacgccacgaaagggatttagatcgtggccatttttcaactaagtgcgtctgccgaatttaatagcaaaccaaaagccacattttctaatctccagttaggcgtccaagaggaaaagtggcgcttgctggctgagggagcagcgtgtctgcaattacagccacgtcttgcctcctggtcttttcctcagtgtgggattgtctttttgttttttgcctggtctgagccggccccacagaaagaacagaccagacgagcttactgaggtaaaacgcaggggcggcggtgaggtctagggggtctactcagaacgaggcagagacaccagcgaaaagcgccgtatggcgaagctaactcaggcctgacaaaacacccaccctactctaccgcctctccggccaaggctgacgctacgggccagagggcggagccgtcacatcttcccgcgagaccagccacgcgacttcccagaaggccgcaggcaacatcttaatagcagccaggaagccggaccggagcggaagggtgggcggggcttgcccgcatatttagcggcacccgaggccacgccccagatcggaagtgacggagacgtgctagcgcgtcgaaggtagctctatggttttcctcgcgttcttgagtcgggaaatggccgctgtgtggttgcaacggagataaattcccggaaccgcgattcggcgtgtcaggtaggcctcgcaatgtattcaagttactccaggggcagtgaagaccgaggacaggccatatttttgactcttttgtgggtggtgtcgggttggcggcgaaaggagaaccaaggagacgttgcgccgttatttatgcgttttttcgttagcttctctcaggttttcgaggcactacgggccgaaaaggccgggcgggggcgctgagcagtgctaacggcgggcgcgcgcgtgtttgcgaacctgcctggagacccacagcccgcgcggcctcccgtgcgcgtgcgcatatcttcctcttccacccttcccccatttcttcagcccgtacctctgcgcgcgcccgactgaacgctccgcgcacgcgcgctcgttcatttttctctcccccgcctatggcgccgacggccgctggaggtgcaacttgtgtccgcctctcattggctgggactgccacctttcttcgtggcctgtggggttttgagaaaataactgtgacccgcagcaaagtgcgttgagtaggtctaccccttttcgcgtggtctttaaaactgccctccggcttcagaccacccgtcagttaatgcctcgtttttgtgatgctactaggttttagtgctctgttctgcctctcgctgctgaccctggttctctggagttaatttcggtacccgcggcaacctgctgttttgaagcgagcgcgcgctgttgactggtgctggttgcctagttacggttccctagcgagaggattgggtcttagctggtggttctgagcgtggccctgccccatccggctgaaagtgcggttcttcatgagtactagcgaagccgagtcttttcaagtgattcagcccatttagtcgtgtcagaaatgttgcagccacgattggtggacagctggtgtgagaaatgggtgggagtggcgaattggactttgccttcattttaaatt

SEQ ID NO: 1231 - DNA, 6000 bp, Homo sapiens
tacaggcatgagccactgcgcctcatcccctgaagacaagattctatacctagactccaccaaatggctcctagaattgataaacaatgtcggtatagtttcaggatacaaaatcaatgtataaaaatcagtagcattttcatataccaataacgttcaagctgagagacaagtcaagaacacagttccatttataatagccacacacacacacacacacacgcacacaatctaggaatacatccaatcaaggaagtgaaagatccctacaaggagaattacaaaacactgttgaaggaaatcatagatgacacaaacaaacagaaaaatattccacgctgatggattggaagaatcaatcttgtttaaatggccacactgtccaaagcaatctacagattcaatggtattcctaagaaactaccaacatcattttccacagaattagaaaaactattctacaattcatatggaaccaaaaaggagcctgtagaacagcaggaaaaaataaaataaaataaaataaaaccccaaaagagcctgaatagctaaagccaaagccagaggcatcatattacctaacttcaaactgtactataaggcaacagtaacccaaacagcacggtactggtacaaaaacagacactcagactgatggaacggagtagagaactcagaaataaagccgtacacctaccgccatctgatcttcaacaaagtcgataaaaataagcaatggggaaggactccctgttcaataagtggtgctggctagccttatgcagaataaaactggacccctacccatcaccatatacaaaaattcactcaagatgggttaaagatttaaatgtaagacctcaaaccctaggaatcatagaagaaaacctaggaaataccattctagacatcggccttgggaaagaatttatgactaagtcctgaaaagcaatttgcagcaaaacgaaaaactgacagacgggacctaatctaaacagcttctgcacaaccaaagaaactatgaacagagtgtggtgttacgatatatattggttttcatctgtggtttctggcttgtaactcccataaccctcgttatagtcttctgttatgttgagtgtgttaggcctcagaggcaggcctctaattttttcctgctctccttttacctgctaacaaccccccacctttctgactgtgggtcttaagaccttcccaggagagggtcccattggatacacatggacataaagatggtaacaacagacactgcggacgggagggaaggagggagcaagggttgaaaaaccaactgttgggtgctctttctactacctgagtgacaagaacaatcgtaccctaaacttgagcatcatgcaatatatccatgtaacctgcacatgtacccccgaatctaaaataaaacttgaaattactttaaaaaaagcactattttgcacagctcagtgatttttaggaattcatgtgtgccttcacagtgggagtgactgtgctcctcccagagtattttcttcatgtacttcttcaaatacctcctacacttcagaaacttctccagattttctttatacccttcaaccaaaacaacatgctgcaacagcatgaatgtagaagcagaaatgagaatccactgtcatctattaagccagacattaaaaagatttgtgaaaatgcacaacggtgtcaccattctttttgttttgttttgcaaaataccgttatttttcattaaaaaaattcacttcagcctttcagctgcctaattcagatccacaaaaatcccacagccaaagggaaccctgactgtagactcaccctctggattcctgtcctttcttccagaatcttgccagctagttcctcattatctcataaccctatgctatggaacataaattacctaaaccgtgccttttaggtagagggagaatctctggaccagctagaagcagaatttcaacattgtattggggtttgggtgcctaacataaaaaacatatttaaagttaataaatcaaaaaagccagcaaagtaaaacaaaaaataaaaattgtgtatgaaaatggctctgaaaggatctggaaggaaagcacaaagtgagagggtataaaaagttacagctttggaaaatagcttgatatataatttcagattttgtatttctacagtaaaatgctacttgagcatttaggcgttttagttttccacacatgaacctcatcgatttccagagtttgtggttcttggtgaggatagcggggaggattatcttactcctacaaggttttggaggtttgacaagttgttgaaaatattaaaaggcacataactattactagctcagcaacattttgtttcagtataatcactgattcactacctattttactattgatattaattccaaaagctagtgtgggtcacatagattccattttacatgaagaatataaagtttccttactagaaatttacttctattattttatacacctttagaaaaatctaatgtcacattgattcattgatacagttgtgtagcggctaggtgtttttcctcatgactatttccttccttcctttaattattatttttttttaagatgggggtctcactatgttgtccaggctgatcttgaactcttgggctcaagcaatcctcccaccttggagaaaattaaagaactctttcctttaattctttttctttttctttttttagatggagtctcgctctgtcgcccagtctagagtgcagtgtcgccatctcggctcactgcaacctccacctcccgggttcaaacgattctcctgtctcagcctctcgagtagctgggattacaggcggctgccaccacgtccagctaatttttgtatttttagtagagacgggggtttcaccatgttggccaggctggtcttgaactcctgacctcaagtgatctgcccgcctcggcctcccaaagtgttgggattacaggcgtgagccactgcgcccagactttcctttaattctttactattcagctattttatccttccttcttacccagtttgaaatgtaattcatggctgggctgggtggttcacgcctgtaatcccagcactttgggaggccgacgcgggcatatcacctgaggtcaggagttagagaccagcctggccaacatggtgaaccccacacccctccccctcccgtctctactaaaaatacaaaattagcctggtgtggtggcgcatgcctgtaatcccagctattcgaaaggctgaggcaggggaatcgcttgaacccgggaggcagaggtcgcagggagtcgaaatcgcgccattgcactccagcccgggcaagaagagcgaaactccgtctcaaaaaaaaaaaaaagtaatttacattttcttctgcctttttcacaggactcactagtctcagttcctggagatgggaagtacaaaacctgtttctttactcagttgtaacttgcactggctttcctaacaattacagcattctggggttctctgggaacttacacatctgttctttgctccccaaataagcaggtactttttttgattgctcttaaacaatctgggtatttccctcccggcctcgcgtgatgcagtttaaaaaatagaataggtcacgttattcccctgtttcatcttgttgataatttgtggagtcgggtagagactccatcttctatcttaagtatctggcgcttgtgggggaattaagatcctaaatgagaatactaagtccttcggcagttggcactaatcaattactcattactgataacggaatgagccactggaaattttaaaaggaaaagtacatgggagaacctgatcaatttagccagccacttctggagtgccacagtcactaatgaagcaacctccagtgcaggccctggctccagggcgctatgtacaacctcctgcctcgcgcaacgtgggtctcccggagcctatcctgccagcgccgcgcacggtcccagtccaccaggccgccaaggcccggaggggggcgccctagtcgcggggaacactggaaatgcttcaggggcggactccgaagaccgagtattgcctcgagggactttctgcgccaccccgtaatcgcttgcgctccaggtcttcgtaggtgggggccgggtgggtgaagactgggaccctatgccacgcgcagcactcagaggagggctggggtcccagggccgcagcgcggtcagttcagtccgggctcgagcttcctagcagcgccctccttgggggctggccctgaccctcggtgccgctacgagtgggtggccagaagctggtggtggagagggagagcgtctgcaaggaacgacgaggctggcgccgggaccacgcggcggaggcgatcgaaagagaaacgaggccaggcaaggaggaggaaatccacccgatgaaggcgagctgccgcctaagagggaggagggtcctttcggctgccgctgctgctgttccgggacgccgcctggggagccagcccgctcgtaaggtgcgcgccaggtagctccgcacccagggggcgcccttcctggcccctcccagagcggccgggacggaaggagctgcgcggcgcggcgcggcgcggcgcggcgggtggcgagggcgggctgcaccccgagcgcggcgcccttgagctgcaccgcggcgcaggtttgcgagccgacttgtcagccggccaagaaaaggaagctccgtcccttcccgctcacccggcttccccaccccttgtactctaaactctgcagagggcgagcggcgcggccacggaggcgccgaggaggagcgagccgccgccgggcagcggcgtgccctcgggggagagggcgccggagaggaggcggcggcgcggcggcgagggcgcggcgcgcgatggcagctgcttagcccggcgggcgcggagcagccccgagctgtggctggccaggcggtgcggctgggcgggggacgccgccgccgttgctgcccggcccggagagatgagcacggaggcggacgagggcatcactttctctgtgccacccttcgccccctcgggcttctgcaccatccccgagggcggcatctgcaggaggggaggagcggcggcggtgggcgagggcgaggagcaccagctgccaccgccgccgccgggcagcttctggaacgtggagagcgccgctgcccctggcatcggttgtccggcggccacctcctcgagcagtgccacccgaggccggggcagctctgttggcgggggcagccgacggaccacggtggcatatgtgatcaacgaagcgagccaagggcaactggtggtggccgagagcgaggccctgcagagcttgcgggaggcgtgcgagacagtgggcgccaccctggaaaccctgcattttgggaaactcgactttggagaaaccaccgtgctggaccgcttttacaatgcaggtgcgtgtgtgacccctttcccatcccgcgcggtcgggacccgcgtttaatctggcggtcttcggggcatttcatttttctgggcgggaagcatttacttcttgccccactttgggggcagcgagcgccgctgcgtgactgctcctgtcgctcgccgctccggagagagcgtgtgtgcttgtgcaagagtctgtgtgtacttgtgcgatagacctatggatccacccaccgcccagcgctggagccctgggtccatgcgatcgacttgaactgttctccagcagtgtgagatatttgccccagtcagtctttctcctttcagtgtctcggtttcgcttctgtgaggtttggtccctgttttctttctgcatatacctgtgaccgttttagatgaggttctccttttctctgtgtagttttgagagtacgggaacgatgacataccatgcacgcagagtgtaactatattaatttgcatgccatgtgatgatcttcccaactcaccttacc

SEQ ID NO: 1232 - DNA, 6000 bp, Homo sapiens
atttcctcaaggcagaattttaagtcttttatccaggggtctttatcttgctttagaggaaccccagaataaagtagagctgcctttaacacacacacaattgtcctgaagcaaggaactgcagcagtttgtaggatctaacttactctaaaagaaggaaactgtgtaacttcaaaagtcatattaatttgtataaaataactggctctgccataaaaaatgcaatgcttttatttggtattccaataatatttttgcattgaaagttatcactgaattgatatatgatggaaaaaaaacatgataatatattgcgttacagaacactgaattgatttgccagcagtttgcaatctggctaaaggtattaccctccttagatttgcatttctaaaagtctccataatttagaatgctaaattacaggctggttatgttcactggtaaagtcattatctgaaaagaaaaatagaacaccttaaaaatacttacagccattcccaaacccatgccttcacccaaggtggccacttaatctggaaagtcgtcctcctcctttctgtcttgtgcaaaactgaagtcccacctcctcagagaagccttctactgccttctgtggctcaccctggcttcacaggtgtttactttatgtccccaaacaggagtgttgtccaacagtgagagttgtctatgtgcaatgaagtgtcaaataatgagctatgaatcctggtcctttttacaatacaatggcatcagtgacttgtatgagtatatatggaagacatgtccacaaaacaagcagcagcaataaggagcaaatgtcctaaaggaacaaagattgatggagatgctggcaggccagcatcatggtcattctagggatgacatatgacagcgataaaaacaattgtatcataagaaaagcactaatctacaatatgaactgcacaagtaatcacatctgtgaggttttagttaagcacaagtttactatgacggatatctgtgtagaccaacaaaaaaacatgcatacctggactctattactagaggtgtcatatctgctctgagggagacaaaagctctctctcttcaccactgctgaaatcacaccctgagtgctaggtttaattctgggcaccacatattatgagagaaattaaaatctaggagttgttcagagaagagccaagacattgacaaagaaactgaaaaagttaaaataacatgagatgttcagccagccaaagagaagaaatgccagagatgagtgatggaggaatgaaagaaaggtgatctccgcttaatgttagaagacttattatctgtcaatgatttcaaggggaaaaaatcataggatattatgctgagatagaataaggatgacagttttaaaaataagaccctctaaaaggaagagtgctcagagaccctctgagttattttgagactagacagattctcatgttcatttgacaagtgtttcttggaattttatcatgttccaggcactgggtactgtgcacacagtggtgagaggtaacatgtgacacttttgtcaacatctaatttacattgcagtgggagtggatacaaattattcagaataaatatataattaaaattgtgagaaaagttttgaaggaaagacatacagggctttgaggatgtgtaacgggaacttaatctagttgggggctttctgtggaagtgaagttttgctgaggtcaaggggtcagtaggtgttcatcaggtcagaggagcaggactgggtgggtgaggtcgaagaatcctgggttgacgtttactgtgtattcacagtcactgttaatttacataagatactcttggttttctggatcatggctattggttctaactcaggctatgctattattaaggactctcaatggtccacacctatcacgtgatctcatcaatgttcaatgtgaaaaataaggccctgcatctttgccaaatggttgacagtgggagcatttgccacatccagaggaaactcaatcactccatatctactggagggtacttcatccatggactcaactggacagccacaagagaaccatgtcaaaggcccaatggtcctacagagatgcccagaacggtggcagggagatcatgtcactgcagcttgggagataactaggagtagtttgggtgtttacaaggaccaaagaagggaagaaaggagacatttggatacatccataaactcttacgagtgcttactgtgatgaatagcactatctctgctgtcaggctgcctaggttgaagcctggctttgccactccgtgactgcatggtcttgggcaagttacttaacttcgttgtgcctcagtcccttgtgtaaatgaaggagatgctggtacatgcctcataaggtagatgtgaaacacccactgggacatagtaaactccagcagatgtttgttagctgctattattattattactattactttctaccaatttttatttttaaaattatttatttatatatttttgttggtaacagtcattggttttataaccataaccccaaattagaaaaataaaacctttttgtttatggtgatagtttcatgggtatgtacttatcttcaaattcgtcaagttgtatatattaaatatcacttttttgtatgtcagtcaagcctcaattaaaaaaaaactttctgtaggtgcaatttacatttttgccaagtgctcagtgctcaggcgcaatccctacattgtccagcagggggaactatccaactgcctactgttctctatgagccatcattttatgaatatggctaggatgaatgattgcattgtctcaaataacttagtcacttacagttggtattcacctatagaatttgccctttagaaacatggacattcccctctttcaatgttcaaaagtggaaaacctatatgaaaaatcatcatcatcatcatcaacccttactatatgcaggaactatcttgagcactttagatgaatttgctcttttaacaatcattaaaacactgaggttagcactgtctgtcttacagatgaggaaatggaggcacaaaaaactgaactaacctgcccagtgtcacacagcgaatatgagaaagcgtgtaaacctgaaccatccggttccagagtctgtaccacatgttgggtatattattgttggaaacccaccagggtcaatgtggtctcttccagaaattgtgaagagctaatctctttgtgttcacctcggcattaatgagctcttttcctcaagcccatcggaaatggtttcattgaataacgaaaataaattatatatatcaagtccaaaattatccagagatattaagatgcctgcaaaactctcattttgtctgaagccactttgcttctggtcagtatttgacttataagaatttttttttctcacaaatatattatacatagctaattaaacaaatatcttcattacttttgaaaaccctgagaacataaatatcaccattttcttcacacagcttccacgatacaaaattaacttttggcagaacaccctcttgtgttctttgaaagtgaaaatattttcctgtaataaaaatatatgacgtggtttatgtaaaacttgaattatgtaaaatgaaggctagggaaattatttcatgtattttcagatactttctccatgcttttattcgtcctcaagaattgccagaaaatggcataagtcaaaagagtattctgtttctattgagaatatcaaattggaatacaatttaaaatatttttaagtagttcccacttttatattaaattaacagaaaaaataggggattcagaagaaatctttggaggtacagggttaagacatgacccccatacgatgtttcagtgattttcccaaggccaccgaggtgcctgacactgagaactcctttgtcctcagcggcacacctggctgccaccccacccttcctgtcacatcttaggagtcagaactgcgacgggagctagcccaggacaccgaaggggggatcctaaatgcaggttgcatgctgacgtatgatttttatttggaaaaacctcaaaatagtaaatgaagagtagagagagtgcagtttaaataggtagagattcgtgataggaagtggactgcagcagaggcgacatgaaattatctggggaagccagatgaagcctttccgaaaggaagcgagcatttgttaaattacatgttcattcatcaaattcactgagctccccttgagatccaaacacggtgccggacactaaggatacacagataaattcagcatcgcctccgctttccaaaatctggcaacccagcaggaaagaacagcatgcaaagagataagagtacccggggagccacggtccaaggtgcaaaggcggagcctaggaggaagggatcacctgtgtcagcaggggtcagggacgggcttctgggtttgggtgcacgcgtccaaaggagtgcagcctttatccacaggtgcaattagaacacccatctcacactgctgaaaactcagatatggcactgctgaccaccgccccacgatgcgacatcaggggtcagatattaggctggcgctgtgcagataaacaagtgtatatgttggtgcgccaggaagacaaaacacgcgcctggagaggccaggagagcgggactggagggttgtgggacgcgcgggaccctcgggccgccttccgccgccgcccggtgtcaccagaacccagcctgtttaccagcggccccgcccgccccggcccggcagggcaggtcggggcgggcgcgctctgagtcaccggaatctaggtggggccgcccggagcggcgtcctcgggagccgcctccccgcggcctcttcgcttttgtggcggcgcccgcgctcgcaggccactctctgctgtcgcccgtcccgcgcgctcctccgacccgctccgctccgctccgctcggccccgcgccgcccgtcaacatgatccgctgcggcctggcctgcgagcgctgccgctggatcctgcccctgctcctactcagcgccatcgccttcgacatcatcgcgctggccggccgcggctggttgcagtctagcgaccacggccagacgtcctcgctgtggtggaaatgctcccaagagggcggcggcagcgggtcctacgaggagggctgtcagagcctcatggagtacggtgagtgcccgccgccgccgccgtcgccgcctccaggaagccctcggggccgcggcctgcaaaagccgccgcgcgtgatgggccctcacagggtcgggggagccagtgcttttcagaatgcctgtttaggacgagctcgggctcatgcatccgacctgaaccaaatgcagcagcagtagctttgggtggccaacaccaagctcagaaacagaaaaaaaaaaaaggccgtagttcaaactgtatagtttttttcctgggttttgtcggttacgtacgaaagattatttcaagcattgcaagtttagatgagtaaatataatgaacaaagtttcttggagacctgaaatttcttcccatttctcttccttctcgtttcttcttatgattaaaatataaatattgaaataacgtgccttccctaatatcagtggattcgttcaacttgatatagctgaaaaaactttctcatttaaaaaagccctttcaggcagttttagcagttaacgttttcaatagatatttcagtctactttaccggtcaggctagttcttgttagctcttgttctagggcgtgtcctttggtttaagcatggcattgttgtttagaaaacttaattattttaatccgatttgaaatctaaaaagcaaacacattccctacactcgcgacgtgaagcagagttgacaaatttaatgtacctagcaggtgaagtactgtatgccattttcccagcatggaggaagctccctgcttgccttgctgaaagtcaggact

SEQ ID NO: 1233 - DNA, 6000 bp, Homo sapiens
agaacaatgaatgtgagaggtgggaaggatgatttggtgcatctctgttttatccatggtgagtctggacctcagagcagaaggaccctcgtctctcctctggggagtcctggtgccaactcagtgcaggctgctaagttatccgggtctgactgtcttcttctctgctaaaatttgtcttaagcatgtaacacagccatgcttattaatgatgaggagacagccaatgaaaattaattttttcaaagatgaatagatatctagattttttcaagcacaactcatttaagaaaatatcacctcactgagccccaaatgagttaggtctcacttagaaagtgtcccctagtgccaggtaaagtgcctcatatttgcaatcccagcacttctggagacggagataggaggatctcatgagcccaggagttcaagaccagcctgggtaacatggcaaaaccctgtctctacagaaaatacaaaaaaaaaaaaaatagctgggcgtggtggcgtgcacctgtggtcccagctactctggagtctgaggtgggagaatcgcttgaatccaggaggttaaggctacagtgagctgtgtttgcaccaccgcactccagcctgggtgacagagccagcctctgtttccaaaaaaaaaaaagaaagaaaggaaaagaaaatgcccccgagttgattacattttaaccactgtgctaacttgagagatagtctgctatctctttacaggacatgagggctgataatcacctcattgcatggtcctggggactgatgaacaaaggctaacatgtggaaaagggcaactaaagaaagaagagccacctccaggttaattagtacaagtctcctcgctggtatgccctaatacactaaaacagcagtaaaaacaatctgcacattggcatcgaaggcacagataaacttgccgaggacccttaccacggcagagggatgctttatatgagtccttagtagattaattaagttcttgctagttccatttggaaatgatgctgtcctcttggggctatgcagagaagttcatgttgatgaaatgagctgtcctagaatggcagttcccgggcagcagagcctgggctcaaggaaggttgaaagaaggggtggcgtggagctgccaggtgcaaatgtcaggccagcaatgcagtccagcttgcatggacgtgcttcgcctaggaagttgtgacttggctgcattttccacttcaggtgagatggaaggttgaactctacctcacctcctggtgaggttgatgtttcctggtgtttataactttctttgtaaatacttgaaaggaatttaccattttaatgctggaagagacgtctattccttcttaagaggacctgagtggatcttgattgcaggccttatgctgggcagagctaaggagaattcaatttgtctccaatcttatttgaatgttctttttttttttttttttttttttttttttgagacagagtcttgctctctcacccaggctggagtgcaatggcacgatctcggctcactgcaacctctgcctgctgggttcaagcaattctcccacctcagcctccccagtatctgggacgacaggagcatgccaccatgccctgctaatttttggtatttttagtagagatggggtttcaccatgctggccaggctggtctcaaactcctgacctcgtgatccacctgccttggcctcccaaagtactgggattacaggcatgagccaccgcgcccagcctatttgaacgttcctatgcctgctacaagtgcagcagcagaatctccacacatcttgcgtgcgaaagtttcctgtagttcctttagcatagagaggctggggaaggttagagactgacttgtactctttagacatatagttgatcattgaacaacacacgtctgaactgttacacacagatttttttcaataaatgtgttagaaaatgttttggagttttgcaacaatttgaaaaaactcaaagacaaaccatccagctagaaatatcaacaaaaatagaaaaagttaagtatgtcatgaatgcataaaatatatgtagatacctagtctattttattctttactaccataaaatataacaaaactattgcaaaagttaaaatttagtaaaaattgtgtacacactcacagatcgtatatggtgctattctcagttgagagaagtgtatacaaacatcaagatgcagtattaaattgtaactgcataaatttaaccgtagtgcataccacactatggtaataatttcatatcctcctcctgttgctgttgcaatgagcaaaggtgttgcgagtatccacttaaaacgttctgtgatactcaacattccatcatgagcagttcatccccagtgaattgcgcatcacagtaaaaagtgctctctccctgttcgcatgtatttttcgtcctgtttcgtgctgtactgtaaaccttgaataacaccatgggatccaatatgaagtggcactagtgatgctggaagtgctcccaagaagcagagaaaagtcatgacatttgacattacaagaaaaactggatttgcttgatatgtaacagagactgaggtctgtagctggggttgcttccatttcagacagatgattcatcttgtaaacaggtggtgtaaacttactgtatggaaaaatacataacagtaccacagatgtattttctccttacgaacatttccttttctctagcttactttattgtaagaatacagtatatcatacatataacatacaaaatacatgttattaactgttgctggtcaacagcaggctgttagtagttaagtttttgagagtcagagttatacctggattttctactgtgtatggtcagtgtgccaacccctgaaattgatcaagggtcaactgtaatcctaaaagaatctaatacaatattgtaaacagtaagtggtcaataaataaggaattgaactaataagaatacataaatcccagaatatgtgcaacctgatcatagtacacagagatctctctatatatctcttttcttagttcatgctgttctttcaggtagaaagcgccttattttgaattagttgtctttagagcaaaaatccctccaagagtgctgtgtggtttcctatgcacaacctggaatagtccattgcttcatgcctaccctggacatgaagggccatgccgcagcggaagtctctatgcacccacccccgtctatacctgagcaacacattcctctttgctgctctcttacaggctacagagtgcggtggcgccagcacagagctctgctcaacgtccctctgtgctttcacgatgctgatggattatgaaggtagggaagaatgtacagccaggaggccattaggagggcaactaatttataaaatcacatttgtagaatttaatgcatccaacaactaccaggggaaaggtgggcaaaagctataccaacaccacccaagtcaaaaccaaaacaacaggaaaagaaaattatgtggatgtagaatttctgataacatcattcccaaggtgccttatccaagaggaactgctacaataatattttaagtggaaataaatacatgctggaagcattatatattagtagagtatttttttttcccagagtactttctcaagcacatcaacatgagccccctaagagacatttcacattaaaaataaaatgtctgcccactgctggtttctcaatctgcctccaccttctgtcccctttaatgaactgggccatgaggtgagtcagagaggataaagggagtggtaagaatttgaggagagaagagagtgaggctaaaataggaaatcaggaaaagcgattcggtccccctgtccctcacatggggccaccctcttgttgcccagtgtggcttcttcttgagggttctgcatggttcctcaatcccagggaattccgcaggacattccacccaagaccattgggctcccacctctactcttttgccagttaatgaataggcaggaatttcactgcctggaaagaggaacaatgctttctggtccttatttcacatctaaaatagagaggtcaattgatttattcctaaatatctttgaacactaaaatagaagttttacagcatatatactacctggttgctctagacttaagccagggaaaagtacagattcaacatttaaaattgagatagacgctttccacttaatgctaccagtcttgctttatttcatgagaatgagaatataataatatggcatacgttcatttgggggaaagattgatgtcttataacataatttataattacagaaaacatgtgagttcactgggaataaataaattttgaagataataagatactttcacttatgtcgtaatttctatgtcatttggtgtaggatgtagagatattaacgtttacacctaacttaagtttgtcatctaagacctgaaggggttttgtctatcagctgcacccctgggtagagacacaaccttggggaaggcctcagccccatccctcgtacagcaggaatgagaacagccctgcctgttgggaagcttgagggaggctatggacgtgcagcgcttggcagagggtctcgtcatggaaggttccagcaaatgtgagatacttttatgatttcattttctccaaaagaaagggaataagagaagaggggaggaaataagactaattgcgagagataaagtacaagggtgagggaaggaataaggagacatgacggcagcgtggagcagccgaggggggagattgctttcaccacttcccagcatctattgcagattccaccctcaaacatgttgtaaggactctttattcaaggtaatgtttgaaccctgctgagccagtggcatgggtctctgagagaatcattaacttaatttgactatctggtttgtggatgcgtttactctcatgtaagtcaacaacatcctgggattgggacccactttctgggcactgctggccagtcccaaaatggaacataaggaagtggttcttctacttcttttatttctgaaatcaggtaagacatagtttttttaaattataagaattattttttctcccacaatgtagtaaaaatacatatgccatggctttatgtgcaattcatttaatttttgattcatgaaacttccagttgaaaatcttgtataagattgaggaattcttcaagaaataagtttaagtttcctgtgaagattgtcagggtgctggaatgaatgggcagagaaaataatgggtgatttttcaaatctaaatgagtgcacccacataatggccagtctaattgaaaaagagccaatgtagctaattatgcaaaggacggctaagctctttgcctggttctcagtttgactaatttatatcatctctgttacggtgtcatgctcccctcacttgcaagttaaaacagtgaaatatctctttgaatatattccgttctctcaccagttcatggtggcggcagggtcggggactcagcatttctccctttgttatggcctgaggaaggctttccatcagtatacgtttgcctcttatccccggaaaaatcacacgcatccatttgccagatgctgtgtgcagatagtgatcaacaaatactcagttgcttgggttaggtccctacatttttacacatacatacatacctgtgtgtgaatgtgagtgtgagtgtgtatcctttacaaatactagcttatttagctcgtggtataggtagggtagcatattcatcctcattttataaacaaagaaatcagacttaggaatatcatgttatttgctcagtgaccaaattctcagatctgggaaataaagaaaactggatttaagccaggtttcccagaaggaatctagggctcttctcacttttcagctttgtttaagcctttgaaagaatattctaaacatgtcctagtacttctt

SEQ ID NO: 1234 - DNA, 6000 bp, Homo sapiens
aaggaggcagatacataagtgtacattctgtatgagcccatttatatcaggtttgaggagaggtaaaactaatctttagtgaaggaaaccaatagtatttccctctggcagtgggaagagggtagcaggaattgaatgagcagtgacacagggtgtttctagagtaatggaagtgttctgtatcatatgggagtgtggtttacacaagtataggtgatcatcaaaactcaccaaacaacatttaagatctgtgcatttcacactatgtaaaagtatacctcaactgaagagagtggaaatctgtttcaaatgctcagccttttaacacatccagttgcttagactatgaacttcctcaaatggggtgtctgggcttgagattagatcacatgtgtagagtcgctagagagacaatgttgcattcccatggtacataatacatttcccgttttctcagacagccacaggtcatgaatgtgaggattctgagaggttggagcaacattcttgggaggcatgagggggagcacattctccaagatcccccccagcccggggtcctcgcctgctttgactattactccgttgttttcggactcctccgtagctgcccgacctcttcagatcccatagtctccctttatatcttgagtcccactgttcttccaactcatcccccattccctcagacctggagtggcagtggccagcagaggatggattgagagcaggagaggatgtcctgcccaggaacccatcctagagaaatggcatcctgcctgggagctagtttcccagggtggctttgatacgtcttgcagaaacaaacccacttgacacacctgatacggtattgacagtaacactatttttcgtggttgtttttcatagtaaaagtagatccctttagttacactgtgagtacttagagtaaggtgactggcctgggaatgataccatcttggatgtcattttctccttggagaaatgtattttagttccaatgcacatttcacaatacagtcctatagagagaaatacagagagctagacagttagagatatacttttatgtgcataaaaatataaaatatgcactttaaaatctgtacctgttattcctgagaaatgtatttggcagaaggtgggagggggatattctgatccttttatttacatgtttatgtatgatctgagtttttatatggagcatatactacttttgattttttaaagaaaaattaaaatctgtctttgaaatgtacacagttgtttagaagttgaggaccatttttgtttgttacaacattattgtacctataatgggaatatttcaaagccacttgttaacactttgttagaacaaaatgtagagggtgctgggtgcccctgaatattctcccacctcttgtgacctgtattgttttggaatttccagtggcctgacaatgaactactgcaggaatccagatgccgataaaggcccctggtgttttaccacagaccccagcgtcaggtgggagtactgcaacctgaaaaaatgctcaggaacagaagcgagtgttgtagcacctccgcctgttgtcctgcttccagatgtagagactccttccgaagaaggtaagaaatctgtggctggacatctacacacttggacgctgggatgaaaagccatggaaaatctcactgatgcagaaaccttccatgctacacgagaaatcaagtgtttttagagggtctgccatgtggaaggaagcctcagtgcactctctcaaggaggcagaggtgtgacttttggcacaacgtgagtgggctgtgcctttaggacaggtgcaaaccctccaaggtgctcaacttaaccactcaccttgttctaaaatgggttatctcagtatcccagtccaaattcgtattctatcatgctgccatatgtgtgattctttccaagccagtaagcatctccagtaatttcttaaggtaggcagcgttcattgcagtcttcagcattgcagtttctgaggaatgtggcccctgattctgtcatcctagagaaacctgacatgactgtattgattccatatcatcctgggtctctgtggctcttcataatcatccattttttccctgtacagactgtatgtttgggaatgggaaaggataccgaggcaagagggcgaccactgttactgggacgccatgccaggactgggctgcccaggagccccatagacacagcattttcactccagagacaaatccacgggcgggtctggaaaaaaatgtaagccactttgatttggactctttggccttttgctcaccaatctttgcaaacagaattggttctgtgttacagaaaatctgacctggactgctcttttttgtaatgggggagaggggacagaagaaaatattggaaaggcatcagggggctaagctagaatataattggccttagtatggaaagtacaagcagcacaggccaggaaacctccacacatgtgagggttctcaggcctcttccctttagtgacatttctttaaagtttccattattggggactgtctctagtttctagtgtttgtatgctaggttccagtaatcaaagatgccctttatgaaatttaagtcagatttttcgagaaaaaatttggatgggccatcaggtcaccatgggacttcccttagcctcatgcattctctgcgatggtttactttggggcctatgaatagggaagactgagatataggaaaaaccaaagtgtctgtgttcccccactctcacacccatgcagcataacacttctcacaccagatgtggggggatttctcctcacaccccaagcgagtctccagcagataccagctgggtgtcctacaatgtaactcagtgctgacactctatctggagacagtgtcagatcccataagttaaggctcagtcccacaagaccgccccactgcagatgccaatcccaagttccaggcggtgacctgtacttctgcccaactggacaaaaatctgtttttctacttgattactttgctagagtggctcacagaactcaggggaacacgttacttttatttacccatttgttataaaagatattacaaaggatcctggtgaacagccagacagaagagatgcacggggcaaggcatgtgagaaggggctcagagtttccatgccctctccagtgcaccagcccccggtaccccaagtgttcagcaacccagaagctctccaagtgcagtcttgctgggtttttatggaggcttcattacagaggcacagttgaatacatcgttggccattggagaccagctcaccttcagctcctgttccctccctggaagttggacgtggggggctgaacagttccaaccctgcaatcacatggttggttcctttggcaaccagccccatcctgagactatccaagaacccaccaagagttgcttcattcaaacaaaagatgctcccttcactcaggaacccccaagggatttaggagctccgtgtcaggaactggggggcagagaccaaatatacgtttcttattctaccacagtgtcatatgaaggggaggacaacactgcctttctgtgtcttgccccatagagggcgcacaatgcatggaaataaatgtttctgaatcaacagcaaacaggcttcatcgggtaggagagcgctgagccctccagggacaatgcacatcaatgatgtcccactgtcctttggtgctggggctctaaggcctccactgggtcaggctcctgaagggagacccattctccaaagacccccgagggtcaccactccctgtccaggggtgtggcctcatagctccttttgaacaggggcacaggaaggacggctttagagcattcaaaaaataactttgccaaaataataataataataatagaaaggaagaagaggctgagcatggtggctcacacctgtaatccctacactttgggaggctgagacaagcagatcacctgaggtcaggagttcgagactagcctggccaaaatggtgaaacctcatctctactgaaaatagaaaaaaaaattagccaggtgtggtggcgtgcacctgcagttgcagctactcaggaggctgaagcaggagaatcgcttgaacccaggagatggaggttgcagtgagctgagatcatgccactgcactccagcctgggcgacaagagcaaaactccacctcagaaaaaaaaaaaaaaaaaaaaaagaaggaaggaaaaagaaacactcctttatgtcttctaaggatagacatgaaatgcgtgagccttggaacaccttctccctctcctgccccacgtgagctggagcttacatgccttcttgttttcagtactgccgtaaccctgatggtgatgtaggtggtccctggtgctacacgacaaatccaagaaaactttacgactactgtgatgtccctcagtgtggtaggttgccttctttttggtaaggaaactgcttacttaatatggatttgcaacaaaaaaggaaaagggcttctgagcagactgcttctggggaggagatagctgccctctccatcagaccccactcttcatcatgggcatcttgaatctgccctactattggccacatttgttagaggaacacctgcccatcgccccaggcacacataaataaaataaatgtaaaattcccaaagagcaagcttagaggtaatctagtcagccccaggatggtcccactgaatgctgccatgtctagcgtgggatgcatgaaaaatttagagtcattcggatgaaaaactttccctttccacagctgagaagtaagaaagaaaatacaaacagcaggaaacaggtaagcatgtaacgcacattgtaaacctcagatggccatcctaggaattcaatgaaaggtagtgcagctctttagccccagatggcctttcttataagtttactactcacaagtcacattagtgacatagcttagagactgcttgttgggttccatcctcattgctctgagactcttgttgggagtatgaggcttggatcaggggaaggggagttgacattagttcttaaagaattggaataacaaatccatgggtatttctgaaaaaaaaaaaaaaaaaaagaaaggaagctacttggaattgtcccatatttaacattctgctgaccaatcaatttgtcctagttacagaaaaccaccctggacttctcctatgcataatttggttgcttgtggttgggtctgccatgtggagggaccttgagctgggggaaggagcttggcctccaagtccactgaagaccagcatcctgagattgcctgggaaggtggtacagggcagtgatgaagatcatgggagccacactgcccagcttcgcatttgggcttctcctagggacaccaagagggaggaaggaggggttaggatggtatgaaagattctacttggccaatattattgtaatgcggcattgtgatctctggatttagcatgagttgatagctgactttttctgcagaagcatcttggtggcacctctaactcaaagtccctcgatggagtcagttccagttctccacttctggccccatctggtacacaccactgcctctcactgcccgggctctctatccttgacaggctgccttgaagttgagcccagactgattttcttgcctcagaccccactaccgtgcctgggactcatgcacctttgactcccatggaagggaagtgcagtagtttcccaggtgcaattctggtgtcctcacccacattgaggatgtacaagaatcaggttcttagagattggagaaagaaggaagaatgggaacaagatttttcccaaaggactgtgaggtcccccacctaaccttgatgtgagacaagtgaggttaaccccaagcctggtgagaagcgttcccatcagacacttggaaatcctgaggactgtttcatgcagaaggat

SEQ ID NO: 1235 - DNA, 6000 bp, Homo sapiens
gtcctgcaaccgctcccgtcagacgcgtttccgcctcctgtcctccggaaaggtgcccgcctcttgccttccggcccggcgcccgatttccgccttccgacccagctgtgggctgcgccccacgccagcccgcgccccgcatggctgccgccggggccaggcctgtggagctgggcttcgccgagtcggcgccggcgtggcgactgcgcagcgagcagttccccagcaaggtgggcgggcggccggcatggctgggcgcggccgggctgccggggccccaggccctggcctgcgagctgtgcggccgcccgctctccttcctgctgcaggtgtatgcgccgctgcctggccgcccggacgccttccaccgctgcatcttcctcttctgctgccgcgagcagccgtgctgtgccggcctgcgaggtgagccgccaaacggggtcgggacggggccatgcctccgacgcgtgcgcggcgttaattccgggagcgaccagggggacggcggcaagcaccgctgccgccccagcctcagagctccctctccgcgctgccccaggagcaccttctcccgggcccttccaggatgtgctcatttttgctacataagcttctaactgtgcccacgcgcattggtaacccccagcttttaatcagtgggtaccaggtatggtgttaattcagataatagaaattgtcttggaaagatggatcccagtagctttttcgtatttttggcagtcgttcttaacgatcagtcttattaatttgattaactcaaaccacctctaggaggcaactcagttgcgtgtaccggacgaaatctagtttctggattttaaaagcttattcctgaaagcaaaaactttcatttcttttttgttgttgttattttcagttttacgtgcagaggataaaatatgtgaattgctgttttgtttgaagataaaacttttctctgtattcttttttagtttttaggaatcaactacccaggaaaaacgatttttactcatatgagccaccttctgagaatcctcccccagaaacaggagaatcagtgtgtctccagcttaagtctggtgctcatctctgcagggtttgtggctgtttaggccccaaaacgtgctccagatgccacaaagcatattactgcagcaaggagcatcagaccctagactggagattgggacataagcaggcttgtgcacaaccaggtgggtaatcttttttttaagtctcagttcagtttcatcgcctttgtcaacccagatatttccaggacaactttaaaggtaaaattaggaaaggtatagtactttaaaatttttcatgcctggaacacctttgtaaaaaaaaaaaaaaggctgtgaagtctgaatcactgaataatgtcaccatataggcatttaatttatgaccctttatctaaaatgccagaactatagggaatatagtactttagagacagcaaattattagactgtcttcaaaactaaatgattactaatagtgctgtcctttttgtttcagatcatctggaccatataattccagaccacaacttcctttttccagaatttgaaattgtaatagaaacagaagatgagattatgcctgaggttgtggaaaaggaagattactcagagattatagggagcatgggtaagcagtttcaggacttcattcattaagtggttaaacataatacttggaagaaagggctccatgtgcctagaagagaggtactgagaggaagactcactttggaggctgtagcatacaattttcagatattgcctcaggtaaaaatatacttcctggactttgttttctgacacataagaggtgtgttctgctccctgtaaagacaagggtgggtatccagatggtcccatgagtagggctgcacaagatgctggaggcttggtaagttcctctgggtcgcagatcggtttctcgggtcgggatagtgtgagtgcctagcacagtgtcgggcacgcagaagggccccttaaaagtttctctttcatctggccagttttagatacacaattttgtcagtttacttacagtgcatactcttgggtagtacttgtgctgaccaagtatcttagaggcttattttattatagtagccaacatttatccagcacttaccttatataaagggctgtttgtgcatgagctcattaaaatcgtgacagcagaccaatgagtgagaaactgccccattttgaaggtgaggaaattgaggttctgggtataactttctttggtcacataatattaaattttacaatttgagccttgagccatacacaaaaccaccacaaaattagatttatagactcaaaatgaaaacatcagcttactggtttgtagttcataccagtcatacattccaaaacatgttttgagtcttactctgtgcctgaccttgtgcttgataacagggatataatgggaagcaacactccagtggtcagatgctcacagtcttatggaggagcccaaataatatctggggaagttaaagtccatataatgactgataagagtacaatacaggtgccatgggaacacgtgacatcactgaagactgcctggaaggggccgcgcgtgtgttcatgcctatacgataaacatgatacataatgaaaatgcttatctttaggagaaaggagagcctagagtagcaggatcaaggatgaaagctggacttcaaatatgccttgttagtgtaaatgtgactgtggaactgtatgagtattttaagattatggagtaaagtaagttttaaaaagcagtccctaatcatcaaaagtaaaaaactcttgatgtagtcatataaccacactaagaactcttccaggtgacttcaaaacataggacagtacatctctagtagaatatgccctgagaatgaaaagaatgtaacagtgttagtattttgaataaacatgttattactagactgttgcttttattttgagatggttgtgtgtgtattggggggaaaggaaacgagtaattatgttggtgttactgagaactgagatgttgggcgtaggaggaagataatgttgattgtgtctacgtaccatttctctctaaaaggaactccaggctctttggagaggtggttgattccagaactaggtcaggaaacgttcatataatgtgggaacatggtcatatcaaagattaaggataaggattactagggccatgtcagaactcaagcaacatgaaaaggctcctgcttgcaaaagatggacagtttgaacatccacaaggacgctaactgcatcagatatgtttaatgggttcaaaatgatactttaaaaaaactcagtaatcatctttataggatacttgggaacagactcattttcaaattggtaaataaaaggaaagagtttgccttcgaggggtacataacttaattatgaatgaagtgatatgtgtggaatttacttcagagtaatggaggtggaagtggcagagaaaggaaacactggacttgatagtgttgaaactgattaatgatatgtggcggttcattatagtatttccacttttctgtatgtccaaaattttctaaaataaaaggagaattgaatagaaaaatgcttcctggaggtagctgtgtcttacctgagacttggcaggaggcagtagggcctgagggaacagcatttacagtgtcctaacggttatactgaaactttccacgtatacttgatggaacatcaatctgaaggcatcctacacttcctccatcagacctgatggtgcaagtgaacaccatcagtgcctttccagtttcatcaaagcagttattttagcttctctgacccaaggtatatcagttctattttaacgtacattacaaagactaatggttatacttagagacacgggtctgttggggacagcagtggcttagggtggctgtaatcccaggaaggaatgtggagaaggaaatgaacatttttttttttgagacggagtctcactctgtcgcccaggctggagtgcaatgtcaccatctcggttcactgcagcctctgcctcccaggttcaagtgactctcctgcctcagcctcccgagtagctgggattacaggcacctaccaccacgtctggctaatttttatatttttagtagatacgggatttcaccatgttggccaggctggtcttgaactcctgacctcaggtgatctgcccgcctcggcctcccaaagtactgggattacaggcgtgagccactgctccaggccagaaatgaacacttgatgactgagtgagtgagcctaccagctgaggatactaatgataagggctcacatttgttgggtgtcctgtgatgtgctgggcagtcctaagcccttgaccattctgttattttgaagctttaaggagatgcactaaatggaagtccatataatagagttggatggagtacctggaaattcagatggtccaacttgaatgagtgaataaatagggaaagctatctgattaaaagtgggtcccctctccatgtgtgaattgtcaagttgtggggattactcctgtttttcataatagttacgttgatttttcaggtgaagcacttgaggaagaactggattccatggcaaaacatgaatccagggaagataaaatttttcagaagtttaaaactcagatagcccttgaaccagaacaggtaaagtggagctcatagctcctcatcgtgttctcttcaggccatgttttatgagtataatctgtaagaaataacttcatagtaacattagtctgttccttaggagcctataaaagcaggcttttgttatcttgttagaggagttcctcacacagatgggccatgtagaaaggtgttttgcagtgctgatccatttaatagttactaaaagactaaaggttatactgtttatcatacagggttcattttctaaagcaagcatcagggatgggagatgaatgagatgttgcctaaggtacatgaggtttaggcaccattggcccccccgccagaaagaaaaaaggttatttttgcccatttccaacaggtaactttggcttgtaaaatgtgacatgttaacatttttctccttaacctcccctaccataaacgtaaatcacgaaagaaaactaaactcccataaaccagtcactggttcaaataaatacacaggaagaatagatctaggtcttaaacactaaggcagtttttagcaatgcatatgcttttagacaaaatacagaaaaccactcagttgctgtaggaagcttattacagtgaaatttacttatgtttgtagtagttttcaaaacactatgtttcacttggtatttgtccctcctaaaattttttaactatgaaggtaggcacagactctgggcagaattctgcaattagagcagaggctcattcttagtcccttcacaatatattcataggattaagttgccaacattaggtagtaaaagcatcatctgggagatatattttgatgccctctgagtcagataaactgaaataatcactttgaggtgattgagaaggcattagtggcacactggtacagccaggtctgatgggggaactgtgacatgccttttgggtcagtgctacatcaagagtaggaacattcatggagtagatagcatgttaccattggcaacttataggtaaggtattgattatttgaacatgatcttcattgattttagattcttagatatggcagaggtattgcccccatctggatttctggtgaaaatattcctcaagaaaaggatattccagattgcccctgtggtgccaagagaatattggaattccaggtatgaccttaaataaggaccatttagtgtgtaatcaccatgattgtttttaaacattaaaaacttcaccaaggtaatttgtgcacatgggtcaacatggcagtatggaagggtaccctataatgaaaatcatca

SEQ ID NO: 1236 - DNA, 6000 bp, Homo sapiens
cttaaccatttttatgtgtacaattcagtactattaagtccagtaagtcctcatttatcatggatagattcttggaaactgtgactttaagcaacactactggtaataaaaccaatttgccatgggatgattgatataaacaagagttaagttcttgtaacatatttctggtcacaaaaacatcaacaaacgtctaaataaagaccccaaatatttctcattttaaacattgaaataaatgtgagctatacatttaagaaagattgataaaaacaagataattttttttggagatggagtcttgctctgttgcccaggctggagtgcagcggtgcgatctcggctcactgcaacctccacctcccaagttcaagtgattctcctgcctcagcctcccaagtagctgggagtacaggtgcgcaccaccatgcctggctattttttgtatttttagtagagacagggtttcaccatgttggtcaggctatctgcagcttttaacaattgagtaacacatactcctatgaacaaaatttggagcacatttggttctctctacccgatttctccagaatttggaaactgtaagtattcttaacttatgacaatacagttatttgcataagtgcactaataatctgttttcatttgtaacaggacacaattggggaaactggttgtttaccaatgcttttacttgacttacggagccaattaaacccccttggaaaaaccgtcctcataactttgtctacacagctcctgtacagggttcctgacctgtggtaagtaaagaatgtcactttctgacaggcccaggagcctcaagtttatcttggaacctcaagaggagaggatcaccaaactcacaggtatttgatggcacaaatccatggctgggctcagcttttaaaaagtcttatctgaaataccctctatggaacaaagttccatcaaagccaatttaaaagccaatgttaaaaaataattattcttgctgcactgtatacaaataattcggccaaatataataaggcaaacctatcatgatttgtctttagtataaatgggaaactagagactggaaaactatagtccaccagttgttagattctagtcttgcctaatgtttttcaatttttatcattttctacagtttggaccaaattctaatttttgtgggctacaagtcttcaaaataatgttttcaatttttttccttctttttttccccatttttcctaatttggagtcacttaaaactaagctgtcactaaactaagtcacttaaaactaactttcgtgaagccctgtgaactgaagtagacaacttaaacttcagaagaaaataatgggaacctatttacatacataagccactttcatacctgcttactgatgtatggacttcagagtaatgtggcctagatcaattttccaagattgttcttattgttctcccttcctccccaaattttctcttgataggatattagacttcacaaccttctaaaaatgagctttcctaataactcaggacctacccttctaggaaaaaaccatcctagccatgagagagcagataaaacctgggaacagaaacttattttcttcaaaaatgctttctccaaaatattttaaaaaagaaaaggggggaaatgtgaaaggaaattaccttggaatcccataatcactaagctaatgggaaaagtcaagctgggaactgcttagggcaaacctgcttcccattccattcagtcatccctctgctcactgagataaatgcatgtctgactgcctcttttagaaaggtgaatcagaaactcaaaagagtgcaaccatttgtctctcacctacctgtgacctggaagcccctccccacttcgagttgtcccattttttctttgagttgtcccacctttcctgaccaatattcattttacatatgttgattgatgtcttatatctccctaaaatgtataaaaccaccctgtgctctgactatcttaggtacatgtcgtcaggacctcctgaggctgtcataatcgtgtgtccttgaccttcgcaagataaattttctaaattaactgagacctgtctccaatttttggggttcatacaggttaaattgtaaaagatctgtgtcagaggaggaagtccattcagagggttggggggccttattttatttttggtttataggattctgaccctttttattatttcaagttggcaatgaaaaaaacagcaaaagtatataggactaaggattctaggctgggtacagtaattcacacctataatcccagcactttgggaggccaaggtgggaggattgcttaagcccaggagtttgaggccaaccggggcaacatatgagacctcgtctcaaagaaaaaaaaaatatgtagaaaactagagaggataaattaaaattccaataagaaaaatatattaacctggaaacctacaggaaatgggtgattgcctaataaaaatacacatgaacaaaaggaatcctaaaataagaaacatacaaataggccagttagtatagaaaagcttggaatgatgcttagacatctctcactggaaaagaccccagggacatacagattcagagttaagttttaactgaacttggttaaatttgttgaccttcagcaaatcctgattttatttaaaatggtcaaggcctagttgagggaaggggaaagaagtgattttcttcaattacttttacggtataatttctgtgaaaggaaaataaaactcaggaccacaaaatcactaaaccaaagggtaaagtcaagctggaaactatgtcaggcaaacctgcctcccattctattcctaaataagatagctgccaagataagaggctacgtacctcccttaaaatttgcccacaaggaaattccttgtggataaaggacagacagaactcaaagttatccctttaaggtgcgcctgagacaaatgcatatctaattgcttcccctcccctattgtttacgtaaaaatgataattcactgagccagactaaattgtgtattcagtggaaggctgatcaaggactcaaaaaaatgcgatcttttgcctcttatctactcatgatctggaagccctcacctcaagtcccgctttacctgactaaagtacatcttacacatactgattgatgtctcatgtctccctaacatgtataaaagcaagctgtaccctgaccaccaagggcacatggtcatcagggccttctgaggctgtgtcacgggtgcaaccttaatcttggtgaaataaactttctaaattgatggatgccggatgtggtggctcatgcctgtaatcccagcactttgggaagctgagacggacagatcaactgaggtcaggaattcgagacaagcctggccaacatggtgaaactctgtctctaccaaagatacgaaaattagctggttgtattggcacacacctataattccagctgctcaggaggctgaggcaagaggatcgcttgcctgggaggcgaaggttgcagtgagccgagatcatgccactgcactcctccagcctgggtgacagagcaagatgccatctcaaaaaagaaaaaaaaaaattgatggagagttaacttttggtttacaatgtaaatgtttatttaaaaacagacattattttatgtaccattacaaatatactgctacccagctgctcgggaggctgaggcaggagaatgcttgaactcgggaggcggaggttgcagtgagccgagatcgcaccattgctctccagcctgggcgacagagcgagactccatctcaaataaaacaaaaacaaacaaatatactgccaactaaactgtgattttgtcaaaaataaatgttgttgatgactttacttccattaaagccactgtagtagccaagggaaagcttcctttttgtcctctgaaggttcactgaaaagtcaactgacaaaaggcacattaattggagaaagggcatacaaatttattaacatgcacatgggggagaaccagagtgattttgctgaagccccaaatggggttcagaaacttatataccatcttgaggttacagaatgggggtttggattgtggcataacaggttatgcgggtggagacctggctgacaaccacggtcttgttatgtaaatgaaacctcctaagtagaactccttaaagagaacaggtggtacatgtttctttcagacctttgcaaaccaacagtaaaattctaaaccctccaaccgactgatggaccctctgcttgcccaagggcattctgaagttaacctgaaaaactagttcaggcaatgatgggaagtgggggttggccatgcctcattatacactcctcccttggaattcaggtacagcaagccagcactaacattaaaacagagaccttaagactgacagaaaagactcttctgcagaggcttcttcattactctcaggcacacaggattcttggtttccgctgtagggtcctcactttacctgttcaaccttcatttgtctttcactgcctactcttggttagcactcggccagcgcacaggtttcccacaccctgaggtggacaccagcagggaaggtttgcgggagggctctgcctccctggcggccacccgcaggcccacagcaagacatgtgcagaggtgagcggagcgccgtcaccagctgccactctcccaaagaccagaaccatcccagagcacccggaggcaccaggaaagcggctcggaggcagaggcgccaggggcggggctgatgccgagaggtttcctctgccccgttccctcgcattggtcctgcaaccgctcccgtcagacgcgtttccgcctcctgtcctccggaaaggtgcccgcctcttgccttccggcccggcgcccgatttccgccttccgacccagctgtgggctgcgccccacgccagcccgcgccccgcatggctgccgccggggccaggcctgtggagctgggcttcgccgagtcggcgccggcgtggcgactgcgcagcgagcagttccccagcaaggtgggcgggcggccggcatggctgggcgcggccgggctgccggggccccaggccctggcctgcgagctgtgcggccgcccgctctccttcctgctgcaggtgtatgcgccgctgcctggccgcccggacgccttccaccgctgcatcttcctcttctgctgccgcgagcagccgtgctgtgccggcctgcgaggtgagccgccaaacggggtcgggacggggccatgcctccgacgcgtgcgcggcgttaattccgggagcgaccagggggacggcggcaagcaccgctgccgccccagcctcagagctccctctccgcgctgccccaggagcaccttctcccgggcccttccaggatgtgctcatttttgctacataagcttctaactgtgcccacgcgcattggtaacccccagcttttaatcagtgggtaccaggtatggtgttaattcagataatagaaattgtcttggaaagatggatcccagtagctttttcgtatttttggcagtcgttcttaacgatcagtcttattaatttgattaactcaaaccacctctaggaggcaactcagttgcgtgtaccggacgaaatctagtttctggattttaaaagcttattcctgaaagcaaaaactttcatttcttttttgttgttgttattttcagttttacgtgcagaggataaaatatgtgaattgctgttttgtttgaagataaaacttttctctgtattcttttttagtttttaggaatcaactacccaggaaaaacgatttttactcatatgagccaccttctgagaatcctcccccagaaacaggagaatcagtgtgtctccagcttaagtctggtgctcatctctgcagggtttgtggctgtttaggccccaaaacgtgctccagatgccacaaagcatattactgcagcaag

SEQ ID NO: 1237 - DNA, 6000 bp, Homo sapiens
caagcgattctcatgcctcagcctcacgagttgctgggactacaagcatgcaccaccatgcccggctaatttacaaaaataatttttaaaagtcactaaacaatctcaaaccatacaaaaagcaacctgatttctagactcttctcagtataatattcaaaacacccagttttcaacaataatttataaagcaaacaggaaagtatggcccattcacagggaaaaaagtagttgatagaaaccatctctgaggacacattgggcatactaaacaaatgctttgaatcagctgtcttaaatatgctcagaaagccaggtgaaaccatgggcaaagaactaaaggaaaccaggagcacagtgtatgaacaagtagagagtatagatagaaattaagaaaccagccaggcgcagtggctcacgcctgtaatcccagcactttgggaggctgacgtgggcggatcacttgaggtcaggagttcaagaccagcctggccaacatggtgaaacctttctctactaaaaacacaaaaattagctggatgtggtggcgggcgcctgtagtcccagctacttggaaggctgaagcaggagaatcatttgaacccggcagatggaggttgcagtgagctgagactgcaccactgcacaccagcgtggggacagagcaagactctgttgcaaaaaaaaaaaagaaaaattaagaaaccaacagaaattctgtaccccaaaattacaatagctgagatgaaaaatacactagaagaattcaatagcagatttgagcaggcagaagaatcagagatcttgaagatacggctgttgaaattatgcagttggaggaggagcagaaagaaaaatgaatgaagaaaagtgaatagagcctaagggacctgtagaacatcatctgatgtaccaatattcacattaaggggaagcccaaagaagagcagagagcaaaatgaacagaaagaatattgaagaaataatggctgaaaacttcccaaatctgatgaagaacaagagtctatacatccaagaagctgaatgaattccaagtaggatgaactcaaagaagtccacaccacgacacatcagagtcaaactgttcaagaccaaagacatagaaaatcttgaaagcagtaagagaacagcctaatcagaaaataggcaaacaggcggggcacggtggctcatgcctgtaatcccagtactttgggaggctgaggcaggtggatcacgagatcaggagttcgagatgaccctggccaatatgatgaaacgcctaaaaatgcaaaaattagccaggcgtggtggcacgtgcctgtagtcccagctgctcaggaggctaaggctggagaatctcttgaacccaggaggtggaggttgcagtgagccaagatcacaccactgcactccagcctgggcaacagagcaagactccgtttcaaaaaaaaaaaaaaagaaaaaaagaaaataggcaaacagccaggcacagtggctcatgcatgtaatcccaacactttgagaggccaaggtcgggcagatagcttaagcccaggagtttaagaccagcctggacaacatggtgaaacccagtctctacaaaaaatttaaaaattaactgggcatggtggtgtaagcctgtatttccagctactcaggaggctgaggtgggaaatcacttgagcccaggaggcggaagttgcagtgagctgatattacactactgcactccagcctggatgacagagtgagactctgtctcaaaaaaaaaaaatgggcaaacaatatcaattgatatttctccagaaagatgtacaaatgaccaacaagcacatgaaagcatgctgaacgtcattagtcattacagaaatacaaatcagaactataataagataccgcttcacacctattaggatgactataatgaaagcgatggaaaataacaagtcttgacagagatatagaaaaaatgacaccagtatacattgaggtgggaatagaaatagtgtagccgccatagttaacagttggctttccccaataagttaaacatagaattaccatatgacccagcagttccgctctcaggtactcacccaacataagtgaaaacaagtgtccatataaaacttgtgcaagaatgttcatttaaccacaattcacaccagccaaaaagcaaaaaaaactcaatccatcaactcatgaataaactaatatgatatattcatacaatggaatattatccaaccataaaaaggaatgaagtatcgatacatgctacaacataggtgaacctagaaaacaacacactaagtgaaaaaaggcacaaaaacacacgtgtgatttccattcctatgaaatatcagaggcatatgggcatttgcctagcctcagaatggcaatctgtagagcccaaaagcacgctgtgggttgcagggcaaggaggaatggggaatgcctgcttagtgggtacagggtttccttttggggttataaaagtctcttggaactagatagtgatgttgattgtataacatcgtgaatactcaaaatatccctgaattgtatacgttagagtggtttaaaaagtcaattttatgtgcattttaccacagcaaaagaatgcatacacacatgcatcttcacgctcacaaaggggacgggctgagatctgaagggcatggcttatgccaccatcagaatatggctcccagagaggagttacccacacactggctggtggtgagcacagataactacaggagtctgggctgtcgctggctgcatagaagaggccctgagccttcctgtgtgagcgcaaggtcagcaaccacagtcacagctccggcttctcttcctgtcctgccccgggagcacatcctgcggggctgtgtttcctgcctggttgagaatctagttgccaaaccacctttcctctgaaggaatcaaccatgatttttccccatttttcacttttatattactggctaggtagtcaccacatcccataataaaactccattctggccctatccagtactactcttacaaatgcagaagcaaaggacttgagtggacatttgtgcaatattgaatagctgtttaacatttcagcaatattgaatagctgtttaacatttcagcaatgttgagttgcaggcatgctttatgtattcctctgtccattttaggagagcctttttttctccctccatacccattattatttcatgtcagtgccagacagatcggatgagcaagcaaatagaccctctttccaagccttcatgaaaagactgtaaccttaattctttacagcctcttctctccttgagcagcttcccagggaaagtcagccagccccaggcaactggagtgccacaccttaaagccgcacctcagcctcagggtgctcttacagagaaggtttgtgctgtagaaaattgcagttgtgtttgggcacatagcttttcaaattgaaaagtttttcattagaaccttgagtctagctgggcgcagtggctcacgcttgtaatctcagcactttgggaggctgaggcaggcggatcacttgaggttaggagtttgagaccagcctggccaacatggtgaaacctcatctctactaaaaatacaaaaaatggccgggcatgaaagccaggtgtggtgatgtggtggcacacacctgtgatgccagctacttgggaagctgagacatgtgaaccgtttgaacccaggaaatggaggttgcagtgagtctcaaaaaaaataggccaggcacagtggctcacacttgtaatcccagcacttttgggaggccgaggcaggtggatcacctgaggtcgggagttccagaccagcctggccaacatggtgaaaccccatttctactaaaaatacaaaacttagctgggcatggtggtgggcgcctgtaatcccagctacttgggagactgaagtgggagaatctcttgaacccggggaggcggaggttgcagtgagctgagatggagccactgtgccccaggctaggtgacagagcaagactctgtctcaaaaaaaaaaaaacaaaacagaaccttgagttgtagaacgttgagtagtgtcttcacagttgctgagtaactaaaatcataaacggatgtactacagaggtgactcattaaggtaatagtactaaatgcactttatctaaacctcatctccttgacaatgttttctttctttctttttttttttctttttttttttttaagatagagtctcactctgttacataggctggggtgcagtgacacggtctcagctcactgcagccttcacctcccgggtttaagcgattctcctgcctcaacctcccaagtagctgggattacaggtgtgcactaccacgcctggcaaatttttgtatttttagtagagacagtttcaccatgttggtcaggctggtctcaaactcctgagctcaaatgatcttcctgctttggcctctcaaagttctgggattacaggcgtgcaccaccatgctcagcctgttctctccattttaagcctacagggattcctataacaaatagagcagtccttttctaaatgctgagtactgggcactatgccagggtactttatattttgtctgtaattctcaaaacaccatgagaaagttgtgttttcacagtttaaaaatgaggaaactgagtctccaggcaggtgagtaatttactgaaggtcatacaattaaaactttgaagcagttctcagactccaaaacctaggctcttttcactgtttaatgtcacaaaaaagccataagtgatcattttatgtgaaaataaataaatgcttaatggccatatttttttcctcctcatcttccctcccagctccaaattatgttttcttatttcagtgaagaaaaaatgactgctgcccgcattagaaaatgccacaagtgtgggactggcctcatcaaatctgaaggctgcaaccgcatgtcttgccgctgtggtgcccagatgtgctacctctgtcgagtttctattaatggatatgaccatttctgccaacatccccgctcaccaggagccccttgccaggagtgttcaagatgctctctctggaccgatcccactgtaagtagacacatggctgcctattgctttatagggagaaaatagaaatatatttttatgacaaatattttgaatatacgtaacaaaatttgacttaggagaagaatataggaaattacatagactgataaccaaagaaaaaatttgagaaactaattatcagctactcctcatgctgctcaaagcagcatgccctaacagttttataggcaaattcttttaattcttcaggaaataaaactctgtgccctctgaaatattccagagcaaagtaaggaaacttacacatgtatctgttcaaagccagcataacgctgattccaaagcctgacggagatagccctaacaaagaaaactacagattttcttatgagactcacttataatctagattttaaattatgtaaataaaatattagcaaatagaaagcatgaccaagtgagtttgttctagaaatgcaatgatggtttaatattaacaattctattaacgtaaatcattatatggtatctgtagatggtgagaagacatttaagaaatcaaatcaaatatttcttcttgatttaagctttaaaaatacagtattttagaggaggagcaaggctggcaaggaaattaaacacatagggtctgtttggggatcggaaagaaagcaggtgaggtttgcaggtggagagagccacagggaggtgacagcgattggcccaggggccggcctcagatctggagtgtgatgagagccatttcagggcattgtaggggctatgtttcccaggtcacactagctactacgctggggagagagaggacagcatgaagggaatgacttttataatcttggagaagataaggtttttcttgcat

SEQ ID NO: 1238 - DNA, 6000 bp, Homo sapiens
attctccttttgcaacatgttttcccagctgctgagagccctgctttttttccatgggcctcctgacagaaatacaaacaatttaaagccatgcggtaccaactgctcttcgtcaccacatggactgtggatgtcagtgtgtttccccttgggctggatttgtctggagctggtggctgctttcttgtccttccgtgcctcctgggagtcagggatcaaggccgtgctgggttgtgctgagagccacagcccctccttcaagtggggtaccctcccttcccagcctagtcctacatccttgttgtgtgaggaaatgaagtctgttccttggatgcgttctgacgggaaacatgttttctgtggcacctctgcttagtctttcagtgcaacacaaacagccttttgataccttgttttgtaaaaagtacatttccacaatggggcttgacactgttcataaataaacacatccgtttacaggcaaagcaagggaagaacacataagggaacagtttgaccaggggttttgcttttccctctgtgaatgcctggtgtgcaccatccatccgaggatgactaggggagaacactattctgtggctgccaaaaccacaacaaatgacaactttccattctgtcatctctctcggcaccactgctagcaagcaattcatttttctaccataaaagggcaatagaacttgtctatagctgcggtgtcttctgctctgcagagagagagcaggagaccggcagggagaggcactctcagcagtaggcgcaaccgtgctcaccccgtgcctaacagccttgcttagtccgggctccgaggcagcagcagccataagaaaaaacaggagaggaaggcgatgtggcgcttctgccgggccctcagactggggagtgtgaggtcaggacaggctggcgtgtcgttttcgtctctgtggctgctggacgtgtgaatgtgtggttcaaaccttggtacaagttgctgcactgggtctgcgcaggtggttttgtatattggtatttggtactcttgacttgcagttgtagatgttagatttataagccggacccaggaggtcatataacccagacatgcttgttgtacagatgaagaaccgtggataggttaagtgctaacttcgtgtagcttgaagtcattgaacttcttggctatatatgaactttgggttcaggggtagttccctaacccatctgtgtccccattggcccattagtgtattttttggctcagttaaagttgagccacagaagccttaactaatagaaatacagttcttagttggtggatttgtatgtcagttaaccagggtctttggaaagtatattgtcttttctataaaatgcttgggtcctttagatgattataaataaatgttcaaaatcaaaacaggagtagttagtagacaaatgcttagctattttgacaacacctagaacactttgagagagtggctgtaaaatttctgcccagtgcaccctggcagaccaggagaccagcccaacacaagctacgcagctacagagaatgtactttccataggctgaagggcatggccaccatacacatctctgctccagggcaggcaggtcctcaaattgcgccacaagtgggcctcatcctttggcttggagcccttgaaggttttcctataaacaagaactgagatttgttttgtcgtttaaacttaccttaattctgactgtctgatctcatagcagatgttggaactgaactaagcacattgccaagggaataaaaattgtgtccaagaatcttgctgatctggaagttttggaggaaagcagggatttcaaggtcaaatgttattacccagatagtgctcgtggtcagaatagattctgagctcattggatctgaatcaaaagttaactcagaagtcattccttaaagagaatatcattgagtagcagtggcggaagcaagctcagtgtgaatgattcaagtactgcatacctagaccttgttttgaagctgaaagacttgtttgaaaactgttccagcaaataaagaaattgagtaggccgtcctaaaatggaaagtttacaaaatgccctttttagtaagacctttctggattcttcttttctcaatagtgtaaaactgactatcttgatctatcaaagagctaagtggtataatttccttggcactttccaagacctttactgcctttggaataaacccatgatgcctgggagcattcgtctcactgtgcttctctcatgttctttgcttgtggaaatgttggaagcctttgtttttttggtcaacaacagcaagtgaattccatcttatagaacagttattaattttcgttgtgtcatttttaaggctgatttcttaagcaaatagcatctccttgttggccagagagtctctacccgcgtccatctctgtctttgcatgcctgggctgcctggccatgggtgaccagctttagagacatcagccttcttgcttcctaatttggtcacagtatgcttcaggcagtcttgcctaactttagaacaacacaagcacagggagcagctttgatatagcaaaggggaatttcctcttatcaaaagacctacagttcccttcttacttcctctaaaaagaggaattgacacttggggaggttgtagcttgctctgaagttccctctttaagcttggcttcttcatgccggcttcttcctagctagttcctgctctttccttcctcaaatgtcttggagcttcttagcattaaaggagtttaattttattcttaaggaaatccaatgcaatacccatcagcagggaacaatttcagtacattttggtacctcagtacagtggaggtccataccggggggtcagcatccatactgaggttcagcagactttttctgtaaacatccataccaggggtcagcagactttttctgtaaaaggcaaggtagtaaatatttcaggctttgcggaccatatggtatctatcccagctacctaactctgcctttatagcgtgaaagtaaccacagacaatatgtaaacaaatgaatgtggctgtgtcccagtataattatatttacaaaaattggcagagggccagattggccagtgagctgtagtttgccaacccgtagcatataccatagcgtttaaaagaatgacgtggaatcccgttgtgcaaatatggagctgtctccaagatattaagtgaaaaaagcaagacgtagaacaatgggtgcaatatgcccacaattgtgtcttaaatgggaggaggaagagatgcttgctgacacagacataaaatctatttggaaggatagataagaaatgggtagcagtgaatcgcttttgaggatgctcaccaagggttaagggaggagtgtgcatgtgtcacattgtatacccattgtcattaacttagtcatgtctgaacatgagcaaaagaatttttgttttgtttgtattaagagaacttgaaaaatagaaatgtgattattaaaatatgcttgtgtattttcaaactccaagctatttcttctggtgtgttggaaggcttattttaccacctaaaaaggagtgccttgcctcgggctggaggcgagggatggcgttttgtggtgtgtggaaggagctggaactgagcagctctgcctttctcctcgctcgccttctgcacgggctctgcttgcagcacaagctctggcactgtcggacaggatacagccagtgagaaaccttggaccagaagtcagggccccgcgggaattagtatggcttttagtagttagaattcaagactgtttccaactgctgccttttcccacagagtatgtctgactaacaaggatgggttctgattcacccggcgttgctatgaccgctttttaaaaatgtctgctttgggttgtgaaatcagcaaataaagttgttactttcctagtatgtgtaacagttagcttttggtatgtgaggaacaagtaaaaggcttagtggcaaatccttgtctgcttagaaggcagtgtacatataaacaactaaaaaattcccatttggctgccagcctcgattcatagttccctcttccagctcccaagcaaatatttttcaaatagccgtgctaagccttttccaggcatgatttgcgggcttacttgctgtcattctatttttcagcaaaactctgggtaggaatgtcggaaattataccttttgaaatccctccttgaaaacatggagatttgtaggtatgcagaggcaattgtaacaatataaagtattgtatctcttccactagagtaggagggcctgactgtcggcccctggggtctgtctttcattacttgtcttgacttccgctgtaaaagcattaagtgggaaggtagcagttctgctgaacaagcagacattgccttctgtaagagaagttatttaaaacatcgaaaatatgtttgaaagatattggtgtagtttcctctgacctcaatttcatacactagtaactctccggtgtctagagttagtactgatggactccctgccgggtggccagaaccatgtgtccatgccagatagaagattctacttcacttgattgaggacgctaagaagttgtgctttgccatacatgttgcccctaaggagaagctgggcattttaaagaatagacttaaaactaacacacatactctgtttttctcacacacacattccccctctccccttctcttctacacacaccagcactgccttccccacccccaccatagctctctccattactgcctttaaccttgaaacctctcttgtacacttacgcattcatctgttcctgctcttgtatcattaatgggcctggagcaatccagccaggagcaatccagccagaacaggaacactgacattactaattactgcttataactgagaagtaaggagcagtgagtaaagtgggtcacaagacagtgtcctagcagtcaaatgctgccgtcggcccgagtggcgaggtgtcaggtggcttgtctccccttcaccatgggtagacctggcagagcaccctgttggcatgagcagaagtgctgtcacgttgatcacccaggctcaccgtctacacacacggttagagaaatgggtgtgcttctgtcggaacttaaaaacatggcagatcaacccgtgagaacagagttctttgcacggctgtgtgagctgggaagagacgacaggcagaaaaggtgctgcagggggtgtgtggaggtggagcttcagcctctcctggctgtgtgctggataagccctgaaccacagggtccaagttgactcatctgtaggttgtcttcagcccccaaatcgcaattccatgatgaatgtgtacattttacacatgtgcgtatgtgttattaagtgtcaggctggtgtggcagagctgtcctggcagaacatgcgtgtgtacatccctgcaggctgtcggggcatgagctctagtgtgggctgtattgcaggagcatcagcagagaagggcgagatcttcactctacctctcactagccctgggcacttcccactgcctttgtggacttctgtttgctcttctgtagaatgggataacagtgccagtcctgcttactatttagggttatgtgatgcttgcagatgtacagggaaagcactgctgatgggagctgctgaagtttctaggggaggtgaaggtggcgcctcctcccctggtctaagtggtagatggtgcagggagaggagaatttcattctgtggcagcagctgatagattccaggtctttaatactacctgggaaaccttaacaaagcagtcagtcaccaaaactgacctagcttctgagcattgctaaccatgcttttagagaaacaggaagtaaaaaggatctttaaaatcttttttttttttttttgagatggaatttcactcttgttgcccaggctagagtgcaatggcgcgat

SEQ ID NO: 1239 - DNA, 6000 bp, Homo sapiens
caagaagagcatgtaaacaaataactcctatgagagcttctcaattcacacatgatcccatttcatccttgcaagaacaccgggcaatagataatatcttaaaattcccattttacaaataaaaaattccccgccagacatggcagttcacatctgccatcccaccactttaggagggcaagatggaaggatcacttagagccaggagttcgagaccaccctgggcaacaaagcgagactctgtttctataatttttttttttttttgaggcgaagtcttgctgtgttacctaggctggggtgcagtggcgcaacctcggctcactgcaacctctgcctcctgggttaaagtgattctcctgcctcagcctcctgtgtagctgggactagaggcatgtgtcaccacacctggctatctattaatgtttttttaaattaaacttcaaaataaaggcctggcatggtggcttacacctgtaatcccagcactttgggctgagacaggcagatcacctgaggtgaggagtttgagaccagcatggccaacatggtgaaaccccgtctctacaaaaaatattttaaaaattagccgggtgtgatggtgggtgcctgtagtcccagctacttgggagactgagccaggagaatcgcttgaacctgggaggcagaggttccagtgaggcaagatcgtgccactgcactccagcctgggcgatggaaggagacaccgtctcaaaaataaataaataaagacaaaaataaagtctctcttctcattgccatcacgtctgagtcagagtctccaaaaagcctgaacaaataaaaaattccagactcaggccaggtgcggtggctcatgcctgtaattccagcactttgggaggccaaggcgggtggatcacgaggtcaggagatcgagaccatcctggctaacacggcgaaaccccatctctactaaaaatacaaaaaaaaattagcccttggtggcgggcgcctgtagtcccagctactcgggaggctgaggcaggagaacggcgtgagcccaggaggcggagcttgcagtgaaccaagatcgcgccaccgcactccagactgggtggcacagcaagacttcatctcaaaaaaaaaaaaaaaaaaagctagactcagagaggttactcgatcgcacctgccttgggtgtgacaccaaccacagaggggttcagtggtccggaaagaaccttgcactcctgctaagatcaccaagctctccttccaatactgctttcttccaacatctcaaagggcttatgaggaccatcctaagaagaaggctgtaactgacagcgattatccacctcccccaagaggaccagcatggaggataagctcatcaaggccaatgcctttgttttaccttccaggtgattccaggatctcatctcaggtaagtatctatcttaaactctctctcctgttcaccctctaatgtctcccatgcactgcaccctctaactcagggcctgacatctgtaagatccctagatcctcgtcctgttctgtaagcagcccttcaatttctacttcactgaaacatgactattccctcaggacactgttccccaaagcactatgagtagtggtctttttctgtcccatgcaagcccccataagccacactctactgtcttagagaaggaacactcattgccgcatcaagactattgttcctctcatttccctgttttgtttttgtttgcttcttttgagacaggctgttgttctgtcatccaggctggagtgcagcagtgcaatcatagctcacagcagcctcggactcctgggctcaaacaatcctctggccgggtttagtggctcgctcctgtaattccagcactttggtaggccgaggtgggtagattacctgaggtcaggagttcaagaccagcctggccaacatggtgaaaccctgtctctactgaaaatacgaaaattagccgggcgtggtggcacatgcttgtaatcccagctactcaggaggctgaggcaggagaatcgcttgagcccagaaggtggaggttgcagtgagccaagatcgtgccaccgcactccagcctggctgacagagtgagattctgtccaaaaaaacaaaacaaacaaaacaaaacaaaacaaaaaaatcctcccacctcagtctcctgagtagctgggactataggtgcgcaccaccatgcccggctaatttttatttttgtaaagatggggtcttactctattgcccaggatcgtctcaaactcctggcttcaagccatcctcccacctccatttcccaaaatgttcggattccaggtataagccactatgcccagcccagactcatttatctaattactgacttgatatctctacttgaaggtgtacttggcaatttttttttttttgagacacagtctcactctgttacccaggctgaagtgcagtggcataatcactgcactacaacctccccctcctcggttcaagcaattcttgtgcctcggcctcccgagtagctcggattacaggcacgcaccaccatgcccagctaatttttgtatttttagtagagacggggtttcaccatggtggccaggctggtctcgaactcctgacctcaagtgatctgcctgcctcggcctcccaatgtgctgggattacaggcgtgaaccaccacgcctggccagcaattattttaagagttggggtcttgctattttgctaaggctggtcttgaactcctggcctcaagcgatcctcctgccttggccttccaaagcgcggggattatggacatgagccactgtgcccagcaggagcagtattttagtcagttattcacttgctcactaaaacctaaacttcctgaggccaggaacacattttactttttttttttttcgagatggagggttgctctgttgcccaggctggagtgcaggggcgccatgttggctcactacaacctccgcctcccaggttcaagtgattttcccgcctcagcctcctgagtagctgggattacaggcatccgccaccatgcctggctaatttttttatttttggtagagacgggtttcaccatgttggccaggctggtctccaacgtctgacctcaagtgatccacccgccttggcctcccaaagtgctgggattacaggcgtgagccactgtgcccagccatgggacccactttactcttaatttccccaattcctagaacagtgtgtggcccacaggaaatccgcagaatatatttgcagaatgaatgaatgacttgccaaacgaattagggcaaatcagtagatatcgagtaaacatccacaaccacctgccccatacccttttcagctctggggagatggtggctccttgtggggtcggatatgggggtctcctttcctttcaccctcctgcctcgtgggggagtcaagtctccgcaggcggagagcccggatgcaggcgcgactaggcggccctctctatggtgagccccccggtccctcctccgcagtacccggagtgcctctatggttcttcctgtccttagtcgggagggggcgctgtgcgcaggcgcgaggtgacgccgcggcagggccggaaggagtgcagcggctgccacggagctcgcagctgcggcttctgaggagtaagcggcgcggtagcgaaggccgccgaacctgcctggctagccggcgacttgagtgacgagtgagtgtcggctgcggggcgcgctcgagctcctgggcgggtctgtgaggcgacgcggcctctctgaggggcgcctctgtggagctccgggggtgggggcgggggcgcgggccgtgagggccgccgagctgaggggcgcgggccgaggcccgggcgggatcgggccaaggggctgggctgggcgtctcgagcccggtgcggtggcgaggctggagcgacaaaggcgctgagcggccgggtggccccctctcgccacttcgcgaagtttcgcgggccggcccctcgggtctgctgcgcgagggcaacagcccgggagaccgcgcttccctcccccgggcccgaggccgccgcggaggcggtgtccgtgcacccgagcgcggcctggaggagcggcgggaggcgggccgtgcctgtgaaccccagcccaggcgggcggcgtttttcctcctcttccctcacatctggagcgcgtgttccgcgaaagttggcgactgtcacccggcactcgcgagggcgccgcaagtgcgtcaaacccttctgcggggcgctgggggctggcccggctcgggtgtccgggcgctgggcagcgagcgaggccgctgtccccgcgtcgaggtggttctgctcccggtggaacaggaccagggatccaagactctgggccacttgcaaccaaccctggagcgtgcgcggcgtgcgggttacagaaatttctgacaaatccgacagggctctgtaaatccctaagggcctgggtagcagctgtcctaggtacttagatcgtgcaaagagaacgttcttttttcttttacttttttttttttctccttttctttgagacggagtcttgctctgttgcccaggctggagtgcagtggcgcgatcccggctcactgcaagctctgcctcccggattcaagcgattttcctgcctcagcctcacagggattgcctcagctgggattacaggcatttgccaccacgtccagctaatttttgtatttttagtagagacgggatttctccgtgttggccaggctggtctctaacgtctgacctcaggtgatccctccgcctcggcctcccaaagtgctacagtcttttcaaaagacgtttcagatatgttctccgggaccctcgggcccttcagtaagaagcgccctggctgaaaacccacacgttcacctacagaagaagcactgtgacgtagagggtgagcagagcagagggcctcacagtggccctcacatgcacctggctccagcctggccaggtcattttgccctggtgggcctgtgcctcaaaaatggggtttcttcccttgtgaggaagacccatgaattagtaacggaattgccaggaatgctaaaaactatctaaatgccatgtattgttttcaagctgttactcctggaaggggctgggttggcattgttttagaggttaggagccaaacatcagctcatctattctccagctgttgtttgtcctccatcttcctgcaatagtcaggcacagggtcttataaaaatgggtttgtgctgctgtatgtttcggtgggtacctttgtttactgaatgggatgtaggtgggggaccagagcatatccgcgtccctcggaaacagtggcgttttagatgtagtatgtcccgtcagctcctctctgccccacccaccccagcccattcattgagcattttttttttttttttgaggcggagtctggctgtatttcccaggctaaagtgcagtggtgccatctctgcccactgcaccctccgcctgccagcttcaagtaattctcctgcctcagcctcccgagtagctggaattacaggcgcgcaccaccacgctcggctaacttttttttttttttttttttttaagagacggagtctagctgtgctgcccaactcctgggtttaagtgaccctcagcctcccaaagcacaagaattacaggctttagccaccgtgctctgccagaacattctttacgcgctgagaagggagagaagcgggaagattctatgaaacatctcaatttagtcggcttgctttaaggaagaaggctaatacatggcctggctttgccttggttttgtatttcataatttattgcgcctggggtgtggggagtagtggtggatttgaggaaatgcctggagagtctgggccagattttggaccccctggcaaacctcattcgaggctttagatttttaccctgattagagcagcagcagctaataaaagagaactcctgaagcccc

SEQ ID NO: 1240 - DNA, 6000 bp, Homo sapiens
agttacagcctcggctctctggcaggctcatggggtgagtgcaggttgcacgcctttggccgtaactgcatggaattacagccagcacagatgatacggattttcatagacagaacttccatgcttcttcccaggaaaacagcaaaacatcacttgttgacaatagtttagtctgcaggtagctatcttgccctttctgattcttggtgctggttaacattaagacaaagaaaacaggccaggtgtggtggctcacacctgtaatcccagcactttgggaggccaaggcgggcggatcacctgaggtcgggagttcgagatcagcctgaacaacattgagaaaccctgtctctactaaaaatagaaaattagccgggagtggtggcatatgcctgtaatcccagctactcgggaggccgaggcaggagaattgcttgaaactgggaggcagaggttgcagtgagccaagatcacaccattgcactccagcctgggaaacaagagcaaaactcctttcaaacaaacaaacaaacagacaaaaataggacaggtgcggtgtggctcaagcctataatctcagcactttgggaggccgaggcaggaggatcacttgaggccaggagtttgagaccagcctgagaaacacagcgagaccccatctatacaaaaaaattaaaaaattagtcgggcgtggtggcacacacctgtagtcccagctactcaggaggcaggggtgggagggtcacttgagcctgggaggtcaaggctgcagtgaactatgattgactgagtcactgcactctagcctcggtgacagagtgagacccccaaccccaccccacccccctccaaaaaaaaacagggccgggcacagtggctcacgcctgtgatgccaacactttggaaggccgaagcaggcagatcacctgaggtcaggagttcaagactagcttggccaacgtggtgaaaccctgcctctactgaaaatacaaaaattaggcggatgtggtggcgggcacctgtaatctcagctacttgggctgagactcgagaatcacttgaatccgggaggcagagtttgcagtgagccaagatcatgccattgcactccagcatgagcgacaagagtgaaactccgtctccaaaaaaaaaaaaaaaaaaaaaaggccagaggcttcaaaagtaaccagaatgattccagttcaaaagtaaccagaatgattccagttcaaaagtaaccagaatgattccagacaacctagaaggagggagtagcttcctctcgccctcactgggaaaaatgcagagatatgatagttgtctttatgactccgaaaatgcttaagacaagaagagcatgtaaacaaataactcctatgagagcttctcaattcacacatgatcccatttcatccttgcaagaacaccgggcaatagataatatcttaaaattcccattttacaaataaaaaattccccgccagacatggcagttcacatctgccatcccaccactttaggagggcaagatggaaggatcacttagagccaggagttcgagaccaccctgggcaacaaagcgagactctgtttctataatttttttttttttttgaggcgaagtcttgctgtgttacctaggctggggtgcagtggcgcaacctcggctcactgcaacctctgcctcctgggttaaagtgattctcctgcctcagcctcctgtgtagctgggactagaggcatgtgtcaccacacctggctatctattaatgtttttttaaattaaacttcaaaataaaggcctggcatggtggcttacacctgtaatcccagcactttgggctgagacaggcagatcacctgaggtgaggagtttgagaccagcatggccaacatggtgaaaccccgtctctacaaaaaatattttaaaaattagccgggtgtgatggtgggtgcctgtagtcccagctacttgggagactgagccaggagaatcgcttgaacctgggaggcagaggttccagtgaggcaagatcgtgccactgcactccagcctgggcgatggaaggagacaccgtctcaaaaataaataaataaagacaaaaataaagtctctcttctcattgccatcacgtctgagtcagagtctccaaaaagcctgaacaaataaaaaattccagactcaggccaggtgcggtggctcatgcctgtaattccagcactttgggaggccaaggcgggtggatcacgaggtcaggagatcgagaccatcctggctaacacggcgaaaccccatctctactaaaaatacaaaaaaaaattagcccttggtggcgggcgcctgtagtcccagctactcgggaggctgaggcaggagaacggcgtgagcccaggaggcggagcttgcagtgaaccaagatcgcgccaccgcactccagactgggtggcacagcaagacttcatctcaaaaaaaaaaaaaaaaaaagctagactcagagaggttactcgatcgcacctgccttgggtgtgacaccaaccacagaggggttcagtggtccggaaagaaccttgcactcctgctaagatcaccaagctctccttccaatactgctttcttccaacatctcaaagggcttatgaggaccatcctaagaagaaggctgtaactgacagcgattatccacctcccccaagaggaccagcatggaggataagctcatcaaggccaatgcctttgttttaccttccaggtgattccaggatctcatctcaggtaagtatctatcttaaactctctctcctgttcaccctctaatgtctcccatgcactgcaccctctaactcagggcctgacatctgtaagatccctagatcctcgtcctgttctgtaagcagcccttcaatttctacttcactgaaacatgactattccctcaggacactgttccccaaagcactatgagtagtggtctttttctgtcccatgcaagcccccataagccacactctactgtcttagagaaggaacactcattgccgcatcaagactattgttcctctcatttccctgttttgtttttgtttgcttcttttgagacaggctgttgttctgtcatccaggctggagtgcagcagtgcaatcatagctcacagcagcctcggactcctgggctcaaacaatcctctggccgggtttagtggctcgctcctgtaattccagcactttggtaggccgaggtgggtagattacctgaggtcaggagttcaagaccagcctggccaacatggtgaaaccctgtctctactgaaaatacgaaaattagccgggcgtggtggcacatgcttgtaatcccagctactcaggaggctgaggcaggagaatcgcttgagcccagaaggtggaggttgcagtgagccaagatcgtgccaccgcactccagcctggctgacagagtgagattctgtccaaaaaaacaaaacaaacaaaacaaaacaaaacaaaaaaatcctcccacctcagtctcctgagtagctgggactataggtgcgcaccaccatgcccggctaatttttatttttgtaaagatggggtcttactctattgcccaggatcgtctcaaactcctggcttcaagccatcctcccacctccatttcccaaaatgttcggattccaggtataagccactatgcccagcccagactcatttatctaattactgacttgatatctctacttgaaggtgtacttggcaatttttttttttttgagacacagtctcactctgttacccaggctgaagtgcagtggcataatcactgcactacaacctccccctcctcggttcaagcaattcttgtgcctcggcctcccgagtagctcggattacaggcacgcaccaccatgcccagctaatttttgtatttttagtagagacggggtttcaccatggtggccaggctggtctcgaactcctgacctcaagtgatctgcctgcctcggcctcccaatgtgctgggattacaggcgtgaaccaccacgcctggccagcaattattttaagagttggggtcttgctattttgctaaggctggtcttgaactcctggcctcaagcgatcctcctgccttggccttccaaagcgcggggattatggacatgagccactgtgcccagcaggagcagtattttagtcagttattcacttgctcactaaaacctaaacttcctgaggccaggaacacattttactttttttttttttcgagatggagggttgctctgttgcccaggctggagtgcaggggcgccatgttggctcactacaacctccgcctcccaggttcaagtgattttcccgcctcagcctcctgagtagctgggattacaggcatccgccaccatgcctggctaatttttttatttttggtagagacgggtttcaccatgttggccaggctggtctccaacgtctgacctcaagtgatccacccgccttggcctcccaaagtgctgggattacaggcgtgagccactgtgcccagccatgggacccactttactcttaatttccccaattcctagaacagtgtgtggcccacaggaaatccgcagaatatatttgcagaatgaatgaatgacttgccaaacgaattagggcaaatcagtagatatcgagtaaacatccacaaccacctgccccatacccttttcagctctggggagatggtggctccttgtggggtcggatatgggggtctcctttcctttcaccctcctgcctcgtgggggagtcaagtctccgcaggcggagagcccggatgcaggcgcgactaggcggccctctctatggtgagccccccggtccctcctccgcagtacccggagtgcctctatggttcttcctgtccttagtcgggagggggcgctgtgcgcaggcgcgaggtgacgccgcggcagggccggaaggagtgcagcggctgccacggagctcgcagctgcggcttctgaggagtaagcggcgcggtagcgaaggccgccgaacctgcctggctagccggcgacttgagtgacgagtgagtgtcggctgcggggcgcgctcgagctcctgggcgggtctgtgaggcgacgcggcctctctgaggggcgcctctgtggagctccgggggtgggggcgggggcgcgggccgtgagggccgccgagctgaggggcgcgggccgaggcccgggcgggatcgggccaaggggctgggctgggcgtctcgagcccggtgcggtggcgaggctggagcgacaaaggcgctgagcggccgggtggccccctctcgccacttcgcgaagtttcgcgggccggcccctcgggtctgctgcgcgagggcaacagcccgggagaccgcgcttccctcccccgggcccgaggccgccgcggaggcggtgtccgtgcacccgagcgcggcctggaggagcggcgggaggcgggccgtgcctgtgaaccccagcccaggcgggcggcgtttttcctcctcttccctcacatctggagcgcgtgttccgcgaaagttggcgactgtcacccggcactcgcgagggcgccgcaagtgcgtcaaacccttctgcggggcgctgggggctggcccggctcgggtgtccgggcgctgggcagcgagcgaggccgctgtccccgcgtcgaggtggttctgctcccggtggaacaggaccagggatccaagactctgggccacttgcaaccaaccctggagcgtgcgcggcgtgcgggttacagaaatttctgacaaatccgacagggctctgtaaatccctaagggcctgggtagcagctgtcctaggtacttagatcgtgcaaagagaacgttcttttttcttttacttttttttttttctccttttctttgagacggagtcttgctctgttgcccaggctggagtgcagtggcgcgatcccggctcactgcaagctctgcctcccggattcaagcgatt

SEQ ID NO: 1241 - DNA, 6000 bp, Homo sapiens
gaacccagggggcggaggttgcagtgagccaagatcgtgccactgaactctcgtgaggtgtgacagagcaagactccatctcaaaaaaaaaaaaaagaaaagaaaaagaaaaagaatgctgcttttggagaaaatactgacatttgattgacagaaaaagctttccattggatacacaataaaattgatttaattctatgcttgctgagaatattaataattaagaatttaaagcaatgagggaaaaaggcctgcacttgcataaagctatacaaaaatggtgaacgagagatgaacctgttccactctttggtcaaataattacattagcaattggttaaggccgaggtataaactgctgcttgtatttccttttgtaaaatttttgagcaagtgaaaattttgagcaagttttgaaaaagtgactatgtaaaaaattaaacggtattattgtcagtgttatgtggagactatcaagcccttatttaggaaaaaaaaaatagtgttttccaatgctaattcaaaccagatgcatgttaaaactcaaaggaaatagttttataaaactgagtatattttagttgctttcaggataactttcagaatccttcagccttgtagctaaatgctgcatttttgcctttttctataaagcaaatacttttctaaaacttgttttcaaaacaattattgtaccaaacatattcattactatatattttaaattaaatgtgaatgctgtcccagagcaaataataactacttcttattgagcaaattttatgtgttctagttatttatgtgcattgtatgcatagtccaattgtatctttatgacaatgtacatatgtttcctatatatgtgttgaatatggattcatcatcaccattttacacatgggggggtagaggaagttactaatttgcctaacttcacacagtttataaatggagcatctggaaatcaaacccaggtagtttttattttttaggttgcaaagtccagattcctaaccactatacgcaatgtctctagagtttaggcatgttaatggcaagaaaaggtttcaagtgtcttttcatctctaattttatcactagaaaactattctgctaaatcatagctcctaaactactaagaatttggcatattcatttttctacaaaatttaatgcacaaagtgaaaagtggtattttttctttgagttaaagaatacattttctgtgttttctaagatagaaaacttaaagataatcaccatatttttattgactgtagagaaacattccatttttttcactagttgaaacacaagttaaaatattcaaattttcaacagttttcctttcattgagataggactttaaatatttaaaaatttcaatttcatttatgaaacttttaaactgcccttaacagatgagcagagcgctttctgcagaaaatattcactttcaatctcatagtcccaaaagggaaagttgaaggctaagttgaaaatctgcttgggtcagccaaatgacccaaaggaaaccctgaagatgttttgcagaagttccccttctctaaaaaaagacaggacaaagaagccaaaaagttacatcctcacaatataaagcctgaatgacagaggccttcagagttatttattctcctcagcctatggacatcctctttcagattttagtattcaccattcaaaatgtttaagttatcatgaactttcataataaatgtggcaataaatgttaccaattttcaactcgcattttaatgtagaaaactctccctaaaagtacataatcaattagtttaaacatttcaataagataagccagttttgctcattaatctcctttggacaattgttctctgtgctgtcttttataaattagctttttccttcacaaagtctttggactatattagatacttactacttgacagtttaattgtgcaattgcttgataagagtaaaagcaacatctgtagacaaaatctgccctacacaaacttggaggaagaaaagtaccaatgattacctcacataagaagaagcagctcacacttgacagtttaattgtgcaattgcttgatgagagaaaaagcaacatctgtagacaagatctgccatacacaaacttggagaggaagaaaagttaccaatgattacctcacataaggaaaagcaactcacacctgcccattgttttggaaaaggaatacaaatgtcagccctgaatatggtgggcctagttggactggcaccttaaattctgacaaatatatccagccatacaatgctaagagctttattcatttcataaatatttcagaaggcgattatagctaaatgatttttaaaaccacacaaaacctaagtttatccttttattaagagaaactctttataatggagagttttaaacataagcaaaagttgatctaagagaatagtgaacctctatatgcacattacttaataccaacaattatcatcaatcactttggcaatacagtctcatctatccctttatatttcaaagtaaatcccaaacattgtatcattttattcacaaatatttcactatatcgatagatgagaaaaaacgcattctttacctcttattttaaggaatatattaatacactataatttttcattgttattgtttgaaaaattaaatattgcaataacttaataaaagccataaatgcaagagcatagtaattaagacaactgaaaagaatatacctgaaagggaaacattttccttcatttttctgccttctctttctataagtacttacccagctgtttgcttcttgctgcttccttgattcaaaaggtaaatatgctcagtgggtcattacaagatttgcaattagataaaaaggtcaaaataatgcaatatagaacattattagccttaatcatttgaacttttttgtgatgttcaaatgatttgtaagtttgtaaggctgcaggatttcaggtcttaagaacaaacatttttctacatgttgttaaaccaaatggcaataaaatagtaaattaataaccgaggttttacagttcatgtgaaacacttccggagctaaagatttttctttgtgtcataggagctaaaagtatacacaggaaaaagtgaacccagaaccactacactaatctctaataattctttgtattattcttccggttcccaaaatttctttaaatccgtaagtatttttattatatcaggtctaaattttatatattgatatactaatattttttaaaatctatcactaaaatagagatataaaatcgatgttgaaattgatgttgcaagttttattttgttttgctttgggatcttggatttcaagtccacagaattaaattggcattactgcttagttcatgactggcttttattctaacagtgcacctcccttattttatatttcatttcgagattcttcccattaattattgcatcattcatccccttcccatctccaccaggcatccacttacatgcagacaatgaacactcttccaaaccacattccacatagttgatggccatttgcaaatacattcttccataaaatttgtttttattaatatgggtgtgctctaaatggtattgtgtccgaattggtgggttcttggtcttacttacttcaagaatgaagccgtggacccgcgcagtgagtgttacagttcttaaaggtggcgtgtctggagtttgttccttctgatgtttggatgtgttcagagtttcttccttctggtgggttcgtggtctcgctggcttcaggagtgaagctgcagaccttcgcggtgagtgttacagctcttaaggcagcacgtctggagttgtttgttcttccccggggggtttgtggtctcgctggcttcaggagtacagacctttgcagtgagtgttacaactcataaaggcagtatggacccaaagagtgagtagcagcaagttttattgcaaagagcaaaagaacaaactttccacagcatggaaggggactggagcgggttgccactgctggcttgggcagcctgctcttagtctctcatctggccccacccacatcctgctgactggtccattttacagagagctgattggtccgttttgacagggtgctgattggcgcatttacaatccctgagctagacacaaaagttctgcaagtccccaatagattagctagacacagagcacagattggtgcatttacaaaccttgagctagacgcagggtgctgattggtgcatttacaaaccttcagctagatacagagtgtattcactctgaatacagccgattggtgtattcacaatcccttagctagacataaagattctccaagtccccaccagactagctagatacagagtgccgattggtgcatccacaaaccccgagctagacacagggtgctgattggtgtgtttacaatcccttagctagacataaagattctccaagtccccactagactcaggagcccagctggcttcacccagtggatcccacactggggctgcaggtggagctgcctgccagtcccgtgccgtgcggccgcactcctcagccattgggcggtcgatgggaccgggcgccgcggagcagggggcggcgctggtggggaggcttgggccgcgcaggagcccatggcgtcggggaggctcaggcatggcaggctgcaggtcccgagccctgccccgcggggaggaagctgaggcccggcgagaaatcgagcgcagcgccggtgggccggcactgctgggggacctggcgcaccctccgcagctgctggcccgggtgctaagcccctcactgccgggggcggcggggcggtcccgccgctccaagtgcagggcccgccgagcccccgcccacccggaactcgcgctggcacgcaagcgccgcgcgcagccccggttcccgccagcgcctctccctccacacctccccgcaagctgagggagccggctctggcctcggccagcccagaaagtggctcccacagtgcagccgtgggctgaagggctcctcaagcgtggccagagtgggcgcagaggccgaggaggcgcccagagcgaaagagggttgccagggctgccagcacgctgtcacctctcagtataactggtattgcattctgtttcttactactttattcaactttatttttttgaaatttgtctacgctgctattccttccatgctgtttattgcctctgacactgtatgttctctcatacatacccatataccacgttactcatacatttacctatgtctgatctcctaggttgccttcaacttacttatagacacagtatgctctggcaggcatcattgtacatgtctccttgtgcatctgtaaagagcacgtctaaagtacaaatacaagagtggaatttgggaatacaaagtatgggcttacagttttcagtaaatactaccagattgctctccaaatggctatgtcatgttggagctgcctctctcaatattgtaggaggtttctcatttccccacatcctcaccagcctttgatattatataactttttaatctttctaattgtttaacaaactgatagctataaaatagtgtaatagaagtagaatcatagtggttgtagtggtgttgggaataatgctcaaaatcctaaggaaattgaacactcaaaccaaggattttcagcaaagcaattttacttctgcacagaggggtgcttctccctggccagtcgccatgagagcacaccagaacaaaggggcatgagagcctctattcatgacgcaaaccctgcccccgtaccctttctccattgactggagttgggccgcacaatctaaactaaccggtttggctaaacatttgaattttctttagataaggtgggcacgtaagagagagaggaaacggggaagaggtgtctgaaatgagctagagaactagtcttctgtcca

SEQ ID NO: 1242 - DNA, 6000 bp, Homo sapiens
ggaagagaaaataaaggcctggaaaggaaactggcacttggttttggagacgatttttttgtgtagaaaatgggcagtccttatctggactctggaaacattattcgttgaagattgaatttggagaaatgaattaatcacttgttagtctcagtggagtttactgccacttcctatgtaccaggtacttttccaggtttatatgtatttatccatttaatcctcatgacaattctacaaggaaatttctgtcagtatccccattccacagatgagaaaactgagacacataatgtttagtaacttgccccagctcagtgagctgaaatgggggagaacaaggattcaacctaggtcaaagccatattttaagttaggccgcttaactttcactgcatgtctctactgaagatcagaggaggagcaagagagtaggctactagggatggattgggttgttgattgaatatggagatagagagtgttaggtcaaaattaaatgatgctgttagtgaaattagaaaaaaatagaagtatgtttggataaaacgataagattgttgtgagtatgttgaacctgacctcagcaggaccaatcaggtagctatatctatcagggagttggaagtttagatctggagctcacttagccaggagaggactagggtcaggagagtgaggcacttgcctcatgcacaaaattaataggacgaaaaaaaagaaaaaaataaatcaagtattttagtatataaaatggtatttcaatgcagcacttttttaaatatcaaaatgccaaaactattaactatcaaagtggtttttttgtttgttttgttttgttttgttttgttttgtttttttgagacggagtctcgctctgtcgcccaggctggagtgcagtggcgtgatctcggctcactgcaagctctgtctcctgggttcataccattctcctgcctcagcctcccgagtagctgggactacaggcgcctgccaccacaactagctcattttttgtatttttagtagagacggggcttcatcgtgttaatcaggatggtctcggtctcctgacctcgtgatccgcccacctcggcctcccaaagttctgggattacaggtgagccaccgcgcccagcccaaagttttaagtagtggaaggatcagtacttttcctttgtctcagcctgtacagcactattaacaatcctgtctctatttgaaatgttatatcatgatattttgcattaattttgagctttaaaatatcaccttaaaatagtatttatcttgaatgctactttgttgttgttttttgtgcctctttaacttttacatcctaggcatctgtcttacttgcctcacactagctctggcctaacctagagggaatttcactttcatctatgccaaagcttctttttatttcttcaacaaagaaatgatcactgaaattgaaactgaaattgagacacctctggtttttaaattatcttaagtctagagcaccagttcttatattttttttcgtcaggaggaagagaacacatgatttcagtctacagataaggaaactgagacctaatggctcaaagttaaaactaagtttcttagtgctgcatgggacatactagatcagaagcttctctagatacaaccttgaagaaaataaaattataaagtatgcttcagggaaaaacacctggccaaataatttagattgaaagaatacgtttttgggaagagcaagtacttttgaatgagagagagaacttgaattccctttggctactcatcagctgggtgactgacctacggcaaactccaaagcttcagttccctcatcaataaaatgaggcttcatatccacctctcactgttttggtcaggagacaaaaaaagaatgtagctaataaaatttatccatcaggatctcaacttacaacagagcatgcatgcaaaataggaaaattccaggagatttttaggaagctatatacaaaagaacagaggcagagaaaacaaaaggaataaaacatgtgaggggagagttgctataacccaacaggagacaaaaagtcagacacagttattcgcctttaaaagaacagtgactttttgctgaaggagccaaggaaataaatactccagcctcactctcttttctccctctggtctccaaccaagcctcaagccagaggacatcagagcccacttgatttagctcttgtagatcaacctcaagggaaggtggaagggtgcaggatagagaagatatctaaaggagcaaaaggaagctcaccaccacataaaaattgttcctaattattgagtgttttctgtgtaacagacacaaataccttatatgtgtcgactcatttaaaccaaataatcttataaggcaaatattattattttcccattttagagatgaggaacatgaggctggctgtgtgtagttaagtaacttcctgaaagtctcagaactaaggatgaaagcaggaattgaatcaaggtaatgtgtactatagcctgttattgtcaaagatcagtaagtggtagtaattggtttcataattatcgtcactacataaaagctatttaatcccaaccaattatatttccagggttttatctcaattataatactgcgaatgcataataaagtatgttcaatatgctatttgtaacactgtattggcaaaatatacacaaaatttaaatgcctagtgttggggctcagaaaccaataccacaaaatgtgacactttgacatgctgaaatgaagaaggcttaagttttctttgaccttccttcaccaatcctctctttcccaaagcacagaatgaaggtattctctgaagttcccttatctgcctaaagtctcgacttgccaaagaagaaaacagttacctctggtctcttccctgactttccacaaactgaactcatattgcagaaagaaagactgaagtctgtcaacacacacggagagctctgcaggcttaacatactttgtctcaggccactgtatgttcttcaaacacattgaattcccctaaaaatcattttctaaccccccaaatcacccatacatcacccatctgcctttcctctaataaggaggtacaaccctctgtacctcattgggatattggccaatcactctgtgattctcccccatgcccgctgataaatttgtatgccatttgtcctgttaatctgccttttgtgacttgatttttcagtgaaacttcagagggtagaggggaagttttcccttggcccctacactatgaactgagatagacaaaataaattagtatgtttataaagtggaataccatatggtcagtaaaaaccggtagctctatgagtactgtgtgttgatacacagacacacacacacacacacacacacacacacacacacacacacacacggggggggattcgaaaaggttatatgttacattttctgttaaaaatttaaaataactacattacctatattcttgttgacaaaatttgagtgcctggaaaaatacataagaaactggtaacgtaattgcctttggggaaagcaactgggtggcagggtgaaatggagataattttttattgcacacattttgtacttttaatttttttaccatggtcatgtaataacctattaaaaacataatttaattaaggaaaaaaatctaattttgcattattattgaccttccagggattcatgtaatttgagaaattgaatgaaaacaattttacatgcatgaaattcagctttcttactctatacatcctgagtgatttgcctttttcagtaacagaatcctttgctataccagcttgttaaatgaatgccaaatcaagagtaaaatttccatctgtattccatagtgttttagccatgctgcaaaagcaaaacctgtaggtaaaacaaagaaaattatcaccttgaagctaggtaacaggtaacccagaagtccggccaagcataaaattacagccacaaacagccctgcagagaacatctcaggacggcggctgctgggtttttgttgttgttttcatctttcttggccaaaggaagcaggtgttaagagagctcaaccacagctcctgaactctgagatttacagagctctgtcacctggggtaatactgccattcttccaggttttcttcctgtccaagaaatctgacatgctgtttttcatggtattttcaaactggaagatcgagacagaaactttggtcgtcaggaatgcagagattgcccaatgaaatgacagaattgatcattaggatgcttgttactcaaaaagcccattttttaaagaaggatgtattaaaattattccagcatgctaatgtggcacactcctctgctgcctaacggcaggtgttgctattagcagaggaagccttgttctaagaattattctagagggccagaaagaacaggtattgctccacccgagtaaacgctgactcaactctgcagggctggcgcgctctttcctcacctcacccctcctgccaggcacaactgagatccagaaataagaggattagcgagagaaggggaaatatgcaggacggtagtgatgggtatgcacaaaggagtgccaagcagttttaaccgttaatgttcttcgtctattgctagagaaaatgtctttccttggaggaggcattggcacgagttactataaactccctctgaatctcaagacttctgggacgccgattccgctcctggcctggggcaaggcgtgggagcttggaagccagcgctgcgctccccgtgggaagcgatcgtctcctctgtcaactcgcgcctgggcacttagcccctcccgtttcagggcgccgcctccccggatggcaaacactataaagtggcggcgaataaggttcctcctgctgctctcggtttagtccaagatcagcgatatcacgcgtcccccggagcatcgcgtgcaggagccatggcgcgggagctataccacgaagagttcgcccgggcgggcaagcaggcggggctgcaggtctggaggattgagaagctggagctggtgcccgtgccccagagcgctcacggcgacttctacgtcggggatgcctacctggtgctgcacacggccaagacgagccgaggcttcacctaccacctgcacttctggctcggtaagggacggcgggcggcgggaccccgacgcaccaaggccggcgaggggagggcgtaggggtctgagatttgcaggcgtgggagtaaaggggaccgcaaactgagctagccactcgcgcccccacggggctgcctttggggccggccactttctccctaccgaagtcaactcgccggctgcaaacgcggggctcaggcgttgtccgcaattgacttacctcgcaggctttgacctttgccaggtgtagttcctggactttggagctggtgactggcttcttcccctttcaccgtcaagtatccaaacgccactcttgtccagggccgctgcctcagcgcacaccgtctctggccaagccccgctcaccttccgacaaactcagtcctgctttccctgtcgggatggagaggaagtcataaagtctgggggcatctgccgccgctaggaagaagtccttttctttttcttcacacattatttttatttgttgctttcgggcactggcttattttctctatgattgcgggaattattgttctgggcttctttaaaacaggattctacccgcaccatgctgcttgtgggtctggtagacaaaaactccgcttcattcggaagctggcgtcctcagatagaagtaagaaaaaaatacagatattttatatacaaataaatagctctatatgggtatttcatatatttatgtagactgctttattgttattatttattatttattttagcaaggacacaagatggaacagaaacggctccttcagcagtagtaattattttgagc

SEQ ID NO: 1243 - DNA, 6000 bp, Homo sapiens
tctgaggggaaacaacaacaacaacaaaaaaaaacaactcagtagctagaagattacttgacgtgataacaattttgtgaactcgctgtggtcaaagttaagtatttgacacaccggcaattttgcaatctgaaaggactctggtgtcattcttctgccgatttgggatccgaaccctaactgagaataccataaagatgtagatgtagatttttatgatgccttaagagagatgctttaagagataacttggaatcaaggttaacatcaaaggtgttaaagatgatgtatttgacataaacgtccttacctgactacaggttgaaacctgaatctctttaggtagatgtaaatggacaggcatgaagttaatgaatgaactgaaagtaagttaattaaattatcctatcatttgctgatgcttatgtaatgtggttggccagggaatatctgtatgaataaaacaggatgcctgaatgaggttgacggtcttgatgaagccaatgtcagcctttggatgcgaaaattagaatcaaatccagttgtagcatgatggaattccagaaagtatttagaaacttatgaactttgtgtataaagtctgcttaagaatcagtttagttttcccctacgaatctgcttatgatttccatttgttgtttccctacactgattttaccggtgtcttttatgttctgttatactatgctgtgccgtgttattttatattatgttagacttgtgtacatcctatgaatttctataagtattttgtggatgtaatgattttatagataaaaagagagatttaaaactaggttaatccaacagccattcatgataaaataaaataagtcaaattaggaatagagaggaacaccttccaacgataattagagtcaacaaaaaacacagagctagcaatgctgaacagtaaaagactaaatgtttttcccataaaatccagaaaatgggtgtgcactcacaccactcttattcaacatagtacagcaagttctaaccactgcaataaagtaagaaaaagaaaaaaaaggcatacaaattgaatatgaagaaataaaaaggtctctatttagagacaacaatattgtttacatagtgaactctaagagacctatccaaaaaaaaaaaagaaaactctcctagaaataaaaagtacattgagcaaattagcaggatacaagattcatcagtaatacaaaaaatcagtcacatttctatatagaaacaatgaacatgctgaaactgaaattaaaggcgcaatgctattgacaatcactccaaagaaactgaaatactcaggcatatagtttaaaaacatgtacaggatctgtatgctgaaaattacaaaatggcattcaaaatatcaaggaagacctaagtaaatgtaaacgcttagtgttcatggattttaagactccacataataatgatgtcaatccttcacaaattgatctataggcctaatgttattcttaccaaaatcacagtaaggtttattatagacatatacaggcttattgcaaaatttatatagtgaggcgcaggccctggaatagctaaaataatcttgacaaacaagcataaagtggggggaatcactctacctgatactaaggtttactacatagctaacgtgattaaaacagattggtactattgaaggatagacacagatcaatagacccaatttcccccagtagtggcaactttgtaaaattacagtatagcttaacatattaatgtatagtacagtatagcactgaacaccacaaccaggatattggcattgatataatccacctattttattcgtattttctcagttttacttgtactcgtgtgtgtgtgcatttagttctataaaattttatcacatgtgtaaattcatacatctgctatcacaatcaagatgctgtatagttccaccaaaaacatccttcaagttgcccttttataatacactcttctcctgcccacatcatcccctcttcaccctatctgtaaccaacggcaatgccaaatctaaaattttgtcatttcaaaaattttatataaatgggatcatacagtataaagcctcttagggtttttcactcagcatgattccctggagcttcatccaagttgttgtatgtatcaatagtttgttcctttttattgctgagtagtattagttggtacagatgtacaacttgtttaaccagtcacctgttgaaaagcatctgggctgattctagtgtttgtttattcaaataaaactgctgtggacattcaggtacaggttttcatgtgaatacaaaacttcatttttctggaataaatacctatgaatgcaattgctgactcatatggtagtagtatatttggttttgtaagaaactactaaactcttttccagagtgctgtaccattgcatgtacccacccccatgctccagcaatgtaaatgatccagtttctagccagtccttcgtataagttctttgtatcgtatattgtaatccaatcctttggattcccagggcattgcacaaggcctggtatagcccacttataacataaatgtatactgctttaaaatatatttgtgtgaagtttaaaactggcaaagagaaagagtgaggataagtgtttgtaccttaggttagggatgtgacagggagcagttttactatctagacctacccattgatttggtgctataaggaactacaaacagaggtgaatggatgcatttaaactgctaggtgcaaagctgaaatgtttttaaagaagggctaatgcaataacatttaagttctttgcaataaatttttactttcattacatttaagcatatgatgttaatacattcaagcatgtaatgttaatacaataaaataatctgagatatgccaagtgttatggaaacactgagggagagaccaagaaagacgactctcctgctctgttctctcttgttctaggtccaacttcttcctgtttcccctttttgcctcccatttggcctgtttcttcatttctatgctatgcaccttttttcatctcagtttaactttagtttctctttcttccggctgatttcctttaaccaaatgttcttttcccctggaagttcagctctctctcctgtgactttctctcaatctgtctctctgatgaatcctcatggattcatcctaatttaggtcttagactacactattttggatgaaattctgttttcttagggaactgaagtaggaagagctgttgggcaatcccatctgaaagtcctgttgactattttacttgaagctttttttctctccataattctctcttgacacaagaacacttccaagtactctcattttttttttctctaaaggcttctgtttcccaataaccacagaaactttgtgctttcacagtaattatcacattctacctgtgttatatcactttttgtctttttgcacctttgaggtgatgaacttttagagaagtttcattaattattcatatccacaagtgccttgtacagtactggccatattgaataattactgaatgaatttgcttgttattaacatgttattgacttcagttttagcatgtctttaagattataaatgtttctgcccaaaccattttctattatatttttgaaatttatgggcatcaagtggataattaagtagataattaagtgaataaggtgaatctgtaaaccctacaaaatatagtagttaagaggacaacttggataaaaatgtatagaattaaagaattgtgttcaaatctcccttgcggtcatctgacaaagtcaaacttaactgctgtctacagtaagatatggcattatttcacattttaatttactcaaatggcaaatgtggcatttcaaacactttcattcatgctagatttaagttctgcatggaaagtcctctgtaaggacatcattattctatctggcatcattcattcttgaacatgggttataaaagtttcagtcttttctggcagaaaatacaaatagatgactgtgtattacaacattataataggaataacagcaatgcatcaagaagccaaaatgtgttcagaactcaggctgagccttctctgcctcctcaagctaacacaaatttttgactccaaatgttataattaaaagtcttatcttcatctacgtatttttcatttctcatttctcaaatgcctgttccaggtgtttgccaatgtttagacagtcactactcaatgttttctattattttgtttcttaaaatcttcaaatgttggaaattacagtgttggctttcagggactcaaaaatgtgtaagtgtgtgtggttttgtgtgttttcctcctaagctcagggataaaactaaacaaacacgagtactgggcaggctagctagttttaaaagaaggcaaaaaggctcagagaatcggcatgttgttagacagggtgtgcccactggcacaagacctcctggggagaggctggacattcaggatgtttatgagtaaaagtagaaggtggaaaaagaacacacaaggcccagtgtcctgacagcctggcacgaacgcagctcaaaataattactactgctgaaggagccgtttctgttccatcttgtgtccttgctaaaataaataataaataataacaataaagcagtctacataaatatatgaaatacccatatagagctatttatttgtatataaaatatctgtatttttttcttacttctatctgaggacgccagcttccgaatgaagcggagtttttgtctaccagacccacaagcagcatggtgcgggtagaatcctgttttaaagaagcccagaacaataattcccgcaatcatagagaaaataagccagtgcccgaaagcaacaaataaaaataatgtgtgaagaaaaagaaaaggacttcttcctagcggcggcagatgcccccagactttatgacttcctctccatcccgacagggaaagcaggactgagtttgtcggaaggtgagcggggcttggccagagacggtgtgcgctgaggcagcggccctggacaagagtggcgtttggatacttgacggtgaaaggggaagaagccagtcaccagctccaaagtccaggaactacacctggcaaaggtcaaagcctgcgaggtaagtcaattgcggacaacgcctgagccccgcgtttgcagccggcgagttgacttcggtagggagaaagtggccggccccaaaggcagccccgtgggggcgcgagtggctagctcagtttgcggtcccctttactcccacgcctgcaaatctcagacccctacgccctcccctcgccggccttggtgcgtcggggtcccgccgcccgccgtcccttaccgagccagaagtgcaggtggtaggtgaagcctcggctcgtcttggccgtgtgcagcaccaggtaggcatccccgacgtagaagtcgccgtgagcgctctggggcacgggcaccagctccagcttctcaatcctccagacctgcagccccgcctgcttgcccgcccgggcgaactcttcgtggtatagctcccgcgccatggctcctgcacgcgatgctccgggggacgcgtgatatcgctgatcttggactaaaccgagagcagcaggaggaaccttattcgccgccactttatagtgtttgccatccggggaggcggcgccctgaaacgggaggggctaagtgcccaggcgcgagttgacagaggagacgatcgcttcccacggggagcgcagcgctggcttccaagctcccacgccttgccccaggccaggagcggaatcggcgtcccagaagtcttgagattcagagggagtttatagtaactcgtgccaatgcctcctccaaggaaagacattttctctagcaatagacgaagaacattaacggttaaaactgcttggcactcctttgtgcatacccatcactaccgtcc

SEQ ID NO: 1244 - DNA, 6000 bp, Homo sapiens
attacaatataacctcctcagcctgaggcataagatagtaaaattatcagtttagccagtttgaaagtgaagaacatcatcaatattttggagaatgatttagacccattgtctcatagttagcttatttttagacaataacatgaaatgtggccagatcttaccaatttacagagtcattggaaaaacacttttgaacaatatattttaaagttggtgaatttattagtcatgattttcccatgatttttaaagatatgaactatttttagaaattagtaaaattacatctgaaaatactgtaaaatactaccagtaactgcagaatgtgaatgatagtggaagaaaagcccatattcttaagatttggagtctggggttaactcttggaaagatatgtcacagtcagccactagtgaagaattctatttcccaggagtaggaattcctgtggtgagttactgatcctgatgttccccatgttctgtttccttgctgtttggtccgtgatgcagctttaccctgttctcctcactatttataaatgatcacgccctctcccattgtccagtcatgctgctttgaaaaaacagtctccacttcctcatttaccagtcagtctttaacccacagtcagactttcactctcacagttcctcggaaaatgttcttgttatgggcatcgatgacccctggtaaatccggtggacaccgtgacattatgcacgtgattcttgtgttgcaacccacacttttgacttttcccagcttatccagcctcactcctcccctggcttccttgtttttctccctctcaggccactgttattcttctttgcatggcctgcccttcaagtgcttttttaaaggattttaattattgtctcttcttttatacattcttcctaagcaaactcatccccacccagagcttcaactactacccatgagtcaatctaaactttaaatctaactcagacctcttgcctgagctccaagtcagtatttcagatatttcatgttatgtgtgtcataagaacctcaaactcaacacatctagaaaatgatttcttctctaattgtctttatcttattaatggagccaccactcactcaggatttcaaagccaaaatccaggagtcatcctgacttctcccaagtgctctacattcatttaattgctatcctagcctgttccaccttctaattatctcttgaatctttcctgttctcttcattgctgttgatactgtcttagtacccagtgcctgacacattccttcaagtcaccagacttttgctgttgcagatggattcctttgctagaatactcgcctcttatttggcaactttctccagcaggcatccaatattttctcatcctttgatatccacgtcagatattgtcttcttcatagtttgtttcctgaccttttcttctgcttccactgtccagtgtcccagccctttagggtcagatttagacttaacttccctgtcattatgcagagacttgcttctcagccttttttatattgcttgtccatttacttatcagccttcctcactcactgtgtttctaaaatataaagcctacaacttacagtcactcaacagatgtttcaacaaatgtatatctatccagcataaagtatatggctcatgcagccacatgtctacagtgttttttaattcatttataactcaactggaccctattctcaagctcctatttccccagaaggtttaaaaataattttgatttattgaaatgaattttgaatggccaataagtaaatgaaaaaatgctgaacatcactaattatcaggaaaatggaaagcaaaaccactatgagatatcatcttatcccagttagaatgactgtcatcaaaaacacacacagaaaagacaaatgctcatgaggatgccgagaaaagggaactcttatacgctgtggtaatgtaaattactacagccattatgaaaaacattatggaagtttctcaaaaaaaataaaaatagaactaccatatgatccagcagtcccactactgggtatttatctaaaggaagggacattagtatatcaaagggatacgcatgcccctatgtttattgcatcactattcacaatagcaaacgtatggaatcaacataaatatccataaacaggtgaataaagaaaatatggtatacacacaatggaacaataatcagccataaaataaagtatggaatccttccatttgcaccaacgtggatgaatctggaggatattatgttaagcaaagcaagtcatgcgcagaaagataaatacttcatcttctcactcaaatgcagggacttaaaaaatgagctcatagatctagagagtagaattgtggttatgagagattgggaagggtagggggaggggaggctagggagaggttaattaacagatacaaaattacagcaatataggaggaataaattctgttctactgttgtatagtgctatgtggtgaatacagttaacaataatttattgtatattttttcaaagctagaaaaggatttcgagtgttcccagtacaaataagtgataactatttgaggtgattgatgtgctaattactctgatttgatcattacacactttatacttgtatcaaaatatcactctgtagccaataaatatgtacaatttttacatgtcaactaaaaataaaaaggaataaaggtgaattttgttagccattaaagcagtttgaacttatcctacccatcctcttttccatccctcaggagtaggggacatatatgtaatattgtagcctgggggtggggagtgaggatgaggatggatgtgtgagtctggtttgtactcatcagtcctcactaatctataaccttcgttgaggtgtagtcattccattaattcttgagctttcggctttggcctctgttccccagacatttgctagggaatatccatagcctcattttagtcttctgatgtcatggccacatatcactacaacaccctttctggttctgtcagccactactgcattcttctcaggaactctgctttgtttttcccagactaccctagaattgtgggacacggtatcctcatcgtaccagtgccccttggcccagtggcttggatgctaccctcagtcatttctgctctaatgcttaggctcatggaggggtgtaggacaaatcaattggaagggaagtgtgctgggctcttctcaaagattgattgctttgggttagatttcctacttttttcagtcttcttttttactttttgaaccagacaaactagtcttacaccacctcacattcttgcctactctgtgtttcctgcaagatacactccagcccctaagacccacaccgtactgcttaagatgcaaaaccagctttcgaaacagcatcctcacttactcctggccaaaaagctgtagcaaaatcaaatttcttttaaattaaaactatgttggctttcagacttttgtctctgctattacttaaaaatgcttattttaaaactaaagactgaactaaatcttctctgttctggataaatttgtccttacccccaaagtaatgcataccactagatttataagaggagagccttgaggcaataagaatggataatgggaaagatacaccaaatcttagatctctaaaatgtaccctgaagtaaaagtagggatgaatggcatttattctgtgcctagtgcgtgccgagtgaatagaattgtaagggtaaacagcagataggctttgaccttcaggtactgtcaaatgctgggaggcatagacacatacacaagtaagaggatgacaaggtaaaatgtgagacatgcaggaggaaaggtgtaaacacattataattggagaatggatgagggcgctgtaaggttagccgagagaaaggacgagagagagacccaaggtcaggagagtaagtttactaacctgccaggctgcttcaccacagtcaaaggaggcagccctgagcttacaaaatgagggttttatatgggggagagagaccctggggttgtttgttggttaaccttaccacatatcatctcgtgaccaggttacaatataggaatttacaagagggtgtaacttaggtttatccacgtttctcgtgacctcccccatgctgcccgtagggctgtaagcaagtctggtgaccttgctgtagtgcctagataagggtccaggaatgcagctgcagagtattcagggtaagggacagctgcattgggtgggggggggggggtgcgggggcgggtgggaagggggaggggttctggtgcaacttgttcctaacattccagccttttaataggtaatagaagaggggcgccgttgtcctctggctgcttcttgctggataggggcgatggttggggggagaggctgggtagtagggactgctgttcctggagctgtcggtattctcggagtagcatcatgtcttgtactgttccatgggtgaaggctctaacacggccctgtaaaaactgggtaaggagatgtaagagacatgggccaagtgctaaatggaggaagagggtaatggcagggcctaggaagggcagtagccagggtgcccaggagttacgaaatcacctgggccgggaatctgaaaggcgctgcctgatttcagcagctttttttttttttttttttgagatggagtcttgctctgtcgcccaggctggagtgcagtggcatcatctctgctcactgcaagctccgcctcccgggttcaccccacacgccattctcctgcctcagcctcctgagtagctgggagtacagctgccggccaccacgcccggctaattttttctatttttagtagagacggggtttcaccgtgttagccaagatggtctcgatctcctgacctcgtgatccgcccgcctcagcctcccaaagatctgggattacaggcgtgagccactgcacccggccagaagctttttcatttattcgtccagcagcatcttgtactagtcctgactggttagtatagaaacagcactcctcttctaaaaagatacacaggccgcctttctcggcagtgaggagatctaaacctcgatggttttgaagtgtcactgctgcttaaagagtcttttggaattggagagcaagtctatttgggattggagaccccttcgtggggttttgggagggcctggtcggcttgttggcagaggagatagctcatgagggagactgttgggaggtattctcctagctgagagttagaagggggcctgttttgtaagaggaaagggcgtccgtatattaactcaaatggactgaggaaggagggtgcttttggactggctctaatgctctccagtgctatgggcaaaagggaggtccatggtttttggacttcaagagtgagtttggttaactgagccttaaggatcccatttgccctttcgacttttccggatgtctggggccagcatgggatatggagacgccactggatgccaagggactgagaaacctgttgagtgatttgggagatgaagctaggggccattgtctgattgtatggagccagggagaccaaatgtagggatgatttctgttacaagaatttgggagacttctgcggccttttctgaagaggtaggaaatgcttctacccacctagagaaggtgtctataagagtaagaataaattttgtcctcttgacgggatgaatgtgggtgaagtctatttgccagtcctcccctgggagtgttcctctgaggggatgtgtagggatggagggagagtggagggccccttgggaggaagtaacagagcatataggacagtttgaggttatgtctcttagtgaggtgaatagatggggggaggagaaatagggtgaaggagtaggtatgggggcgcacactgatatggaaggattggtgaagagatgtcagaatttctttggtctgctct

SEQ ID NO: 1245 - DNA, 6000 bp, Homo sapiens
aattaagaaatctgctacctcctttcaggtagcagcccttaccagggctctagaatctcctgaatcagtttagtctccctgaagccactaagatctgggcatgtcaaaatgggtggcaccctgcccagtcaaagcacttccactaacaggtccttgggtgggaactagaagacagcatcaggcttttgggctttcaaaaagtatttcttaatgtagagactcctattcctgtagtcccattaacagtagactcttgattaataagcatggctaatgaaaatccacagaatcacagaaccacagaatcctggagctaggagggaattcagcaaacccctaaggtgggagagtactttgccccaaatcctcagttcatcgtcatctgaacactttcatctgccaacagctacactcccaagacacaagaagccgaggatttggcaatgcagtaaaaagacaagcctaattcagggaaaccctacattcagccaaaattttttgctggcagtataaaacccccacttccttctgaatcctgcagtctaaatcaagccaagaagggcaacagggcttttacaagcctggccaaccgattacccacacaatgtcagacagaaacagcccaggactcaaatttccctctgacacctgacctgcccctgactacatacctggtgtcttcagtagtttcactgggcccatggtggacaaacttaacacagagaaagaatgtgcatgacagcctctctattggttgtcctagagagataggaggatctgaggcacttggtggcaactgcttaggcagcaagcctccaaacaagcctttagcaataggaagccatttccacacatccagatcacttgccaagctgatgggtgccttccctcctgtccccacctctccccgacccccgtctcacccacagaaaagtagcacatagaaaatatggcttccagggtgagagatatagggaatcccacagtgcccttgggggacacagtaatgtggctcagacatagaccactgtacagatccagcagcacaggaagggctgcaggcctgggagaaaagtgacagcagatggccggtccaggctttctgggtacccaggcctgtaaggccacactcatatgaggcaggcagcaccccttggaacaatatctatggtaggtctatagaccaagggctctgctctgtgccgcagacatccacacacatacataggtacacatgacatagaattcaatagcttgaagaaattgcctatgattcttcaacttgcttacctggatctgaattcttccataacattttaaatcaatccaggtgtacccatcttcagaaataatggaccccaatgtctcagaattacagagtcagagtcctcaacatgtccaaagcatttcgtggaaattattccaccatgaagactagaatggcctctcttcatggattcagcttgctaaggaggcttagttcagagggactaagacactctccttttagcaaataactaaccaaaagggcaaggaagggaggtaaaagacgtcataaccaggccagtagaatcccctggtctggccattacatgtgatgatttcaaatgggttcttagtaccttaattttgagggaaaagagtagaggaaaccagccaatgctttgcatgcttagtttctgctgatgacactgaactcagagaactgagatctttggagaaaccaaagatggctcaaatgactcgtgataataaatgaacgtattactgctcgctgacaaattgaagtttcctaattataaagcagaaccagtggccaccaccatagaaagcctaccccacagatggagaagaggcaaagcactgaaactcagtccgagggacctccccagccatgggggcagggccaaatggggcttcttcaggaccagcaaagccatttttctcatcagcaaactagcttcagagaagtttgcaatcagggcactctcttccaagcctagagacccagggaaaggggtacgggggtgtcccaaggcaaagagaatctacactttttgcccccggagaggctacttccctcccaagatgcctgggattttccacttcagcagggggaaggtaagtcacatagcaaaataatgagggcacagaacagatgacctccctatagagttttgaatgagaaacacagcagggcagatgtgccccttctctagtctaggaggagctaggtccagcccctgaacatcctccccctcagaaaagctgaggccagactaagaattcaccagaccaaggagctacaacaggacatcagagctgaggctgcaaagccaggactgagaccagaccaggcaggaaactgtcaagagctttggtcaccaggcctggctgccctccaacatcagctggctctttctaaattgacacaccacatgtccctaaaattctctcttcaagtaataccaccatcaaagcaggacatttcccagagccttagagcctggtgtctgctcagtgggactcaaccccagaagaagctgttaaatcacccactgtttcagtttacaaacttcttacgacttggcaacaagtgaaactacattctggcagcaactgcaagttccctagtacccaggacttcccgttttttcttgctgtactccctcctgttaaatcacagactcatccatctccaacccccagaatatagagaaagagcacaacactacatcttaactcctgagacgtggagaacacttctcctcctgagagcttaagtaccaaatggaagctacttttcccccttggtctcaaatgtattactagattctgaactggactccaccatcacgtaagaaagcagtcatgggcagtaattctgggagatccagataggacatgccagccccacactggtggcataggaagccaagttgctgcttcctccctgtgcactcccatttgtctggcctctcttgatctcagctggcgctcacttcacatcagctatgatgcaatccagcaactaaagtattagttaataaatgctgacagcacagccttttctggtcacgtattcatactaaaatacgggggagagttggggggagagggggatatatgggaaatctctgtaccttcctctccattttgctatgacctaaagctgccctttaaaaaatacaaggggctgggcacagtggttcacgcctgtaaacccagcactttgggaggccgaggcgcgtggatcacctgaggtcaggagttcaagacccgcctggccaacatggcaaaaccccgtttctactaaaaatacaaaaagtagctgggcgtggtcgcatgcatctgtagtcccagctactcaggaggctgaggcaagagaattgcttgaacctgggaggcggcggttgaagtgagccaagatcatgccattgccctccagcctgggcaacagagcaagactccttctcaagagaaaaaacaaaacaaaacaagaaaaaacaaagaatgagctctccacgcgaaaaatccattgagatgcaaaggaaggaagctatcattgtggaattgcacatgtcagttacattaacgtttttggagcaaggtagagctcatctctcccacaagcaaattccagcccaaagcattgatactaataaagtgccatgctgcgatgtgcagggggcagacagtgtctccaagctccctacacacatgccttcccacagtttgccctttcttgaccccagaagcatcaggccccttcaccctcgagggccactatcaggagtttgaattaatggcaatcaccatgcacagggaaggctgtggaattctgacataaaaacacttagtggagggcttggaaaaagtctagtaggagcaagacgcaagctggactaattatctaaaacaagagacctggtttggggatcttaatgttctcaaaaaagaaaattattattatttttcattttgcactttgtgccataaaacattttcaacaaaacatagaatctcatttcttttgagggaaaatgattgggagaccagctcattgctggcacagaggcctggttcattcataattccttcataggcaagacaccaggtgaaccgatatagccgagctggaagagctctccaaggcagagactctgagccaaggaatgttcaaagagctagcatgtattgtgggattactatgcgccaggaattttttacactgcatcacgttccatcttcacaacagccctagaaaggaagaactattattacccccgttttataggtgaataaacaagggcacaggtccttgatgtaacagccaggatcaaacagctgggaagacgagaaaacctttcccaggctaggataacagaggatttggttgaaaatacaggcaattaggtgctacctctgggaaaaggggccaggagaggaaggagacacttttccctgcatgccctgatgtcctatttgaacattttatcatgaacacgaacttcctatttaaaaaacactttttattgaaaagataaatctgtgtgttgtattgtgtcactcagttcaagtacttgaaatttattgaattgtattttctaaaaaatagatagttgagtaaaagcaagctcacattacatagacggatcacagtgcacggctgcggagctgggagcagtggcttcgtttcatgcaggaaagagaacttggttcaggagtgtctacgttgcttaagacaggagagcactaaaaatgaaaccatccagccatcctcccccattttcattttcacaccaaagaatcccaccgcggcagaggaccaccgtctctgtttagacaatcggtgaagaatggatgacctcactttccccaacaggcgggtcctgaaatgttatgcacgaaacaaaacttgagtaaatgcccaacagaggtcactgttttatcgatcttgaagagatctcttcttagcaaagcaaagaaaccgattgtgaaggtaacaccatgtttggtaaataagtgttttggtgttgtgcaagggtctggtttcagcctgaagccatctcagagctgtctgggtctctggagactggagggacaacctagtctagagcccatttgcatgagaccaaggatcctcctgcaagagacaccatcctgagggaagagggcttctgaaccagcttgacccaataagaaattcttgggtgccgacgcggaagcagattcagagcctagagccgtgcctgcgtccgtagtttccttctagcttcttttgatttcaaatcaagacttacagggagagggagcgataaacacaaactctgcaagatgccacaaggtcctcctttgacatccccaacaaagaggtgagtagtattctccccctttctgccctgaaccaagtgggcttcagtaatttcagggctccaggagacctggggcccatgcaggtgccccagtgaaacagtggtgaagagactcagtggcaatggggagagcactggcagcacaaggcaaacctctggcacagagagcaaagtcctcactgggaggattcccaaggggtcacttgggagagggcagggcagcagccaacctcctctaagtgggctgaagcaggtgaagaaagtggcagaagccacgcggtggcaaaaaggagtcacacactccacctggagacgccttgaagtaactgcacgaaatttgaggatggccaggcagttctacaacagccgctcacagggagagccagaacacagaagaactcagatgactggtagtattaccttcttcataatcccaggcttggggggctgcgatggagtcagaggaaactcagttcagaacatctttggtttttacaaatacaaattaactggaacgctaaattctagcctgttaatctggtcactgaaaaaaaattttttttttttcaaaaaacatagctttagcttattttttttctctttgtaaaacttcgtgcatgacttc

SEQ ID NO: 1246 - DNA, 6000 bp, Homo sapiens
ttacagagtcagagtcctcaacatgtccaaagcatttcgtggaaattattccaccatgaagactagaatggcctctcttcatggattcagcttgctaaggaggcttagttcagagggactaagacactctccttttagcaaataactaaccaaaagggcaaggaagggaggtaaaagacgtcataaccaggccagtagaatcccctggtctggccattacatgtgatgatttcaaatgggttcttagtaccttaattttgagggaaaagagtagaggaaaccagccaatgctttgcatgcttagtttctgctgatgacactgaactcagagaactgagatctttggagaaaccaaagatggctcaaatgactcgtgataataaatgaacgtattactgctcgctgacaaattgaagtttcctaattataaagcagaaccagtggccaccaccatagaaagcctaccccacagatggagaagaggcaaagcactgaaactcagtccgagggacctccccagccatgggggcagggccaaatggggcttcttcaggaccagcaaagccatttttctcatcagcaaactagcttcagagaagtttgcaatcagggcactctcttccaagcctagagacccagggaaaggggtacgggggtgtcccaaggcaaagagaatctacactttttgcccccggagaggctacttccctcccaagatgcctgggattttccacttcagcagggggaaggtaagtcacatagcaaaataatgagggcacagaacagatgacctccctatagagttttgaatgagaaacacagcagggcagatgtgccccttctctagtctaggaggagctaggtccagcccctgaacatcctccccctcagaaaagctgaggccagactaagaattcaccagaccaaggagctacaacaggacatcagagctgaggctgcaaagccaggactgagaccagaccaggcaggaaactgtcaagagctttggtcaccaggcctggctgccctccaacatcagctggctctttctaaattgacacaccacatgtccctaaaattctctcttcaagtaataccaccatcaaagcaggacatttcccagagccttagagcctggtgtctgctcagtgggactcaaccccagaagaagctgttaaatcacccactgtttcagtttacaaacttcttacgacttggcaacaagtgaaactacattctggcagcaactgcaagttccctagtacccaggacttcccgttttttcttgctgtactccctcctgttaaatcacagactcatccatctccaacccccagaatatagagaaagagcacaacactacatcttaactcctgagacgtggagaacacttctcctcctgagagcttaagtaccaaatggaagctacttttcccccttggtctcaaatgtattactagattctgaactggactccaccatcacgtaagaaagcagtcatgggcagtaattctgggagatccagataggacatgccagccccacactggtggcataggaagccaagttgctgcttcctccctgtgcactcccatttgtctggcctctcttgatctcagctggcgctcacttcacatcagctatgatgcaatccagcaactaaagtattagttaataaatgctgacagcacagccttttctggtcacgtattcatactaaaatacgggggagagttggggggagagggggatatatgggaaatctctgtaccttcctctccattttgctatgacctaaagctgccctttaaaaaatacaaggggctgggcacagtggttcacgcctgtaaacccagcactttgggaggccgaggcgcgtggatcacctgaggtcaggagttcaagacccgcctggccaacatggcaaaaccccgtttctactaaaaatacaaaaagtagctgggcgtggtcgcatgcatctgtagtcccagctactcaggaggctgaggcaagagaattgcttgaacctgggaggcggcggttgaagtgagccaagatcatgccattgccctccagcctgggcaacagagcaagactccttctcaagagaaaaaacaaaacaaaacaagaaaaaacaaagaatgagctctccacgcgaaaaatccattgagatgcaaaggaaggaagctatcattgtggaattgcacatgtcagttacattaacgtttttggagcaaggtagagctcatctctcccacaagcaaattccagcccaaagcattgatactaataaagtgccatgctgcgatgtgcagggggcagacagtgtctccaagctccctacacacatgccttcccacagtttgccctttcttgaccccagaagcatcaggccccttcaccctcgagggccactatcaggagtttgaattaatggcaatcaccatgcacagggaaggctgtggaattctgacataaaaacacttagtggagggcttggaaaaagtctagtaggagcaagacgcaagctggactaattatctaaaacaagagacctggtttggggatcttaatgttctcaaaaaagaaaattattattatttttcattttgcactttgtgccataaaacattttcaacaaaacatagaatctcatttcttttgagggaaaatgattgggagaccagctcattgctggcacagaggcctggttcattcataattccttcataggcaagacaccaggtgaaccgatatagccgagctggaagagctctccaaggcagagactctgagccaaggaatgttcaaagagctagcatgtattgtgggattactatgcgccaggaattttttacactgcatcacgttccatcttcacaacagccctagaaaggaagaactattattacccccgttttataggtgaataaacaagggcacaggtccttgatgtaacagccaggatcaaacagctgggaagacgagaaaacctttcccaggctaggataacagaggatttggttgaaaatacaggcaattaggtgctacctctgggaaaaggggccaggagaggaaggagacacttttccctgcatgccctgatgtcctatttgaacattttatcatgaacacgaacttcctatttaaaaaacactttttattgaaaagataaatctgtgtgttgtattgtgtcactcagttcaagtacttgaaatttattgaattgtattttctaaaaaatagatagttgagtaaaagcaagctcacattacatagacggatcacagtgcacggctgcggagctgggagcagtggcttcgtttcatgcaggaaagagaacttggttcaggagtgtctacgttgcttaagacaggagagcactaaaaatgaaaccatccagccatcctcccccattttcattttcacaccaaagaatcccaccgcggcagaggaccaccgtctctgtttagacaatcggtgaagaatggatgacctcactttccccaacaggcgggtcctgaaatgttatgcacgaaacaaaacttgagtaaatgcccaacagaggtcactgttttatcgatcttgaagagatctcttcttagcaaagcaaagaaaccgattgtgaaggtaacaccatgtttggtaaataagtgttttggtgttgtgcaagggtctggtttcagcctgaagccatctcagagctgtctgggtctctggagactggagggacaacctagtctagagcccatttgcatgagaccaaggatcctcctgcaagagacaccatcctgagggaagagggcttctgaaccagcttgacccaataagaaattcttgggtgccgacgcggaagcagattcagagcctagagccgtgcctgcgtccgtagtttccttctagcttcttttgatttcaaatcaagacttacagggagagggagcgataaacacaaactctgcaagatgccacaaggtcctcctttgacatccccaacaaagaggtgagtagtattctccccctttctgccctgaaccaagtgggcttcagtaatttcagggctccaggagacctggggcccatgcaggtgccccagtgaaacagtggtgaagagactcagtggcaatggggagagcactggcagcacaaggcaaacctctggcacagagagcaaagtcctcactgggaggattcccaaggggtcacttgggagagggcagggcagcagccaacctcctctaagtgggctgaagcaggtgaagaaagtggcagaagccacgcggtggcaaaaaggagtcacacactccacctggagacgccttgaagtaactgcacgaaatttgaggatggccaggcagttctacaacagccgctcacagggagagccagaacacagaagaactcagatgactggtagtattaccttcttcataatcccaggcttggggggctgcgatggagtcagaggaaactcagttcagaacatctttggtttttacaaatacaaattaactggaacgctaaattctagcctgttaatctggtcactgaaaaaaaattttttttttttcaaaaaacatagctttagcttattttttttctctttgtaaaacttcgtgcatgacttcagctttactctttgtcaagacatgccaaagtgctgagtcactaataaaagaaaaaaagaaagtaaaggaagagtggttctgcttcttagcgctagcctcaatgacgacctaagctgcacttttccccctagttgtgtcttgccatgctaaaggacgtcacattgcacaatcttaataaggtttccaatcagccccacccgctctggccccaccctcaccctccaacaaagatttatcaaatgtgggattttcccatgagtctcaatattagagtctcaacccccaataaatataggactggagatgtctgaggctcattctgccctcgagcccaccgggaacgaaagagaagctctatctcccctccaggagcccagctatgaactccttctccacaagtaagtgcaggaaatccttagccctggaactgccagcggcggtcgagccctgtgtgagggaggggtgtgtggcccagggagggctggcgggcggccagcagcagaggcaggctcccagctgtgctgtcagctcacccctgcgctcgctcccctccggcacaggcgccttcggtccagttgccttctccctggggctgctcctggtgttgcctgctgccttccctgccccagtacccccaggagaagattccaaagatgtagccgccccacacagacagccactcacctcttcagaacgaattgacaaacaaattcggtacatcctcgacggcatctcagccctgagaaaggaggtgggtaggcttggcgatggggttgaagggcccggtgcgcatgcgttccccttgcccctgcgtgtggccgggggctgcctgcattaggaggtctttgctgggttctagagcactgtagatttgaggccaacggggccgactagactgacttctgtatttatcctttgctggtgtcaggaagttcctttcctttctggaaaatgcagaatgggtctgaaatccatgcccacctttggcatgagctgagggttattgcttctcagggcttccttttccctttccaaaaaattaggtctgtgaagctcctttttgtcccccgggctttggaaggactagaaaagtgccacctgaaaggcatgttcagcttctcagagcagttgcagtactttttggttatgtaaactcaatggctaggattcctcaaagccattccagctaagattcatacctcagagcccaccaaagtggcaaatcataaataggttaaagcatctccccactttcaatgcaaggtattttggtcctgtttggtagaaagaaaagaacacaggaggggagattgggagcccacactcgaattctggttctgccaaaccagccttgtgatcttgggtaaattcc

SEQ ID NO: 1247 - DNA, 6000 bp, Homo sapiens
ggttaaatgacgtgatggatgcaacacatttaatgatgcctggcatgtagtaggtgcttatatgtatatatatatgtgtgtgtgtacatatatagtatatatatatatcgtatacatacatatatagtatatatacagtatatagtatatatagtatatagtatatataaatatatagtatatatagtatatatgcatatatactatgtatgcatatatagtatatatatactatatatatacatacacagtatatatactatatatactatatatatacatacatagtatatatactatatatactatatatactatatatacacatacatagtatatatactatatatactatatatatacatacatagtatatatactatatatactatatatatacattcataatatatatgtgtatatatagtatatatgtgtatatatagtatatatgtattatatatagtgtatatatgtattatatatagtatatatatttattatatatagtatatatatgtattatatatagtgattgattagctttttttggtcgtggtggtggcagtgacaagaaacttgtttatattaagcttcacgtgacacactcaaagttgctgaattttttaaaatgccatttattggtataaaaaccatttatacattatataaatacaatataaatatttctttaaaaatatgtataagttagccatttatttgaggtaagcctacactttccaagaaatgatctggctctgaaacaaaggatattcaaactgcatagccactttccattattatttcaaaactaatacataaaatgtttcaagtggtacttcttaaaaatataaatatgacttacataaattaactcagcttcacatatttaaatattaataaattaaaaataattaaaatagtgtcctaacgctcatacttttagttctccatagagaacaacataagttctgtgcccagtggacaggtttctgaccagaagaaggaatgcccattaacaacaacaatctgaggtgcccatgctacatttgccgaagagccctcaggctggactgcaggaactccttaaagctgcgcagaatgagatgagttgtcatgtcctgcagccactggttctgtgcctgcagcttcgtcagcaggctggcatttgtggttgggtcaggggtggttattgcatctagattctttgcctgaaggaaaatgaaagtaaaaaggattgtttaaatgttgaataaatcctttgcagtggagggatgctctgggctatgggatgatgttcaaatgtgaaatgtggggtgaatgagattaactggggtgcctgctctgagtaggacccttccatagcaacaaacttcttttttttttttttgagtcaaggtctcgttctgtcacccaggctggagtgcagtggtgcacagcaacctctgcctcctgggttcaagtgattcatgtgcctcagcctcctgagtagctgggttacaggtgtatgccaccatgcctggctaacttttttgtatttttaagtagagatggggttttaccatgttgaccaggctggtcttaaactcctggcctcaaatgatccacccacctcagcctcccatagcgctgggattatatcagcactgtgcctggctcacagcaaccaacttctaatcatccctttgctgttctgtctcccattagaccacaagcatcctgagggaagcaccactatcatttttgtttgtttggttttggttttttgtagagatggggtcttgctatgttatccaggctggtcttgaactcctggccttaggagttcaaggagttctcaccttaggctcccaaagtttagggaatacaggcatgagccaccaagcctgaccagcatcactatcttatttgtttgtattctgtcatatgaaataatgcctggcacatagttcatatttagtatatgaatgaagagcccatacttaaaggcattttaatatgggttcttcagtggcctctaaatctgatacttttctccagtttccctctcaccatccctttaggatctgttgaaagaccactgatccggtggtgtaaagaggactgggaaacacctttccatagacccaccatatgggataagtaacttgtggaaggccttaaacctccaagtgtggtcctggaattctgcagcatcaccagggatataagcctggtagaaatttgaccctcaaacccacccgaggcttgctaagtcagactccacaccacaagaagatgcccagggaattcccatgcatgttaacatatgagaaaccctggcttaagtagaaatggcagaggcaggatcagcaccaagggtttcattctaggccccttcttattgagctttggctcctccacatgctagccagcaagtctactccctgctgtctgaatagccagctactggtggccaaagcctttggtacctctttccacccttgagtctctgaccatttctctgaactaactctctggtaaaaggtaggaaaaagaattgaaacaaccacagtgagaagaatgtcacttggcaatgactaaaatcttaaaatcattttgtgctccttggtctttgtttctgtggatcactggctggagttggatgcacttttttctgcccgcccccccgcctttggttttaaatctcttgcactattaaaaattgatgttaaaatccacctcagttaatatatagtttaaaatacagttattgatgtcctttgcagaagagagccaaccaaccaaacaaacaaaaaaagatttaacaataacaatcagaaactatttctcagactcttttgtttacgtgtagccttctcttttggaagtggcattgcatccctgagttgtccaggacactgtctttgagcctgtcttcccccacaccaagttgagggaatgaggacacacccacctttttctgcaggaactggatcaggacttttgtactcatctgcacagctctggcttgttcctcactactctcaaatctgttctggaggtactctaggtatacctcaaactccaaaagaccagtgatgattttcaccaggcaagtctcctaagaggaaagatggtgggaaaattggttatcgccaggagatagaatcaatttgaaaagttaaaattgccacagttcgacatcttttccctctgctcctctagagaacttcaagtacctcttaggcagcatgttttgggacattggacagcaccattttaaataactggacaatcagaggccccatgtaattagttttatccaaagcccaacagatgctagaatgtggcaatggggatccttctctgattgtcccccttgatgttcttcctgcactcttgcccttgttaatgctgggctggaacctccttttataaaataatcagaagacagtgcaggttatctcactgtggagaatgagctgggcagggagggagggcagacctggaccctgccaggggcagccagagagggaaaaggccctgagagtacctttcccaggatgaactaattaaacctgtgggagttttaaacatttgacagttgttaaaatctcaccacagtggcaccatctctggccatacctgtccaagaataaactgcctttaaaaaagcttgaagttggcctcctcatgaaatttacataacattctttacatttacccactttttgttgctgcctggatctatatgtatacaggcactgcatgcaagagggagaagttttgcctaaggaatagtgaaaagtgagtgcgacaagttggtacctcattgaatccagattggaagcatccatctttttcagccatctttggaaggttcaggttgttttctgccagtgcctctttgctgctttcacacatgttactcttgttacatgtctgggaaagaataccagaattgttatcacctaagtgtccctaaaacaaacaccactagagggccttttcattgttcaaccacagccaggaaagtctctaagaaaaatgaagctacaactcattggcatcctggcaagcaaattccagtggagtgggggcacacttgggttcagttccaagctcacctgtgactttaggtgtgttacttaatcctgagtctcagtttccttatctccaaaaaccttccttgcaaatttgttttgaagattagacacaatatttatttaaagtgcctggcacacagtagatacttaataacagcaattttgacaataattaggagaatataattcaagccatagaatgttccagcaggaaggatctatgagatcacctagtccacgcccaattttactgatggagtccagaggtggtagggaatttacccaagatcacaaggctggtttggcagaaccagaattcgagtgtgggctcccaatctcccctcctgtgttcttttctttctaccaaacaggaccaaaataccttgcattgaaagtggggagatgctttaacctatttatgatttgccactttggtgggctctgaggtatgaatcttagctggaatggctttgaggaatcctagccattgagtttacataaccaaaaagtactgcaactgctctgagaagctgaacatgcctttcaggtggcacttttctagtccttccaaagcccgggggacaaaaaggagcttcacagacctaattttttggaaagggaaaaggaagccctgagaagcaataaccctcagctcatgccaaaggtgggcatggatttcagacccattctgcattttccagaaaggaaaggaacttcctgacaccagcaaaggataaatacagaagtcagtctagtcggccccgttggcctcaaatctacagtgctctagaacccagcaaagacctcctaatgcaggcagcccccggccacacgcaggggcaaggggaacgcatgcgcaccgggcccttcaaccccatcgccaagcctacccacctcctttctcagggctgagatgccgtcgaggatgtaccgaatttgtttgtcaattcgttctgaagaggtgagtggctgtctgtgtggggcggctacatctttggaatcttctcctgggggtactggggcagggaaggcagcaggcaacaccaggagcagccccagggagaaggcaactggaccgaaggcgcctgtgccggaggggagcgagcgcaggggtgagctgacagcacagctgggagcctgcctctgctgctggccgcccgccagccctccctgggccacacacccctccctcacacagggctcgaccgccgctggcagttccagggctaaggatttcctgcacttacttgtggagaaggagttcatagctgggctcctggaggggagatagagcttctctttcgttcccggtgggctcgagggcagaatgagcctcagacatctccagtcctatatttattgggggttgagactctaatattgagactcatgggaaaatcccacatttgataaatctttgttggagggtgagggtggggccagagcgggtggggctgattggaaaccttattaagattgtgcaatgtgacgtcctttagcatggcaagacacaactagggggaaaagtgcagcttaggtcgtcattgaggctagcgctaagaagcagaaccactcttcctttactttctttttttcttttattagtgactcagcactttggcatgtcttgacaaagagtaaagctgaagtcatgcacgaagttttacaaagagaaaaaaaataagctaaagctatgttttttgaaaaaaaaaaaattttttttcagtgaccagattaacaggctagaatttagcgttccagttaatttgtatttgtaaaaaccaaagatgttctgaactgagtttcctctgactccatcgcagccccccaagcctgggattatgaagaaggtaatactaccagtcatctgagttcttctgtgttctggctctccctgtgagcggctgttgta

SEQ ID NO: 1248 - DNA, 6000 bp, Homo sapiens
ctctgtcgcccaggttggagcgcagtgcagtggcatgatctcagctcactgcaacctccacctcccaggttcaagtgattctcctgcctcagcctcccaagtagctgggattacaggcatgcaccaccacactgggctaattttttgtatttttagtagagacggggtttcaccatgttggccaggctggtctcatactcctgacatcaagtgatccacccgcctcggcctcccaaagtgttgggattacaggcatgagccaccacacccagccaccaactatccttgaaaaaccctagcttccgtattcttagggaggcagatttgaaaattatctcccatccttctgcttggctggccctctgataattaaactctttctctgctccaaaaactgttgctctcaatgcattggcttttctaggcagcaggcaagaagaacccattgggctgttacagcacttccagaggtagtctaataactcctctccaaaaagtcattttggtggagaggtggagcaagatggccaaatggaagcctccaggaattgcccccgacataggaacaacaaattgaacaactatccacccaaaaaagaaccttcataagaaccaaaaatcatgtgagcaatcacagtacctggttttaacatcatattaaggaaagaggcactgaagagggtaaaaaaggcagtcttggattgcctacaccaccccttccacatcccccagcagtggccacatggcatagagaatcagtgtgcttgcggaagggacagggcagtgattgcagggccttgcattggaactcagtgctgccctgtcacagtgaaaaacaacactgggcagaaatcagccagtgcccagagggagcatgtagatgagccctagctagagaggagtcattcatccaagcagccagaacctgagttctagcaggcccagctaccgtgggctaaagtgctctgggggggtcccaaataaacttgaaaggcagaataggccaaaagaactacaattcttgggcaagttctgttgctgggcttggagccattgggcttagaatgtacatgacctagtgagatgctagccagggaggccaagggaatgcttgcatcacccttctccaagccacaggcactgctgctgacagtactgggagagactccttcccaccacttgaggagaagagaggggagagtaaagaagacattgtcttacaacttgaataccagctcagccacggtagaactgtgcactagggggaggcccccatttcatgccctagcccccacatgaaatttctagagacaccctgggccagaacggaacctgttgccttaaagggaagagcccaggcctggcaagattcatcacttgctgactaaagagactttgggcttgaataatcagtagtagtagccagccatgctggcttcaggtgtggtggcttcaggggagagactcctatttgaggaaaggagagggaaaagtaaggagactttgtcttgcgacttggataccagctcagctactggggagtagggcaccaagcaggctcctggagtccctgattccatgccttggctcctagacagcatttctggacatgccctgggccaaagaggaccccactgccctgaaaggagaaactcgggactaatagcatttatcacaagctgactgaagagcccctgtgccttgagtgaatgttggcatagccaggaagtactagccatgggctagtgcaatggtggtcatggggaaggactttgatgcttgaggaaagaggagggaagagtgagaataactttatcttgtggtttgggtgccaggtcagccacagtggaatagagtaccaggtagattcctaaggttcccgaccccaagccctggcttccagacagcatctctggacctacttgaagatggagagaacttgttgccctgataggaaggacacaaggctggctgaattcaccagcttctgaatgcaggccttgaggaaacataagctactgtagctagacagtggtcactgcaagccttggaccagacccagtgctatgttggcatcaggtctctcctagcacagtcacagtggaggcagccacaagggtgcttgtgtcacctctcccctagctccagacagctcagtgcagagactccatttgtttgggtgaaagtaagataagagaacagagtctctgcctggtaatccaggtaattctcctggatcttacccaagaccacaaatgtcatacccctacaagtctgcaaaagctatagttttactgagcttcggatggcccctaatgcagatatagctgcagtgaccaaagacttagatcacaacacccaagtcccttcaaatacttggaaagccatcccaagaagggtggatacaaaaaaataaaaagcccagactgtgaagacaataataaatacctaactcttcagtgcccagacaccaacaaaaatccacaagcatcaagaccaccctggtaaacacgacctcaccaaacaaactaatgaaggcacaagtgaccaattccagagagaaagagatatgtgacttttcaaacagagaattcaaaatagctgtgttgaggaagctcaacaaaattcaagataacacagagaagaaattcagaattctacaagataaatttaacagagattaaaacaattaaaaagaatctagcagaaattctgaagctgaaaaatccaattaacgtactaaaaaatgcagtcccttacaggcagaattgatcaaacagaaggaagaattagtgagcttgaagatgggctatttgaaaatacacactcagaagagacaaaagaaaaaagaataaaaatgaatgaggtacacctataagatctagaaactggcttcaaagggcaaatctaagagttactggccataaagaggagctagagagagagatcagggtagaaagtttattcagcgagataatgacagagaacttcccaaacctagagaaagatatcaatattcaagtacaagaaggttataaaacaccaagcagatttaacccaacgaagacaccccaaaacatttaataatcaaactcccaaagatccaggataaagaaagaatcctaaaagcaagcaagagaaaagaaacaaataacataaaaaggagttctaataagtctggcagcaaacttatcagtggaactttacaggccgggagggagtggcattacatatttaaagtgctgagggaaaaaacttttatcctagaatagtacatccagtgaaaatatccttcagatgtgagggagaaataaagactttcccaggcaaacagaagctgagggatttcatcaacaccagacctgtcctacaagaaatgctaaagggagttcctcagtctgaaagaaaaggacattcgtaagcaataagaaaccacctgaaggtacaaaactcactactaatagtaagtacacagaaaaacacacaatattataatactgtaattgtgtgtaaactgttcatatcttgagtagaaagacttagagattaacctaacttatcaaaaataatagctataacaacttttcaagacatagtataataatatataaatagaaacaagaaaaagttttaaaagtggggagagtgaagttaaagtgcagagtttttcttagttttctctttgatttttgtttatgcaatcaatgttatgttgtcatcagtttaaaacaatgggttataaaatattatttgccctgggcgtggtggctcacacctgtaatcccagcactttgggaggccgatgcgggtgaatcacctgaggtcaggagttcgagaccagcctgaccaaatagtgaaaccccatctctactaaaaatacaaaaattagctgggcgtggtggtttgctcccgtagtcccagctacttggggggctgagacattaaatggcgccactgaagaagaatgaataaggtctagtaatacaacagggtgactacactcaacaataatttattgtacattaaacaaactaaaagtataattggattgcttgtaacagaaaaaaaggataaatgcttgaggtgatggatagaccgtttaccctgatgtgattattatacattgtatgcctgtatcaaaatatctcatgtacctcttaagtatatatatatatttacctacttcgtactcataaaaattttaaaaggtacataaatgttatcattgcatcctcttaattttatttttcagttccagagggataatcctgtctctgccgcaaatgcagcaccttcctcagtcttggggcgtccatcaagcggagagctggaatgtgactgaaagtaacagagtataggtggaactagaacaaggtcacgagctggtgcccaactcgtgtaactcctggttccaggctgtccctctaggatgctgttggcgccagccgtggtagtaggacagagtctgggtaaaggtcgcctgctgacaagatggtagctaggagacctctaggtgcgccaaaattagggcgtcttttcctggaccggcaaaacgccctgctcaaagctcattacatcaccacgcccaagaactgatactttagcagggcaacgcaccaaccaagcgactccgccccaccctccccgctcctccagcacacgcaagcgcacagaggcccgcgagtgacgtcacctctcccgacaccacctcgttgtcgtacgaccaaaggcctgtcgtaacggccgggaaaagcctcgagaagaagggcacgcacgccgtacaccctaacatgctcgccagcatgcgcgcgcaggtccttggcgcaggcattgggactggagccaatgaggtgcggcgacgttactgcgtagccgccagctcggccgcacgtcagggcgcgggagcgcggagcgagtttggttgcacttacaccggtacttaagcgcggaccggcgtgtccttggacttagagagtggggacgtccggcttcggagcgggagtgttcgttgtgccagcgactaaaaagaggtgagagcgggtcgcggaggccgcacctggttagaggcagagctgtgggaggcgcgcacttgcgagcgaccgaaacccaagcggggagcattcgagtggagcccgcgctgggtgggagggcggggagtgaagaccctggactgtggtcagaccgagctgggcgagtaacggcttgaggtgcggcggagccctaactagggacaggtatggtctcggtcagggactggaggcggcttggatacagatccgaggaggaggcggcctcttccgtagtggttgctgaagggctatggaaatgataggcaagacttccctcctggaaagccgaagcttagagcttcacgttcttcttcagagggcaaaagctgttgctcttctaataaggggccagttcttttcgtgggcacatgtttcttccgtcagtcgttctgacatcctagaaggagtttcatcaatcaccttgaaaccgacctggacgggtgacctcgtggtcgccccaggagatcacaggtaggggagttgggatgtccccgggggaccgtgcagcctgcccctgagctcccattcacaagttcgagtgtcaagctactcctgtgacctgggcagatagaaacagccaggaccgctttttaaacatttgtgtgctttgcgttatcctcagggagaggtggctttacattgtagtaagattaaatggttaggtctttttaaaagttgcggttgtggtgattttggcttaatgtgttcgcccttgagcttcagatctgtgacttcgtgaccatgattgtctcttctgaaactggagtttgaattaggttccctctttgcttgggctttaacgttccttcacgtatacacacaaaaatacgtttttgaggaggtactcctaaaaatgtttttggtattaaagaatatttggtataaagagtattaaagcaaaacaagattcattctggtatttaatgacata

SEQ ID NO: 1249 - DNA, 6000 bp, Homo sapiens
cagaagttggaactctagctgcttctttagctaccttatcagcataagcattgccctgagtgatgggatctgatgccttttgatggcccttgcagtgaatgactccagcttcctttggaagtaaagtggtcttgagaagagtttttattaaagaggcattaatgatggaggacctttgcgtagtgagggaacctttttctgcctatataacagcatggtggtgcaggatatgggaggcatatttagagacagtataaatattgacgtgtagtccttttgcaagagtgagggctcaagttaaggcaatgagtttggcttgctgagaggtaggggagcggggcagagtggtagcctcaaggatagatgtggaagatactactatagcatagcctgcctttgctggtgaatggcaattaggcctggtggaactgccaacaataaaccaagtgcgatcaaggtgaggaacaggaaagaaagaaatatggggaaatggagtgaatgccaggtggatttagagagatacagtcatgggggtcaggtgtggtatcaggaataatgggggctagctaaaacagtagggttaagttatttggacagaaaggctacagggcacaatcccagctcttgtgtaagaattctgactgcacagccctgcacttcggctgtgtgtaatgaaaaaagggttgggatgagttacggagagctagtgtgggagcagcttttagggctgttttttaaggaacggaaagaggagtggggaaaggatttaggattaatggggtcagctaggtttgcttttgtgagtttatataatggtttagtcaggatggtaaaactaggtatccaaaggcggaagtacctacccatgcctaggaaggaaaggagttgttgttttgtagaagtggctggggtttgggagattagccagtcaggatcagcagagagagcatgtgttttttcatgaagaattatgccaagacaggtaatggatgaggaagaaatttgggcttgactgaagcaatgggggctgtccatgaagccttgtggcagtacagcccaagtaagttgctgaggctgatggatgtcaggatcagtctaagtgagagcaaagagaggctgggatgaagggtgcaaaggaatagtaaagaaagcatgtttgagatccagaacagaataatgggctatggaggggttgtggagggaggtattgaggataggagagtatatgggtttggcaccacagggtggataggcaagacaatttggttgataaggcgcagatcctgaactaacctgtaaggcttgtccggtttttggacaggtaaaatgggggaattgtaaggagagtttataggatttaaaaggccatgctgttaacaggtgagtgataacaggctttaatccttttaaagcgtgctgtgggatgggatattggcgttgagcggggtaagggtgattaggttttaatgggatggtacgggttgcgtgatcggttgccaaggagggagtagaggtgtcctacacttgtggattaaggtggggggatacaaaaggaggatgcaaaggaggctttgaactgggaaaaagggcagcattgaggtgtggctgtagcctaggaatagtcagggaagcagataatttagttaaaatttctcgacctaataagggaactgggcaggtggggataactaaaaaggagtgcataaaagaatgttgtccaagttggcaccagaattgggaagttttaagaggtttagaagcctggccatcaatacccacaacatttatggaggcaaaggaaacaggcctttgtaaagaaggtaatgtggagtgggtagcctccgtattaattaagaaggggatggacttaccctccactgtaagagttacccaaagcatctgtgatggtccaggaggcttctgaggcgatcgggcagcgtcagtccgagaagatctgtaaaggagtcagtcagagagccttgggccagacagagttccaggggctctagcagtggctgctgggcgagttggacagtctgatttccagtggggtcctgcacagatgggacatggcttgggaggaatcccgggctgcacacattccttggcccagtggccagatttctggcacttgaagcaagatcctgatggaggaggtcctgtaggaatgcttgaccactgcggcttaggcattctgatgttcttgtgtgctggaggtgcggctgggttttgtcttacagcagaggcaagtaattgtaactcagaaatgcattgctgtctggctgcctcctttctattattgtacaccttgaaggtgaggttgattaattccttttgtggggtttgagggccgaattctaatttttggagctttatgtaacgtcgggagtggattgggtactaaaatgcatactaagacagccttctgacctttcagagtctagggctgtaaagtgtctaagggttgttgccaaaagagccatggactgggctatgttttcatatttgatgaaaaaaagcctaaatgctaattgatttgggagaggttggataaagaaaaaggagcattaaccttgaggaaattgttgggtaggtaggggagggctagttgcggaacgaaactgtaagctggaccgggtgtgaggaggtgaggtgatagaaggattatagggtgggggagtggaggcagaggaagaattgggacctggctcagcctggcgaggagcagcctggggaggaggggagaggttagatgggtccatagaaaaggaggattcacaggactcagagcttggggtggagactgaaggaacagacaggagagaaagaagatttgggatgagtcacattgggagcagagattaggaagggaccaatgtgtaaaagaatgcctggacatcaggcacctcagactatttgcccattttacgacaataattatctagctcatgtaggatggagaaattgaaagtgccgttttctggctatttggaaccattgttgagtctgtattggggtcaaacggtattgcagaagaaaataaggcgtttaggttttaggtcaggtgtgagttgaagaggttttaagttcttgagaacacaggctaagggagaagaagggggaatggagggtggaaggttgcccatagtgaaggaggcaagcccagagaaaagaaggtagagacccggagaaggggggtggtgagcagccctgggctgcaatgtggctgagcagccaaagcaggcgacccacaattgacttgccaccaagggaatgtgggtgaatgaccaaggcaggcatccccacggtgatcagacaccaatgaaatgtacgtgaataatcaggcaggtgtccctgcagtgattaaacaccaagggacgactgttttcctgagtccgtgaccggagctggagttttgggtccatggataaaatatgtctcctttgtctctactagagaggagaaagaactggaattggaaatagagggagatttaagggtagtgagagaggctggagaagacagtgaaaagaccgcttacccgatttgaaattggtgagatgttccttgggctgtttggtctgaggacccgaggtcataggtggatctcctcacagagtgagggtgaggacaggggactggtctcctgaaggagtcctcctgtcccgggtcttcggcaccaaatgtcacacgtgtccgtgtgaagagaccaccaaaaggctttgcgtgagcaataaagctgtttatttcacctgggtgcaggtgggccgagtacgaaaaaaagagtcagcaaagggagttaggggtgtggtagctttataggatttgtgtgggtagtggaaaattacagtcaaagggggttgttctctggtgggcaaggcgggggccgggggggtggaaggtctacaaagtgctcagtgggggagcttctgagccaggagaaggaatttcacaaggtaatgtcatcagttaaggcaggaaccagccattttcactacctttgtgattcctcagttgcttcaggccatctggatgtatacatgcaggcttgggctcagaggcctgacacaagttggcacatttgatcctatcaactttagtttgcactttcacttttgatttaagaacatactttctgtttctcagagggcagcctctgatgggaattttaatactcacaagcatcagtggctatatgattgaatgtacttcttcagtgtgagtaagtgacaactttctgtagcatgatatcccttatggacacgatccccattcaaaacgttttaaaactattttattggggacatttattagcatgttaaaactcttttacaacctattagagcatatgcatagaacataaaatgtacactgccaagaacaaatttaaggataggaagaaaagcttacattttttaaaaagtataaattgaaatgtatgcagtgtaatttaaatttgattacgttaacctccatttcatcaggaccacgtgtcgcgttttaacaagagtttccctatcatgtccaggctttggctctggttgcaggcgctgggtaggcacttttacgaggagggacctggcacgatggcaccacaaattcccaagtgtgtcacctctgggcgaacttgggcctgtccactcggccctgcgcggtggccaggggctcaccctctcgcaccgggcgtccctctgcgcgcagcttctctcgcccccccgcgccagacccgggcgaatggcagcaccgtgggaccctgccttgaccgcccccgcccttcggcggcctctcccagcagccggcaggctcttgggcgcgccaacagaggggcgcggctgcggctgtagtcgcagccagttcccgttccgggcccgcgaggcagccgccccggtcctgcccctccctcgcgctactgcgggagcagcgtcctcccgggccacggcgcttcccggccccggcgtccccggaccatggcgctctccgggctcttctctagctctcagcggctgcgaagtctgtaaacctggtggccaagtaagtcccagcgactggggattcgcgcggggcaggccctttctgaggtcctgggcgctgcgagtgaggaggcgcagggaggcgggatttgcgtgcgggcggaacgcagcgcggctctggaggagctctgggtggaaccaagcggagaaacccgcgagtttgaagcatgtagcgaaagttgagagggatgaacttcacagtcagcggaatcgtttatcccactgtggtcgaacgcaggggttctcaatcgtgccagcagcttagaaccacctggggagcttttaaaatccagatatccaggctgcaccctagatcaattccatcagaatctcacggagtcagacccaggcctccgtatcttttaaaagctccccaagtgattccagtgtgcagccagcgttcgagggtttgtggcaaaggctggaagggcagacaggggccttcatggagtcccgcctgcagacgggacagcagctcccagtgtcctgcttggtcctggagagagggtgagaacttcccttgggtttcatgctccacaaagtaaggaaatgagacaatgcttggcaaggtcgcctgaatatcacattcaaaaacgcctccaatgtgtgcagttgttttggcacattgtgaaaaacataggaaatgacagaggttgatgtctcattagctctgcattctaggaaacatttcggttgttggtgtttgaaattaagtctggggaagctaagctagtaaacccatggccttgatgacttctggcctttctgctttaagggtgaagccagggccgggcgcggtggctcacgcctgtaatcccagcactttgggaggccaaggcaggcggatcacctgaggtcgagagttcgagaccagcctggcccaacatggtgaaaccgtctctactaaaaaaaaaaaaaaaaaaaattaaccgggcgtggtggcgcatgcctgtaatcccagctactcggg

SEQ ID NO: 1250 - DNA, 6000 bp, Homo sapiens
caagtcacttattttctagaactaaaaccatgactagctaggtggacgaaagagcttatttgctagctttcaaatagatgaaggggagaaggattgaaggctaatataaaattatctgtttaccttgcaattttgtcttaaaaatgagtttttcaggataaaaattaccttaaaaaacttatgacgtttcacatagtgtcaacaataataatacatagtcttcctaccttattgctgatggttctaataacatctgtattaccctagtgaatgtgttctttgtgaacttgcatgctctctcttcataaacctccctagtaggataactaccaagcaccagactgtgctgtctacccaccctccactttaactttggattatatgatacaaccaggatttgcagtcattcaaaagaaagatgatcttactctcatatagatggtcttttgtaatggcttgaaatagtgagaccctctgtcccattctccaaaaactgcctttttccattttatatgtgggagattaattttgaggtagtcttctcctcctttacaaaaacatctcttagcagtggttcctaaactgtggtgtgcgtaagaattcctggagtgcttgggaaaatattcgtgattctgccccctgaaattctgattggggagagatgcacttggaccccaggaatctgcatttaatgagaatttctaatgtaggtgatccttgtggatcacacttaaagaatctagagcttgaatcccttgattcaaatcctggctctgctacttttttgttgttgttgttatttcagtcaagttgcttaacctccttatgcctcaatttcctcatttgtgtaaatagtgtaataacatctcacagagcttttgggagaattaaattggttaatctagacaaagtgcttagaatgcactggattatgaactgctaggttaattcctgaattattaattgctgaattaattcttaattgctggattaattcctggattattaattgctcaataaatgttagctagatcaacccaacaaatcacagatgtcttgaaatagattgtttcaatcaggtttgtattctgttaatctgtcattcatatcagctgaggaatatatatcttgggttatgttggtgtgttaggatgggcaaggagtcatttaactggagcactgcaatgcattgtcattgcttgtaggataagaaccagactccttaacttggtctctaagcatctgctggtctggtcttacaccatcctcccagtcattctcactgtgatccattcacatttggcttctttcagattttcaaagatgccatgttgcctcctagcacacatgtgttttgtttgggtcactcttcccctcactctcaatttattaacttttactcttcctttagatcatggcttgatgtcactttctctgaaatgcttttcctgatctcactaagtgattatttgtgctaagagaacacagagttcatagctctgtttttatactccatatcacagttatgcttaatatttttgcctcctctattagagtctgcaggttgtaaggcagaaaccttgtcagtttgttgtatcactagcacaagtgcctggcatagatacttgctaaatatttgttgagaaaattattaaattttgattgaggaagacttggatggaatgatggttttggcataaactgaggatttggacagccttcaagaggatgggaaggcaaagggtgggtgtccccatggcagaggagactaggcaggacagttaagaggagatgttccagaaagatggtagagaaaacctgagccatccaccaccctgagggtgaatgttgtctgggcagagctgagaaagattgacagtgttggctttgggtgctgtacctgggtgagactttcttcctacacttagtggcataaagagacaaaatggaaagccaggattcatattcttgaaggtacaaatccaacatcaagaccaatgggcggccaggcgtcgtggctcccgcctgtaatcccagcactttgggaggccaaggtggatggatcacctgaggtcaggagtttgagaccagcctgtccaacatggtgaaaccccatctttaataaatatacaaaaattagccaggcatgatggcacatgcctgtaatctcagctactcaggaggctgaggcaggagaatcgcttgaacctgggaggaagaggttgcagtgagccgagatcacaccattgcactccagcaagactgtcaaaacaaaacaaaacaccagtgggctatagctgagcatttggagttggatggatatggggtttatactgagcttcatttaggaagaaaggaggctgagggcgactgttgctgtttagacagtggatgtgttgtagatggatagttcagcttggcttcaagaatcagaaacacacaaagagcaggtcccagtctcctcagaagcctcatctgggtcattacgggctgagggtcccaggcttgcagagacctttaaggaagagaaggttctccttgaggttgttatgatgccaaggcagatgacgatagggcagagagtaattcttttctctctaacataagcccaaatcggtgccttctgtgacacttaccattttccatcaatctctgtggaactgagggcttccgcagacccctgagtgagattgccaccttatgagccccctcgagtctgaccaggatgtgcagccattcactgctcagtggcgacccctgctgctaaggagagagatggcagcacattcagagttggtgacattaattctagtcatgcaacccggggaatttggagcaagcaggggaggagtctgaggggatgaaaatgggctgaggaaatccagggagatccctagtgttcagggcgccttgatgaggtgctaatgcagaaaagagctgggcctgaacactccgtacttacaaaatcttccacaagccgccagtgtaatcgcttcattccaaaggttggctaggaaccaccgcagtgccctctgaggaataccattgcaaactttaacttttatttgcggagctctcagggctgttaggcaacaaatatttttaaagatacccctctaattctctaggttaaaagttgcagtaattttaattaggggtagaggctgtttatgtttgtttacatcctgggtaggaattagagtataaatcctcccagtgggacccctgctgggatgctctggaatgcttgcattcctgagtatgtgagcacccctggtgtgcatgccttgtgtgtacatggcaaggtatcgcgaggtggttctatgacatttctggacaaaaactgtgtgtgaagagaaggtaggagaaagcaaactcacaatcaaataaaagtagagagaggggaagagatgagattgcagttgattatgggtctggcagcagatgttctgcacgaatccaactcgctgcagccagtctgtttctatggcaacagaatcggtaattattgagcccaggcactcccccacttctcccaacaaggtggaggctgatgaatatgaactatctccagcccatcaccagctttttctttttcttcttgtccttatttgttttttagttctttataagaaaaagtgggggatatattgagaagtaccaagacggggagctatgggtttattgacaaaagagcataggacactaaaatagaaacgaagttattatttttctcttgtgatactctaagagaaaagctcttcctggaaaagccgatgatctctgaagatgctaaataaatgagcaggagtttccctgaaatggaggcgccctttgattggctgatctttccccgactcctgccaatcggagcatccctgggctccagctccataaacataagcaaagctacatgcttattcttctggacttggagtgtataccatttaaaggtgtgcggcgggtctctgttcacatggctcaactggaaacctgtttcatgaacaagcttactcaggaaccatctggtggtattccagcacattgttcttcagggggacgactctaagtcgctttgtggtggcagcagcttagaatcagtatttgtggttgggaaagatggacttacgggagcttggtgagtaaacctccgtctcacacatgtgtccaccggtattatcagcctgagctaaatgtagctttgtcctattgtctgccgagaaaactgaattggaacaagcacatggaggagcgggcattcaagggttcccatgatgtaggagactctgaattcaaaagactgcatgctttgcttgggtctgatccgatttgtagctgactgtacattatacttggacattggttgtcttgttaggattagtgtaaggagcagagttctgctttatttccctgggtgttgatgcatttcaagagaaaatgcttttaaagctacattaataataagagtcaaccctgtgtattgctaggaagagagaaaaaggtgcaggcacggagcccggagccgcttgattgtgttgctggtgtttgcattgtgaagagagatgttattacaatggtctgtcaaacacttcttcagacccccagccacggaatgaagcatctcttctccgtgtgccactgttctctgcttggaaaatgtgtaactgagctaggtcatgtcctttccttttatgaaacctgtctccaaattgaaatatgttttttaattaattgcaaagataaagtgaagtgcaattggaaagattttagcagtcaaaaagcatgcttcaaaatgactctattttgcatcctttcaaacccctgaaaaaccagagagggtttgcaaagttatattcaaggattggctctctgccaggaaagggatgctctgagctattgctctgctccctggggtttaattttctgacactggtgatgaaattttcaatttcgttgggtagaaacaggaagaacaagaaagcagtactataaacaggcaatggaggggcagcgtggggaacgagaaactctttgcctgtagggacccttctagctgcaaacttaaaaatgtatgtggcaagatgcaacccaagcaccgagcaggattccagacgagttataatcattctgaacggggagaggaaaggtaatgccattggcttgggttgcagagagtgggggctgaagttggggcttctatctctgcctaagatcttttcccctgattgtctcctgattttgaggattcatcatgttactttttttaaaatgtgatttcctgtcttatgtgcctgaaagtgtcatagcacacttgatgtcttctatttacagtccacttgacttcaaataatggagagaggaaaagagaatgaagcatctggtttatgaagaaatgcacatgaaatagtcaaacaagagaaatcttattggttgtcctttttaaaaaatgtccttttgcacaggagaatgctgtgggtcttcacgtggctctagaatagaatttactttatcctaaatgggacctgtgatgaatggttacagaaacagaagagctagaaagctttcgcctatagaagactcaaggcagggtgagggcgactgggtgtctgggagagaccttctactctgtctattaaagaagtagggctgacgttgcaggagagggagaatttcctaactgcgggtgacaatgcatcagggacacctggtcacttgacaaggtcagtgacctgtttgttagctgaatgcctttctggagatgtaggctgctctctgatcccatgaggctccagatggctggatacattgagaattctgcctgactggaagagcttgtgtgcatgttaactctgcctgctgcaccacactcctcagtacacctcgatgctcgattttgaggaagtctggtttctagaggatgtgcattaagtgacagtcagctcgttagagtcaatgtccatttcgccttggcctcttctctcccccactagtgtcacttta

SEQ ID NO: 1251 - DNA, 6000 bp, Homo sapiens
attaccatcaccttcattgccagcaaagaacatgaatcctaatgaaatggatactcagtggaagcatccagtttgggaccaggagctggaaaatgaaaggaatgggtataagtgccacctctcttagtgcccggtaaatggaatcccttcatctgccttttaaaggctcaatataaatggtgctcatttcagttaagacctataggtgaactaaggagaatttggacagccagtttagaaattattctataatagtcaccatattttttattcaaaaatacatgtataccgcctaacattcttttttgatttgtggatttatttaaaaagtattacaaaggtataagaattacatcagatttagtaataatacatttaataaatcatgcttatggaaaggaataaaatttcatgagattgaatctgccccaagacaatatgggataaatggtactgacagtgcctgctccaagcagaacaaagagtacaggttgaacgtgtgagcgaaatagaaagggatttcttatgacctttattcagatgcccagcagtgattcccaccccaccccctgaattttctgagtatttgatactgtgattcccttctccttttgtggacagcacatagtaaatctgaatgtgttcagaagctggatgataggctacctatcatccatgtggagcctgtggagtacaagtccattaggtgtatgcagaacaacttcatgccagttcttgggaacttgacaagcagtcatccaaatatgatgctaacaaaatctaggtttccctctttttgaggctcaccagcagctctgtaagctttatgtacttttttcatcacagtctagaaggcgaaaaaatcgccagaaagtccaggttaactaaatagagcacccagtctgggatctccataacaaaaccgctggacaagatcccatgcaaaaattctttggaagtttcctcgaagatgctatagctatttttttcttgaagtggaccctctgaaaatatcgatcaagtcacttattttctagaactaaaaccatgactagctaggtggacgaaagagcttatttgctagctttcaaatagatgaaggggagaaggattgaaggctaatataaaattatctgtttaccttgcaattttgtcttaaaaatgagtttttcaggataaaaattaccttaaaaaacttatgacgtttcacatagtgtcaacaataataatacatagtcttcctaccttattgctgatggttctaataacatctgtattaccctagtgaatgtgttctttgtgaacttgcatgctctctcttcataaacctccctagtaggataactaccaagcaccagactgtgctgtctacccaccctccactttaactttggattatatgatacaaccaggatttgcagtcattcaaaagaaagatgatcttactctcatatagatggtcttttgtaatggcttgaaatagtgagaccctctgtcccattctccaaaaactgcctttttccattttatatgtgggagattaattttgaggtagtcttctcctcctttacaaaaacatctcttagcagtggttcctaaactgtggtgtgcgtaagaattcctggagtgcttgggaaaatattcgtgattctgccccctgaaattctgattggggagagatgcacttggaccccaggaatctgcatttaatgagaatttctaatgtaggtgatccttgtggatcacacttaaagaatctagagcttgaatcccttgattcaaatcctggctctgctacttttttgttgttgttgttatttcagtcaagttgcttaacctccttatgcctcaatttcctcatttgtgtaaatagtgtaataacatctcacagagcttttgggagaattaaattggttaatctagacaaagtgcttagaatgcactggattatgaactgctaggttaattcctgaattattaattgctgaattaattcttaattgctggattaattcctggattattaattgctcaataaatgttagctagatcaacccaacaaatcacagatgtcttgaaatagattgtttcaatcaggtttgtattctgttaatctgtcattcatatcagctgaggaatatatatcttgggttatgttggtgtgttaggatgggcaaggagtcatttaactggagcactgcaatgcattgtcattgcttgtaggataagaaccagactccttaacttggtctctaagcatctgctggtctggtcttacaccatcctcccagtcattctcactgtgatccattcacatttggcttctttcagattttcaaagatgccatgttgcctcctagcacacatgtgttttgtttgggtcactcttcccctcactctcaatttattaacttttactcttcctttagatcatggcttgatgtcactttctctgaaatgcttttcctgatctcactaagtgattatttgtgctaagagaacacagagttcatagctctgtttttatactccatatcacagttatgcttaatatttttgcctcctctattagagtctgcaggttgtaaggcagaaaccttgtcagtttgttgtatcactagcacaagtgcctggcatagatacttgctaaatatttgttgagaaaattattaaattttgattgaggaagacttggatggaatgatggttttggcataaactgaggatttggacagccttcaagaggatgggaaggcaaagggtgggtgtccccatggcagaggagactaggcaggacagttaagaggagatgttccagaaagatggtagagaaaacctgagccatccaccaccctgagggtgaatgttgtctgggcagagctgagaaagattgacagtgttggctttgggtgctgtacctgggtgagactttcttcctacacttagtggcataaagagacaaaatggaaagccaggattcatattcttgaaggtacaaatccaacatcaagaccaatgggcggccaggcgtcgtggctcccgcctgtaatcccagcactttgggaggccaaggtggatggatcacctgaggtcaggagtttgagaccagcctgtccaacatggtgaaaccccatctttaataaatatacaaaaattagccaggcatgatggcacatgcctgtaatctcagctactcaggaggctgaggcaggagaatcgcttgaacctgggaggaagaggttgcagtgagccgagatcacaccattgcactccagcaagactgtcaaaacaaaacaaaacaccagtgggctatagctgagcatttggagttggatggatatggggtttatactgagcttcatttaggaagaaaggaggctgagggcgactgttgctgtttagacagtggatgtgttgtagatggatagttcagcttggcttcaagaatcagaaacacacaaagagcaggtcccagtctcctcagaagcctcatctgggtcattacgggctgagggtcccaggcttgcagagacctttaaggaagagaaggttctccttgaggttgttatgatgccaaggcagatgacgatagggcagagagtaattcttttctctctaacataagcccaaatcggtgccttctgtgacacttaccattttccatcaatctctgtggaactgagggcttccgcagacccctgagtgagattgccaccttatgagccccctcgagtctgaccaggatgtgcagccattcactgctcagtggcgacccctgctgctaaggagagagatggcagcacattcagagttggtgacattaattctagtcatgcaacccggggaatttggagcaagcaggggaggagtctgaggggatgaaaatgggctgaggaaatccagggagatccctagtgttcagggcgccttgatgaggtgctaatgcagaaaagagctgggcctgaacactccgtacttacaaaatcttccacaagccgccagtgtaatcgcttcattccaaaggttggctaggaaccaccgcagtgccctctgaggaataccattgcaaactttaacttttatttgcggagctctcagggctgttaggcaacaaatatttttaaagatacccctctaattctctaggttaaaagttgcagtaattttaattaggggtagaggctgtttatgtttgtttacatcctgggtaggaattagagtataaatcctcccagtgggacccctgctgggatgctctggaatgcttgcattcctgagtatgtgagcacccctggtgtgcatgccttgtgtgtacatggcaaggtatcgcgaggtggttctatgacatttctggacaaaaactgtgtgtgaagagaaggtaggagaaagcaaactcacaatcaaataaaagtagagagaggggaagagatgagattgcagttgattatgggtctggcagcagatgttctgcacgaatccaactcgctgcagccagtctgtttctatggcaacagaatcggtaattattgagcccaggcactcccccacttctcccaacaaggtggaggctgatgaatatgaactatctccagcccatcaccagctttttctttttcttcttgtccttatttgttttttagttctttataagaaaaagtgggggatatattgagaagtaccaagacggggagctatgggtttattgacaaaagagcataggacactaaaatagaaacgaagttattatttttctcttgtgatactctaagagaaaagctcttcctggaaaagccgatgatctctgaagatgctaaataaatgagcaggagtttccctgaaatggaggcgccctttgattggctgatctttccccgactcctgccaatcggagcatccctgggctccagctccataaacataagcaaagctacatgcttattcttctggacttggagtgtataccatttaaaggtgtgcggcgggtctctgttcacatggctcaactggaaacctgtttcatgaacaagcttactcaggaaccatctggtggtattccagcacattgttcttcagggggacgactctaagtcgctttgtggtggcagcagcttagaatcagtatttgtggttgggaaagatggacttacgggagcttggtgagtaaacctccgtctcacacatgtgtccaccggtattatcagcctgagctaaatgtagctttgtcctattgtctgccgagaaaactgaattggaacaagcacatggaggagcgggcattcaagggttcccatgatgtaggagactctgaattcaaaagactgcatgctttgcttgggtctgatccgatttgtagctgactgtacattatacttggacattggttgtcttgttaggattagtgtaaggagcagagttctgctttatttccctgggtgttgatgcatttcaagagaaaatgcttttaaagctacattaataataagagtcaaccctgtgtattgctaggaagagagaaaaaggtgcaggcacggagcccggagccgcttgattgtgttgctggtgtttgcattgtgaagagagatgttattacaatggtctgtcaaacacttcttcagacccccagccacggaatgaagcatctcttctccgtgtgccactgttctctgcttggaaaatgtgtaactgagctaggtcatgtcctttccttttatgaaacctgtctccaaattgaaatatgttttttaattaattgcaaagataaagtgaagtgcaattggaaagattttagcagtcaaaaagcatgcttcaaaatgactctattttgcatcctttcaaacccctgaaaaaccagagagggtttgcaaagttatattcaaggattggctctctgccaggaaagggatgctctgagctattgctctgctccctggggtttaattttctgacactggtgatgaaattttcaatttcgttgggtagaaacaggaagaacaagaaagc

SEQ ID NO: 1252 - DNA, 6000 bp, Homo sapiens
accaaggaagaatcagggcatgtacatttggaaaatactcttaattgattcctcttctgagggagagcctggttctagggtgctcctgtgactgcaattttatcgtcctcctcctgccagtgcctggatttcttctgagctatgtagaaaatccaaaacctgaattctttccatgtgctgcctccgggatgcatgtgtctctgtcccagtagtgattttcctcgggggcagttggatcccagaatgcacagtatggagggactgtggagagagagaggttgggggccaaccacatggaggagataggattactatagaatctgggtccctgtgagagctatctgtaatgggggtgtgtgctatgaagcatctcctttttattttcagaccctgttcttatgtgagatgaccagggtattccaaaatcagagtacattttctcaatgtagctccatctgtcttaacattcttgttaattccttgtacagtttagtcttggtgtatctctgtcttagttttccctgtctggggagtgttctgcttcatgagtacagaataatagttttttttttttaactgaaagttaattggaggtggttttaaggcctttagcgcttatgaggacttgaaaagtcatcctagaaaaagcaaagactctgaacagagaataatcataagagagtgttggttttctttatttttccatggttcttttttagtttttgattttagttattcccctgcaacttctcccaggccagtcttgcatcagagagttgagaagttggaacgactatttagtaatgattttgagtgctggaaatgatccagtaacttttgacaagcagatattttcacttttgaatacccagccagccagaaatagacaggcctcagtaaacagaaccgcatggtcattgcaccacctagagacggtcttgcaaaaacgctgaaagctggctgatgatatcagggtctggctgcaaaatctctagatgctgtaagcagtctcgtgcagaattctctctgtacttcccaaagaggaatcatcttgcctgttaaactccttactgaactttaaggattaatttgaggtttggatcatcttttggatcactttgaagaaaagttcagttcataagattaagactgctatttctcatgtttctgctcccaagtaggcaatgcccagcaagcattacatgacaaggctttggagttcactgggcctagatttaattttagctttcctccttttgagccatgggccagtggttcagtcatttaacctgtttgggcatgggttttctcagctgtgaaactgggcagcatcttttctgttttgagattatgggagggccccacaggaccgtctaccagcgactagcacagcagctggaaccaaggtgcactcagccagtgctacttccctttcttccttttggagagaacacatcatagaaatcatctgcagccttttaagttttccaaggtaaaagtggccattgcgccaacaaggcaagaagaacagtttattaaaaggtaataaaccacaacacctttgaggaggcagatgggcatcacattccttctcagcacaacatcccaatggagcaaatttttctgataaaataattctaaagtcacaatctaggtggctgagtggcttgtaagtttagtcataacacagaaaagctgcttcatcttctgagatctcgttttttgtttgtttgtttgtttgtttttggtagagttttgctcttgtcgggtgcccaccaccacacccagctaatgtttgtatttttagtagagacgggtttcaccatgttggccaggctggtctcaaactcctgacctcaggtgatccacccacctcggcctctcaaagtgctgggattacaagcatgaggcactacaccagccatcttctaagatctcttgttattgattctgtggtttcaaaatggacaggcctttgtaggtcccctggtgggaagagacagagttgtctgggataatgctattcttttttttgagacagagtctcgctctgtcacccaggctggagtgcagtggtgcaatctttgctcactgtaacctccatctcccaggttcaaggattctcctgcctcagcatcctgaatagctgggactacaggagtgcgccaccacacccagctaattttttgtatttttagtagagacagggtttcgccatgttggccaggctgctctcgaacttctgatctcaggtgaaccacccactttggcctcccaaagtgctgggattacaggcgtgagccaccgtgccctgccgggataatgctatttttagtggagcttctaaggaagggcatatggattcctgagagtaatggaaggcagactctcacctctaggatgactttattttgagaacaggggaaatgctgtatacaaagttgtccctcttgattgtagccgccaagacctgtgcaccatggctttcacactctgcaaagtgttgtgttcctggctagagccctttcagaatttgtctctggtttatttccaatttgtagtctctctatttgtgaatttttccttgttcagtctaccggacaagcatgaaaaaggagatgtctgtagttcatctttctgatcccttctgaatcaaagcagatattaaaatcagacaaggcttttttttttctagctgctttgttttcctttcctttatcttgactgcagagaaaataagctttttttttttaaaaaaagaaattgtttctcaacaatataatgtgttttaacatgaaatattttacaaaaaaatttcatcatatttcaggatcatcctggagggaaaaatgactaaaatgtgaaggtggaagaggttatgggtaatggtgaaaacatttcagaattaagattcatgttcaaatttttaagaggattttctaccttcttgggtgatggaagataattatctgtagttacacaagtataattacacaaaattacatatgcaggggttggtgtcatcttaataatattttttcagcaaatagagatggcagggaatgaaatgaactgcatatttatatttttccttctctatctctgtccccatcctaatactacggaaggaagcgtctttgtctaaatgctactaggcttcaacagtcattgtgagagtaacattgtgattaagcttgggctgtagatttgggttgctgacatcgatttctgactctaccaatcacaggctgagtgacttgggcaaggtacttgacattttcatgtttctgttttttattctttaaaatgagggataataattttctctatcaatatgtgtgttgtgtagattaaattagtagatacttggaagttgttcagagcagtgcttgctacatagtctgtgaatctagatgctattattacgatcttatgattgatattaatattattggaatggcgtccagtgctctgtgacaccgtgagagatggtgatagcagaacgtgagagttgtaggttgtccctaggagggtagtgtgaaaatccgtggtgaaagtaacagttaaaggtgaaagaacactgggtgcttgggaaactgcaggtcatttatcatggccaatgtttatgttgcagagagggaagtagagttgccttttggagtgagggaaaggttatagaagaattttaaattcaaagggctttgcaatatacagtcagtcctcattattcatggattccgtatttgcaaatttgcctttttgctaaaatttatttgtaatgcccaaatcaatattcaacatgcttttttagatcattcttggaaaatgcacagtggcaaaaaatctgagttgcccaactcagatgttccagctgaagtcgaacaagacaccaagccaccaccctgccttcctgtttcagctctcatgcttcaaacaggtgtccctttcccagtctgtctaggccacgtttttctcatttttgtgcttcctgctttctgatggtaatttcagtttcaaatggcccttaaatgtagtgctgaagtgctgtttttatgttccgaagtgtaagaaggctgtgacatgccacgcagaaaaaatacgaaaatatatgggtttgttaagctttgttgtggcagtagttacagcactgttggctgagcattcattgttaacaaatcaacaacatatactaaatagggtgtctttaaacagaaacacacataaaagaaggttatatattcactggttggcaaaagcgttatggtcagaggctcgcagaaacaatttaatattgttcctaggagcaatggttcagtagttgttaacttatttgcagcaactttctaggacataactactgcaaataagaagagtctactatacttggaagtccccagggagcttttgggcagcagtaaactatggagaggagaatcccagagggtcccgtctgtgataagtggggaagagaaagtctgctcttaaatggtaatgagaggtgaagccggctgggcttctgggttgggtggggacttggagaattgtgtgtctagctaaaggattgtaaacgcaccaatcagtactctgtgtctagctaaaggtttgtaaatgcaccaatcagctgtctgtgtctagctaatcaggtaggggacttggagaacttttctgcctagctataggattgtaaacgcaccaatcagcactctgtgtctagctaaaggtttgtaaacacaccagtcagcactctgtgtctagctaatcgggtgggggacttggagaacttttctttctagctaaaggattgtaaatgcaccaatcagtgctctgtgtctagctaaaggtttgtaaatgcaccagtcagcatgctgtcagaacagaccaatcagcactctgtaaaatggaccaatgcgctctctttaaaatggaccaatcggcaggatatgggcggggccaaagaagggaaaaaaaagcaggccacctgcgccagcagcggcaacccctttgggtcgccttccatgctgtggaagctttgttcttttgctctttgcaataaatcttgctgctgctcactctttgggtctgtgccgcctttatgaggtgtaacactcaccgcgaaggtctgcagcttcattcctgaagtcaccgagaccaggaacccaccaggaggaatgaacaactccagacatgccgcctttatgaactgtaacactcaccgcgaaggtctgcagcttcactcttgaagtcagcgagaccacgaacccaccagaaggaagaaactctggacatgtccgaacatcagaaggaacaaactctggacacaccatctttaagaactgtaacactcactgtgagggtccatggcttcattcttgaagtcagcaagaccaagaacccaccaattccagacacattttggccacccagatgggaccatcgcccatcgccaggcggtgagactaatgcctattgccaaatggtgagtaccgtcggaccccttttgcttgctattctgtcctatttttccttagaattcgggggctaaatactgggcacctgttggccagttaaaagcgactagcgtggctgccagactaaagacacacgtgtcaggctttctgggaaagggctctctaacaatccctgactcttcggagttgggagcgttggtttgcctggaaccagcttctgcttttcctgtacttctgggctgagccgagggtcgacagagaggaaagccattcagctctgggatcccaacaacaagttggttgaccctgcagccatgagcagaactctcaaaggcatgtcgtccaagcagactcgcccatctatcctatctattctgacccttgccgcctgggtcctaatgcctgccagacaaacttcctctcgcctctcttctctgaggctagtcccacttctaaaaaaccactccctgtctctggtgcttttctagtttctcctataagaattatttctagtataaactccaggactctg

SEQ ID NO: 1253 - DNA, 6000 bp, Homo sapiens
ggttgagatgaggccttgagggtggtgacctcctgctggggttagtgcccttgtaagaagagatacccgagagctttctcttgctctttctgccatgtaaggacatagtaaggaggcagcagtctgtgggccaggaagtgagccctcaccagaagccaaccatgtcagcactctgacctcagacttccagccttcagaagtgtgagaaaataaatttctgttctttaagccacccagtccatggaattctgttatggcagaatgagcagactaagacattattcttcccacatgcatttttgtctccccactaattcattcactatttagtaggatgacctttaaaacaacaactgaccacaaccatcagttgcttaaaacatttcagtggaaaacaaaccaaatccaaaacttattaggcctttccatcatccttaatacatccaaattctgtgatatgactctcaagggcttcccaattttggcttttgcccattacttttagatttaattttgatactctcagactttggccaaatagactttttaaggttcctcccacactatgatttctcctggggtgtccaatgttggcttccctgggccacattggaagaagaagaattgtcttgggccacacataaaatacactagcactaatgatgagctaaaaaaaaaatcacaaaaaaactcataatgttttaagaaggttcacaattttgtgttggactgcattcaaagtcgtcctgggccacatgcggactgtgggccgtgggttggacaagcttgatgtgaaccttcatacaaagttaactgtttttgcttagaatccttcctcattaccaacctacttccttttgtctttttgtcctggataacacctcctcactcacccttcaggtctcaaatcaacagaacttccccaggaggcttttcctgacttacagatgatgttagcatccctgtctccgcatagtcctgcaatcttctgtccttctcctaatattatactcctcacttgtttttatggccatttaaaatctgtcttctgagctagaatgggagtgccaaaagggggcaagccatgtttgtcttgttcgtgattgtactctcccttcctcccttttaaactcacatttaaagcattcagtgcacgttgaattaatgaacgatcaagtgaaggaatgccctctcacagcagccctccgtgtcattctgcttgttccagggctgaccctagtggctctaaattgcaggtgtctgcctgctgcccagatctcattatccctggtgtagcggcttcctggagctgaggcaactctctatgtccccagagctgtttgaagactggaggcaaaccagcatgagcctgattctaacacaagaaaagggaatagatttgtcaaactgtagatcaaggaatttagtgctgatttggagcagaaatttggagcaaattactgaatgtattattaaatgcacaggatccatttagaatccaatgtttaaaaattaaattagaaattaatatttatgagcacttaggaaggagttgatcaatgtgagtcatcattgattaaaaatacaacaggccattattgcagtttggggtttcatggtgacactttgcatggtgacattttgataggatctcaatcctcctagtttggaattttgtacacacaaggaaagataaagacatgggaaacacaagatcaaagtatttaaatatgagaaactgccccaaatacctctctgtccattaacaattcaaagctttcttatagaaacacggtgggggaatgaagcttagacttgaggcttaagtgattttgattttccagccatctgtccctaccctgctctcttttcctctacttatcctgaaactaagacagatggttctacagaggagatcctgaatcagtctccctaaccacttgagatgtggatgaggctggcctgtctgcacaaaggtctaagttctgcccaggtgggcttaccagaagtgcaagtgaagggatgcacttggattctgttccttgctataaaatggccgtcctcactgctaaagcatgacctaatgattgaatggcccaagctgtgaccaggagctgagaagggacagtggcaacagatctttctcaccattatgggtggagactgacatgtgaaaagagggagtggatgttgctcttttattttttgagtctgttaatatgacttgtccattgaagaactattgtagataataatagctaacattcaatgagtgtttctatgtgttaggccctgttaagaatttttcatgaattaactcatttaatcttcacttaaccgtatctggcagacatggtttcaatctcatgagttaagagtaatgcagccagtaaatggtaatggtgggatttatacacaacaaccaggtccaaagatggagcccacatacatgacaacaccacatattccactttattgcatccattgctgaccaccagcagagctgagggagaaggcgggttcctctaagacacttgacaatacttctaagatgtctttatgaatagaagagaaaattgaagtttggcaattgcactgttaagcagtttattaataaccagtgaaccaaagaatgctattctcccagcttagcagagggagctccttagtgggatgtcatgtggcatcttaatattttaatgtaatccatggatatggggagacactggatgcctgaattaaatcctaagggacttagagaaagtggatcaggaactttggttccaaagatcaactccatgttcccgcacatggcctaaccgtaacactgtaaagaatttccagtcttccccttgcactcctatcaacactgagatgtatttgagaaaaaaaaaaaaagagagagagagagaagatctcaggctgtattgtgtttgctaatggttaattacgtaattaatctataagactacttttttttctttttttcttttttcttttttttttttaaagggcagagacagatattcttctgggagaagatggctcaaatgagagagacttgaagccatgtcacatgaagaagagtcagaataattgaggatggttaatcctcaaaagagagtgtttaggtaaaatttgagggctgacttcaaagatctgaaagactacttcatggaggaaagatgtgaagacccgggaccaaaggttacaggggagtggatttgcataattgctgtgcaaggagggaacaattatgacagctaatgtttactgagtgctcaccacgcatgcactaaagttaaggtctttatatgccttagctacaaggttgtagatcaaattcatacttatcactacaagtgtctcagagcatcgttagtaaaggctccatttactgactacttattaaattacttcatttaatagttggtgctattgacttttgttattatatcattactgttttatagatgaggaaatacagaagttaagttgctttcctgcagtcaccctgctttagttactggcttataaccatctggacccaggcactcttgatactaatactgcctcccagagtcatgcgtataataaggagttagatcagagctgttcattaaaagtataaggtgagccactaatgagagcctatgtgtagccttacattttctagtagctacatcagaaaatgtaaaaagaaactggtgaaattaatcttatatatgcttatatcttaacccaacacatgacgaatccaactgacttactacatcagactattctcatgtattgcaataatgtaatcaacataaacatacttaacaagttagtttacattcattttaaaaatactgaattgtatgtctgttttacacttacagaacatctcagggatagccacatttcaagtgctcaacagctgcctgtggctcttgagggggaagatcttaaaagggagcttagttttccaccttgattctgatgcctccctgcccccgacttatttcctttgccaattagaagaaaatgccgaactgcctttgacttttccggtagagccaatgtaggtatttctgaactgggggaggacaggtggttcgcctgcaaccctcttccctcctgccagctaggctgggagttaacgtttttgatttctgctttgaaaatgatttaagtaggttgcatgaattaagtaatttattctaaatatcaaattatgggtggaacgtcttgccttatgcaaagttatgcaaaattaggaagtccctggcttaattggttagaaatacatcttgtagtttcaattgcagggttagtaaatacatagatgtcgacggagagggaggaaactttttttttttttttttgccactctgtccaagggtagaggcacagcgtcaaaacaaacacgtcttaaagtagcgttcaaacagcccaccgaagtttccccttaatatccggaaccggttgccaaaaattaaaaaaggatgtgaaaagatgctactcgcttttggcctcccggagatggcgctatgagggtgacggagttaattagtgcctccaaacgccgtgtgtgagctcatcgaagtcatgctctgcacacatattatttatagcagatctgaggcatgcatggtgtttgacatttctgtcttttaagtagggggacttcaaaaagtcgtgggcatccccctaggcaaagtgcagtgggcagggaccaggcagggtgcgggcgcaaggcgaacgcgcagaccacgagtgtcctggcgcaggtgccgggggcggcggctgcaactccgcagcgtccgctcgggaggagagttcgcggctgatctccggatgccttgcagatgcaaaatgtgtctctggccagcaggaggaaggaagaggaagtgagagcagcggcagccggcggtgcagcagccggccgacccagagtgtaagtgcgtgtgctggggcgagcgggagcgggcgaggatgggcacaggatagaggcagagccacccacgccgccgcggccccacgctgggcgacagagcctccagttccccttcaatggtggcgggtcgccggagctctgatcgccgggaacccttgccgctgctgtcctgcgaccccaagcaggttcgtaaagtttcctgggctggcgccgcgccccgactcgctgacctcggcgcggcaggggagggggccgggactggggccgggaggaggcgtcctgctccgggggactccgggcgccgcggagacacttttgtttcctccctgggggcgccgcggctcgggcgggggtggccgccgcgctcggcagggtgagggctgcgggcgcgtcggggcgctctgcagttggggaagtctgagctccggggatggcgggagtgggagtgggagcggagggagggggcgctggaggtgcggcgcccgcggatgaagcgcagggcccggggcccgggagcccgccgagacatttcgaccagggtctgcgggagggggggcgcgggagggttgcgacgctggcgcggggttactggggacgggggatgtggggctgggatcttggagtcaagattcctatagagctagagaagcggctgcggctcagactcggcgtcttctcctgcactcggggatgggagggaatcccccggcgagcgcgctcgtgggagggggcggtgatgggccagaggaatgggggccaggagggccggagagggcggtctgggcagccgggagcccctgaggttctggttagtaaatactctcctcccggggacacaccggggtctccgccgagaccgagagaggcggcggggagctttgtggagcttcgtggaaatctcggcttcggagaggggacgcaccgggcgcgccttcagagaagggggcggcggcatgccagggggcccgggaatcggagcggagagtggcgactgcgatcgccggagtcgctttgaggaagaggaaatacagaactcagctgtcccgggggtgcgcgcg

SEQ ID NO: 1254 - DNA, 6000 bp, Homo sapiens
atggcagctacagccttacaaaatatatttctgaagtaacaagacttggaagtcaaaattactccttgttccatggacagcagaatggatgttgtgttagcaggcatgaaaacaatattcatctccttgcacatttccatcagagctcttgggttgttggtacattgtcaatgagcagtaatattttgaaaggaatctattttttttttctgagcactaggtctccagactgggcttaaaatgttcagtagactatgttgtaaatacatgtgctgtcatccagcctttgtttttcgatttctagagcataggcagagtagatttggcataattcttaaaggccctagaatttttagagtggtcaaagagcatcggcttcaccttagagtcatgagctgcattagcccctaacaagggagtcagcctgtcctttgaagctttgaagccaagcctggacttttactctctaactctgagtcttagatgacatcttcttccaatagaaagtcatttaatctacactgaaaacctgttgtttcatatagctctcttcatcaattacttgagctagatcttctaaataaattcctgcagcttctacatcagcacttactacttcaccttgaacttttatgttatgcagatagtctctttccttaaatctcatgaatcaacctctgctaacttcaaacttttctttggcagctgcctaacctctctcagccttcagagaattgaagagaggtaaagccttgctctggattaggctttggcttaagggaatcttgtggctggtttgatcttctatccagaccactcaaactttctccatatcagcaagaaggctgtttcactatttttatcattcctatgttcactggggtagtatttttaatatgttcactggggtagtatttttaattcccttccagaacttttcctttgtattcacaatttggctaactggctcaagaggcctagctttcagcccatcttggctttctacatgccttcctcactaagcttaaccattttgagcttttatttcaagtaaaagacatgggaatcttcctttcacttgaacacttagaggctgttttagggtttttaattggtctatttcaatattgttgtgtttcagagaatagggaggcctgaggagaggaagagaaatggggggctgattggtggagcagttagatcacacacatttatcaattaactttgcatgagtgcaattcatggtacccaaaagcaattacaataataacatcaaagatcaaagatcacggtccaccataacagatataatagtaataataaagtttgaaacatagtgagaattaccaaaatgtgacagaaagaaatgaagacagcacatactgttggaaaaatggcactggtagacttgcttgatgcaaggttgccacaaaccttcagttcgtaaaaaatgtaatatctgcaaagtgcaataaagcaaattgcaataaaatgagatatgcctgtatttacatggcataattctttccatcctttcaatctttctgtagccttttatttgaggtgtctcttacaagcaacatataattgatattatttttaattctgtccatagcatttgccttttaactggagtatagattccatttatatttaatgtacttgccaaaaaaccctcctgttttaaaaaatttacctttttttttttttttgagacagagtttcactctgctgcccaggctggagtgcagtggtacaatctcggctcactgcagcctccgcctcctgggttcaagtgattctcctgcctcagcctcccgagtagctgggactacaggtgcccaccaccacgcctagctcgttttttgtgttttattttaatagagatgggggtttcactatgttgaccaggctggtctcgaactcctgacctcaggtgatctaccctccttggcttcccaaagtgatcatctatttgtttctacttgtctgtgttccttttttccctttcttgcttcttttattttttattttttcatttcccctcttttttacatgttattcattctttttctattacttttgctgttattctagagattataatattcattattgatgtattaaagccaagtacttttatcaattcctatacaatcctaggactttagaacactttactttcatttactctatctcactttttgtgctgctattgtgtatattttaattctacatatatttaaacttcacatgacgttatttttattgttttatataaattgtgtttatttatatctatccatatatatatatgtatttatatctatccatatataaaaggattgattgctcttcattcctttagatgtctccatgatttcatttgggattatattccatctgcctgaaaaactccttttggaatttcctttaatgtaaatcagctgatgatcttagtgtttcttggttataaaactggctgtattttattttcaattttgaagatcatttttactgggtatataatataggttgataggtaatttctcctagcgctttgaaaacatttgaaggtgtttaggcttccattggttctttgagaataagcttttaattttattgttgctcatttgcagattatatctctgttttctttgctgattttaaaccttttctttttgattttgtttctcagtagtttacaatgtgcctagacatggttttctttgcttgaaatcctgctctatgttcataatgtttcttgactctgagaattgttgttcattagttttaaaaaatttccagccgttatcttttcaaatactgcttcttttccttttttctctcacctctcttcctgatattccaattacgtgtgtgttagaatgttttaccacatatcacatgtgtcatagtctcctttctgagaccttatctcttttatagaaagttctttcatatctcttgtatgtcatttttcatattttgttttgcttattagcttcactaattcttgcttaagttgtatctcatctgttattaagcccataattctgtagtagttttagttagtgtgtttttttctccaattccaaaattccattgtattcttctttggagtttccagttctctgctgaaaactctttatcttgcaatttaatttcttgaagatatttaacagaattattttaaaatctgtctttaaactttaatatctggatcttctgtgtgtttatttctgttttctttttcccttagtttttaagacaattctgtgtcctttgtttaaattaagtttcagacatggtgtataaaatattatatgggtaatgtgttgctctgaatgatgctttttttccccagagagaatatttactgttgccatttgaagctggttttcagcccttgggtctatttcccgttcatccacacccctagggtatagctcttcggagtcccagctgaaagcctagttgcttaccagcccctcatcataaataggtcctaaactccaattttttttttgtctccccaaccccatgagatgactgaaagctctgcttactttctcactctttcagccatggctttaaaatcatcaaatacctcatgggaaaagtggtggctttctgagctgcctatctttccaggatttcagtcatccaagtccttgctgggagaggaaatttttaacttttgtcaacttttctattttttcttagtgagaatattgaacacaaataaactagtatatcagtgccagaagcaaaactccactgagacagtctgagtagagcagtggtgtgatttggtttcgatttttaaaagatcactctcattgccttgaaaatgaactatgcgacattagggagaaagaaggatggaagcaggtggtccagttagtaaactatcacaataatccaggtaagagataacgatggctcaggccatggtggtaaggtggaaatagagagaagtgatcaaacgccgcatctagtttgaaggaaaagacaagagggtttactgacaaactggagatgagcatgagagaggaatcaatgctcatcccaagatttttggcctgaacagctagaaggaaggagatgaagaaaactgagacggggaaagctgggtaggagtgcattcatgaagaccaatcagcaacttacttttgtgtatgttaagtctgagatgctaatttgacatgtaagtggagatgccaaatgcatagtcaaatacaccagtctgaagttcagggaatatttggaagctagagatacaaattctgtagtcatgagcatatagatggtaattaaagtcgtaagaccggatgagaggacctcgaaagtaaatatagagacgactacagacaatataatagtgtctatttcatagggccggtgtgcagggttaataatatttatacaactctgcctccagacccctctcccagtgtacggagatcaggatctcatcacccctccccaccacgtgaagtcctgcttacagctcaaatgccttttattaaccgaagtgcctccagacccctcccctcctcaccacgtgaagtcccgcttacagctcaaatgccttttattaaccgaaggtcagcttttgtgactctcagacgctcaacaggtgcgcaactctgctaacgcagtaggctgtcctggccaaagggtggtgctgtgagtcgcctccagcctccgggccgtcccgaaagctgcaccttctccccctgagctgcagagggcgcgcgtgaggcatcgggcgctcaggaccccgcgggagctcagcgagggggcgggcggccacggagtgaggccggggcggggtcgggcgcggggcggacgtggggaggggttggccggggccagaagcagggtgcagggcaggcgcggggcggtcacgggggcggggccggtcgcggggcgcggggcgggcccgagctaccggtagtctgcctgccgcagtccgagcgccgcgctggggagagcgggtgtttgaaggctccgcggaccggcactaggagccgggggcgggtccgtgaccctccggctgctcggagtgaacaggcggccaggaaagaagcgggcctgaacaccatgatccctttggagaagccaggcagcggcggctcctccccaggcgccacctcaggctcgggccgggcaggccggggtctgagcgggccgtgccggccgccgccgccgccccaggcccgcgggctgctgacagagatacgcgccgtggtgcgcaccgagcccttccaggacggctacagcctgtgcccgggccgggagctgggcaggtgaggacgggcggggcccggcgcggaaccttcccggacgcgcggggcgggacgtgggcgccgataagtgccggcgccgcggcggcgaggctgaagtggcgttgctgctgccgataacgcgcgttgtgacttggcacaaacttgggtgccgacggcaagtagggcagccgagtcgcaccagcgccccctccacgcgccgcgcccagcaagcgagtggtggtaactcgatggcggtcccggaggcgcggacactttcctcagccctttcgttctctgtggcgtttcgaatggctatttaacgagagaaggtgcgggccgcgctctgcctttcaccccgagcagcgggtctgaaaaccagaggtctgtggagccgactttgcatttttccttcaactcttgcgactttcttggtctgcctgtgtggttttaataaaatacagcatccgttgtgaccgcttcctttgcaccggcgctctgttaccttgtgtcggtcttctgctgaattcattttcgttttcttggttggttttctgccgttttagttctaaagcatttaggtccctttgcttcgagtttagattggtttctttcgtgggcgcttggcccttttctcgctttttactttgctgggaaccgattcttgccttctccccccaccccacgctagcccaccctttttttgtgg

SEQ ID NO: 1255 - DNA, 6000 bp, Homo sapiens
atttatataatacaaaagaaccttctggcttcaatgtgggcaaaacagatcctagcaaacctttgaagaggccattgcaatagagcaagaaaggtagctttaattttccgtagatggagagaaataggcaaagtctagaaatgcttggaatttagtatttaaaatcaactatggtgacatgttagctaaatggaagagcggggaggaaaggaatggccaagatgattgttagtgttctctcctattctgagggatgatcatagcattcactgagacgcctgtcattggcatagggagaatatgatttaggaaggaaaataggagtctgtttttggtcatgttgaatttgaggtacctttgagacatcaaaggggagataataggtaagcagctggttgaagaggtctgaaagagagaaaaacattgtgagtcttaaggtgtaggtgatatttaagccttgggtgcagatcatgcaagctgagagtttggagtaaaaagaggaaaggcctcaagatcaagccttgagaaacccagcatccagtggaccaggtaaaagaaggtggcccatcagaggagatggaagacacagccagagataggaagaaagccaggacagtgttttgtcatgggagccaagagaaagataacatataaacaaggaaggagtggttaactttgtcaaacactgctaagggaggggtccagaaaaaagcattgaagaatatcactggattttgtgatttgtagtggaatgagaggacagaagtcagatggaggggcagaatatgaatggaaggaaaggaaatgtgaacattcattctatacatctagaggaccaatgtgatggagacagaaacaaacagctaacagaacaatagagtaagcatgctgtgtacaccatgctgtggagcagggacggggcagccattaagccctccctggaaggagcaggggaggccagggcaggctttacagaggaattggttctttattgagacccatcatgcatggaatgagggatgagaataaatctgtcaggcagaaaaggggagagggcgtcctgaacaaaggcagtacgtgtgtaaaggcatgagatgtgggagtagctgtgttatttagggattacagactgtttgatttggagcacagattgcctttggagccgtgacagattaatcttgaaaaggaagcaggggcccaatcttaaaacactgggtgttagagtgaagtatttgtaatttaccagtgtttctcagcttacctttggaaatattcttaatggcagaaaacattaagtgaggaccctttataatgcaagcacaaactttcctttcaaatttcgtgttttaaaaatttaatgaattttacattctagtccataatatatttgcttgtctttttatgtgaaagtatcttaggttattttccactgggtaaaaatgactccatggatatgaacctcactgattctgtggctctggggagctctttcccattactgtacatgtcctcaccccacatatccccactcacaagtccagagagaacttagggtagaagtcatcagtatgtaagtggcagctgaagctttggaagtagatgaaatcgctccaaaatagaatgcagagtggtgggagaagagggccatgcagcgagagatcctgaacaacacaaatatttaaaaggaggacagaaggaaaacattgagaaaattgtgagggatctgtagaagaaggaagagacccaaggtggagaaaatggggaggaatttcaacaatacaaggatgcttgacagtgcccagtgctacagaaatcattgcatgcaaaatagtccctgaaagacacagacgggatttggtgggtctttgattattgaagttattgtgaccttaatgaaggcagattcagtcaaggggtcagaagagatttagttgcactgagaaaacaataccaattgtgcttgaccatgctttcaagaagctgagctttgagggaatagtaggagcaagcgtgctgcatgcaaggagattcaggatcatggggaatggtttccataaggtagggatagaaacatatttatatgctgaggaagagccagagtaggggaagagattgaaaatacaagagagtacaggcctgctgccttatacataggcaataaattgtaaaaatatttctttaacaaatgactgtttactgttaaattcctcagtctcagtttcataggtgaaatatgttttatgggctgcatgttttgtgtacttaatcatagttatattgatttttgcgggggtgtattttcttttagcctcagaatattctgttgacaagtgaatctccattgggtgacattaagattgttgattttggcctttcaagaatattgaagaacagtgaagagctccgagaaattatgggtacccctgaatatgtgggtaagtattcataaaagtagttttgttctggggtcaggcatcaccttcattaggggacttgtccatgtggcatgactcatagtggagccagctatctactatgttgaaattctaccatcagagatctattcctttggattacattttacaatggaaaacgttcaagagtaagataccaaattggtgatctcttcactatctcttcactacagagctaagagaatttgaagggattacttctaaaaggaataggagaggattttcttaacaaagtaggatattagcttatctgagggtgggaggatatttaacaagtaaggacctttaaggatgttctggttgataacaaacattgacaaaggaattgccaagtctgaggctccatagaagtgtggagcagagagggcatttggttggatccatggttgagtgcttctggcagaaagaaaaaggagcttaaacattgaaggtagcagcaagaaagcagctgaatgatgatactccatgggtgtaggcgtatcatcaaagaagtcaactattactttctttgatagactgaggaaaattggagtttgaaagattaatagtttgatggtctttttaaggtatctgtagaataaggctgtgaaactgagaggttgtgaccagagattagattattaatatttaggccaagtgcagtggctcacgcctgtaatcccagcactttgggaggccaaggtgggcagatcacttgaggccaggaatctgagaccagcctggccaacatggcaaaacccgtctctactaaaaatacaaaaattagccaggcgtgatggtgtgcacttgtagtcccagctactcgggaggctgaggcaggagaatggcgtgaacctgggaggcggagcttgcagtgagccaagatcgtgccactgcactccagcctgggcgacagagtgagactccgtctcaaaaaaaaaaaaaagaatattaatatttaaaatttcagtggtgaaatagctctttgtaattatgaggccttggatataaggctggaaaggcagttttttagaccaggaaatcaagaagctgtgaaggtaggctgtctgggtcatggacatcagtgtggaagtcacctaggctgccagcagacctgggagaagaggagggcggccgtggcaggaatggagaaggctgtggcctgggcctgagggaagactctgtgcctgagggtagaagtgtgaagtgagcaaatacaggctagaagagggggaatgaagagagcagggtctcctttcagagaagagggtaaaaggagtgtgtagttcttgaaggactgaggatgttacaagaaaagagctatccggagcacagaaagactcaggagggccgatagggttgaagaaaacaaacctgtatggcaatgatagttcaaaaaataattcagagattttttaaaagatccttagttaattagataataaaagatgccacaggcacagaaacaacctttaaaattttttatatattttaatgggccagaatacttaattttcagtacactgactaatatgcgtcatgaccactaagttagttttggggatgtgacttaatagtgtttctttagggaaaacagcaacccaagtgttttagccaaatttaatgggtaccattgtaagctcaaatacacaagactgcagaatgtaggtctgtgagctgaaaaatcaaaatagtaattattgccctgaatgaggtgggtttttgttttgttttaatgctttctttgttgttgtttgagagagtctcactctgccacccaggctggaatgcagtggcaccatcatagcttcctgcagctcccaacttgagctcctcctgcctcagcctcccgagtagctgggaccacaggcacgtgccagcacagcgggccagttttttgtttgtttttttggtaaagatgggtctcactgtgttgcccaggctagtgatttgttttagagctttctgttccttagtaaattttaaattttctatcaagagcctttccccatctcaaaacattataatggaagtacaagctcaatccaaaaagaaaaaaactaaaaatgattcaaaagtacataatacagaaaaacaaagggactctcctctttttccttccgtgactcaccttttaaaaggtgagtttatgcctcccacagtcattttacatacacacagaaactggtgtgagttctggccctgtacttgccatctatgtgaccttggcccttaaatctctttatacctcagattcctctgtccataaaaaggggctagtaatagtaccgacctcatagggaatttgtaaggatttcattggatttgctgtacaaagcccttaaaccagtattcagcacataataagcactcaaaaaagtaagctattggtatttcctgtacccttcctcccacagtcttgctatgtggtctgttttactgtttcttccccggtaatttggatgctatgcatttcatttttaatttcctagtcacttcttttgaaactttaacattcacaacctctgtttctcactcaaccatttcagaaatcaaaatttaggagattagcatacctcgcatttcctttccaacctcttcctcccactcatttattctatgggggtttgtcacaaatgagtagtagatacatgaccttgagtatttcgttttttcatagaaatagaacattttcattcctttttttaattgtaattaccacagtttttagtctttggtctgtttttctgtggattcagtacttattgactgcattttaatagtttagcctccttatttgtatagttttgaaaaaaaaaatctttagttaagtggattgtgagtagatttttttaaggagcatttttataatatttttcctgaatccttgcatatttgacagtgtctttctattgtgtttatgtgtggcagcaatttactttatatcaaagttttttgtttttgtttttttttttgtgagacacagtctcaccctatcacccaggctggagtgcactggcactatctcggcttactgcagccttgacctcccagactcaagtgatcctcccacctcagcctccccaatagctgggtctacaggcatgcaccatgacactcggctagcttttgtttattttttgtagagacagagtctcattatgttgcccaggctggtcttgaactcctggttcaagcgatcctcctgccttggccttgcaaagtgctgggtacccagcctcaaagcatattatttttctcaattctatagatgcaacttagttgcctttgtcccatgcctgtagtgtcagaatgcccaatttttttttttaaccttgttgactttttgttaatgggtagatgttttaaaaagctcactctgactgcaacagaaaaatagatcagaggggtgggacaagtagttgaaaaggcccaggtgagaggagaaagtgccacgggtgagggtggggcaatggagaagcagaaatatcagtggtagtgagaaagttttaaaagccatgatctgatagagacaatgcttaataac

SEQ ID NO: 1256 - DNA, 6000 bp, Homo sapiens
gtgacttttagggtgtacgaaattaaagttgttttaagaattaaaaatagtgggactttacaccactatattctaaaacctgagattggacatcaaaacagtcaactttgttattcatcagagcaattctgatacttcctaaaaatataagataactcaactgaattaactccagggtcaaaaacattaactttccccaatcaaaaaggagaccgatcactatataccaagagtgctgcagaaagacaaactctcagcaaatgagtcatttctacataagcaaaaaagtcacttttctccttccctttctcactgatcaaggccacactattttcaaatgaatatctactgagagatcagttgtgcattggataaagtaccataattgggttaaaaatgaaaacaaaatttacagtgaagaatacttatgtgcatggcttacacactccagcttctcaatttcatccacctcaagagcaagatagatgcaaagtcaccttgtgtagattacattctacacccctgtaaagccagtcaaggtcacatttaacaaagcatcttcagcaactacagtgcctgaagtgtgcagccgtttacagaccactcaatatgagggcattattataaccagcctcttttgcccacaaccctgcatcttcagataagacaggataattgttttgttttgagaaaactgaagcttaaatctcttaaaagacctgcaatttactgcaaagtaatccagaggtaacaaaggaagcaggaggttaacggctgcctgcaccaaaagcctctcaatcattttgcagtaaataattatggaaagtgatgtgacaagtagccatgtgtgtatcacagctacagtcatttataccacgtatatgcctccgatagttacatagggtgtttgggtttttggtttggttttcactttgatttttggtgccatacagatttatattttgttcttgtgcagcatatgcactgaaaaacttgctgctgttccacttgctgaaatgatagggacaatagaaaccaaaaccaaaacatagaaggaagagtagtaggatctcttcacagatttttattcttttgattctgttcctaaaatttggcttttcacctttgtaactatggtagtttgggaaacaaaccttctaacaattatatgaaaagaagttttagtttcctacttctcaggaatatgactattttgattagctgggatgtttgccaagcttaaaaaaaaaggctcaaaatcattcatagcaacaactgaaaaacaaaaaaattggttgtttcccatgtctgtacaatgccattatctgactggaattaacaaagaccatttcctttaataagctattaataatatttacgaatgaatctgtgttttgcaggtttctattgtccctagtgactggagtgaagatcagtgaaatgctacaattaatccacagccttctgcaatcttcctgcagtgggaagagaggccatgaaccatcccttgcaggagaaacaaaccttagagattggttaagacttaaaaacccaccactatgacattaccacttaatcttacataggcaggtcaaaattttaatataaattacttttgccaacacatagcttatgcattctttgctcctttttttggaggattttcaaattgatatctaaagatttacatatgatatattactgttacatggtctaatgactaagaaaatttctctggtaaccaaagctgatgccatatatggtagtgttcttggcatatactctatatgcctcagaccacttccacattctttctattcagctaattatagcttagtagccactggtgaaggattgtgaagaccctgtcatttctacagaatagaaaggcaaggctagttactgcaattcagccaaacaaaaagaaaaaagaataaaccaaccccttaaaaaggagaggtactgcacctttgcaaaattgaactggctcactgcagctgagcaacagaaccaccactgaagcaagaaaacaagttggtctatacaagaattgtacatggtttgaaaatgaaaaagttacagcaatcaactaatagctgcaacttaaattttcattgctgcctcagagttgaaacttaaatagtttctgcaaacctaatgctagcttctcagctcctttactaaaactatttaggaatttgttctccgcagcaaagaaatagacactcaaaacacgtaggtaaatacagcaggacattattgaaaaacagctgccttgtagtacaaaatacagtacaagtatacggatgtcattaaaacatcaaaaatactattgctcccatacaatttaggaaacattctttgcaacggagaaaaatttaaaagaaaagctttaaaaaaatctgtttaaaaattctactgtggatgatgagagtagagaaatagtctgaaaagggcaccaatgtttgtggctcttccactttttaatctaagatcaacaatattctgcatcataatctatttttttaaaaaagcctaattttatgtacacaattatttcccgccctctcagccacaaatacatgaaaacctttttgtatattactcatttcccaataaatacaaaaagattgtatagattgaataataccaaaataagataataaaaaggatatgcaataaattaaaaaggcagctcaaataaggggcaggcatgcagtttaaaaaaaatactaagattgtggaggcggggttacttgcctcctggttgagaaggtgtcacacaaagaatacctgaaaactttggaaagaacgttagctcccattcaattcaaagttacctaggtctatgacatttctaggaataccttttgatggggtgggattaacttgattagtaaaaatcatttctactgaaaatccatttaaaatatagaagaggcgatccttgaaaaccccaacttttattcttgaaagacagctggattaactggcaaaagccagtttgttgaaatttcaagatggtataaaaatgcttccaggatatagtcagcatattcacgttcacttcagttccattcacagatggatttcagcttccaccgggtgcactgcttgaatcactcatccatcatttgccaactctgattgtgaggtactgatacaatggatcaagttcttaaaaattttaaaagaataaatgatgctggaattctggacctgaggatctttagtatttgaacaaatccacagattaaactgaaggtaaattaagacttcagttttggttatttccaacttttctgtgaggatgtatatccattaaagctcaggcttatagccacactgttacttttgtaggtaatcttcaagttttatggtttaaaatccagccaaccagtggctgtaacagccgaattagccataattcactggctcacacagtggagatctggctctcattcataccaaagcatttcttggtaatgacctccatatttagagatcaggggaacaactttagtgagcagcaaccaatccactcaaacagtctgccttgtgctttatgcctgactttttcttgtgcctacctcagcaacccccaatgtaaaactgcttttatctttgaaaattttttgtcaactttgaaactattttagtaacggattctactccaagcattgctatctgaatccactggcatcctggaaaacaattctgcgaagaaaagacatttgccttggtccaggttccatgcaaaaccatttttttaaaaaaatggatccaatttggttctgtattcttagatggcttcttgaaatcttatctttaacctgttcatgattatcccaagttgcatttcttttcgtgaacctgaaccctcagaactgggtaattgtaaaggcctctcttctcaaggattccatgaagacctagatccaaaatgctgatttcaatggaggtgaagggatagacaccgcaacagtgaggcctagagagatcttttatgccagattacccaggtgcaacctaaatgcaactgttatcaatggtctgggtaacttggacatgtttcttgccctggatgtgcaaggatctattccctccagggattatcctgatgggtttacgaacctcagttgagaaacaacagaagctgagacaattttacgcaggtgaggagatgctgttttcctctttgcaggttgctgtcagttccttggaacttgactgcttttctcaagttgtccgtcactgttctcttacgattatttctcttaactgtgttacgttttgttttttccctctgcggcctcccttgctccctctccactagctcactggggatgagcaggaaagggaattctctagccaaggggatggtggttgggtggaggcctgtaggggaagctgcccgtttcaatcctcatccacctcctcaccctctgactcttcgccgccgccgctgcccccaccacgtcgctcataaagcttatccctctgtcgttcctggatttctttcatctcatccgcataccggcaaaaggcgcctccgaacttgccccaggctttgaagggtacggtgatggcattgcggtaggacggcttcacctcgctcactcgcagaaacaccccgtatttgttgcagcccacatcgaagaagaagcgcttggagtccacggtgatggaggtgccctccgggagctctccatacaggccgccccctgggcccccggcgccgcctcccgggccgcctgccagctcgtcgtcctcgcctccgtagtcgtctatgagcttcgccagcgcgtcgcggaactcgatgaggccctgcgcaggcagcgcgatggtctggccgctctgcaagccgcccggcccggggcccgcgccgaagccgccaccgccgcggttgaccgtttggcggatgcgcaggaagcggccgcgctggttctccttgaggtccaggtagtacttgcggttctcacgcaccaagaattcgctcttgagcgcgcgccgcggcccgccgccctcctcggcgccagccgccagctgctcggggctgctagggcccagctgcgcgtagtgttctatgaagtcgcccagcgagtcgcggaactcggcggccaccgccatggacagcgtgaggcggctcttggaaccgcccgcgcccacctcggcgatcttgaggaagcggcccttggcgttctgcttcacatctaagtagaagcgcttgttctggatgtccagccgcttcgaggccagctcctgcgtctcttgctcgccgccgccgcgggacgcgggctggaacccgcacggcccaccgccgccgccgcgctcgctgccgctgtcgccgtccgccatcttctaggccgccgcctcgccgccaccgcccgccgcgctcgcgcccccgccctccggctcgcgctccggggccccccagcctcgcccgcccggctcgctcacgcgctcccgccgctcatcgccggccgccgccgcccccccatcgcctccgcgccccgcccccgcgacttccgtgcagccctagccacttccggcgcgcgatttcccgtgaagtcactccgtcccgccctccgcggcctcgcggccggaagcgccgcggcggcgtggcgcagaggggtgacgtcaggggccgcgccgggcgggcggcaagctgagagtaggctagtgttactgctcggtttctagccctggggacttgccagccttagcgtgactcagccgcccgctgcgtctgtctacgcgcctcttcccgtgacacttttactttagactccggtgtcgtccacttccctccttctcgcttccggggcgttagctgagcatactcaggccccagcctgctcgcgctggttgtgtgctgggaacagagttccagtctatacactggcgaccggggggagggagatcctttggagcactcggaagcgggttctgaccagcctgtggggttccctagaggaggcatgagctgactctgaaggg

SEQ ID NO: 1257 - DNA, 6000 bp, Homo sapiens
ccccgtctctgctaaaaatacaaaaattagccgggcacagtagtgggcgcctgtaatcccagctacttgggaggctgaggcaggagaatcgcttgaacccgggaggtggaggttgcagtgagccgagatcacgccactgcattctagcctgggtgacagagaagactgtctcgaaaatgaaaataaaaataaataaataaataaataataaaaaataataatccggctgggtgtggtggctcatgcctgtaatcccagcactttgggaggccaaggcaggcagatcatgaggtgaggagttcaagaccagcctggccaacatagtgaaaccccatctctactaaaaatacaaaataaaattagccaggcatggtggctggcgcctgtagtcccagccacttgagaggctaagggaggcgaatcacttgaacctgggaggcggaggttgcagtgagcggagatcgtgccactgcactccagcctgggcgacacagcaagactctgtctaaataataataataatcctccaactgggtgcagtggtgtgtgcctgtaatcccagctacttgggaagctgaggtaggaggattacttgagcctaaaagttcaagacaagcctgggcaacataacaagaccttgtctccgaaaaaaaagaaaaaaaaatcatcctcctctccttctctcatgccccacatttagttttcgaatcctgagccaaaggccccacatgctccctcccctcccaccagcactgccaccagctgcacccaatccttgctggctcttgtctgcaacacagtcattgcctccaactaagagcccatcctaggtcccaccctaacccacccatgctatcctctactatggatcacttccttgaagcacagagctcgaggtgttacacttctgttcgcacagtcaagtggctcccccttgactcttcaatctagcccaagctccctgcctacaagtcaaaggcctccccagtaggacccagtctaactaccttccagatccattgttcaccacttactcctcatagatgctgggctctatccaaactgaacttctcaccatctggggacatatgttccctctgcccaaaataatctacccctgtctccacctgttgagatccatccctaaaggattattcaataaatagtactggaacaattggttagtcatttggaggaaattttttaaattcttcactcatactatacaccaaaatatatttcagatagttaaacgtaaaatgtaaatatatagtaaaatcacatatataaaaaataaaaccataaaaagcttccaaaagtgttcaaaaacatgactaccgaatatctgaaaggggagaagatcctaggcttaaagcaaagaatgaaatttcaaaagaaacaagcaatatatctgactcattaaatagaattggactggttaaaatcaaactgataagaaatgaacagaggggtccgggcgcggtggctcatgcctgtaatcccagcactttgggaggccgaggcaggcagatcacaaggtcaggagatctagaccatcctggctaacacagtgaaaccccatctctactaaaaacataaaaaattagccgggcgtggtggcaggcgcctgcagtcccacctactcggaaggctgaggcaagagaatggcatgaacccgggaaacgtggcttgcaatgagccaagatcacgccactgcactccagcctgagcgacagagcaagactctcaaaaaaaaaaaaaagaaagaaagaaagaaatgaacagagggggctgggcgcagtggctcatgcctataatcccagcactttgggaggccaaggcgggcggatcacgaggtcaagagatcaagaccatcctggccaacatggtgaaaccctgtctctactaaaactacaaaaattagctgggcacggtggtcacatgcctgtagttccagctactcaggaggctgaggcaggagaatccgttgaacccaggagacagaggttgcagtaagctgagatcatgccactgcactccagcctggtgacagagtgagactctgtctcaaaaaaaaaaagaaatgaacagagagatagtccttttcatgaactgaatgttggtgtcctctatgtagggaagttgcattagagaggagaaatcagaaagttggttagcaagaaaccagagaaggagctgggtggacatctttcacaaaggtcaagtgatgcctgacattgcattccttccttagggattttaatgtctcaatcctctccaaggattgaattgttcacgacccaaaatttggtatcttcctctgaactctccttcttctaggaaactgatgtcaaatccaccctacctgctggcagctcccacacctaattactactgacccatgtggatgcacccgaattcacatttattgagcactcactgtaattcaggcattacgctaaacatgtttcaaggattactgcccaacaaccctacaaggtatttttttttttagtgcagttgtccccaacatcctctttgattcgtgtcttttcaaaataataataattactttattggggtctaatttctctataataaactacatttgaatgagttttggcaaatctgtgaaatcactaccataaacaagacacagaatacatcacccttaaaagtttccttgtattaccctttccaatctgtccctccatattcaggcccaggcaactactgatttgctctctgacacacacacacacagacacatacacacacaccttcctctttcatatacttttatataaatggggtcatacaaactgtgtgatcatactttcacttccctcgggtaaatacctagaagtggaggctggctgcggtgggtcacgcctgtaatcctagcactttgggaggccgaggtgggtggattgcctgagctcaggtgttcgagaccagcctgagcaacacggtgaaaccctatctctactaaaatacaaaaaatgagctgggtatggctatagtcccagctacttaggaggctgaagcaggagaattgcttgaacccaggaggcagaggttgcagtgagccaagattgttccactgcaccccaacctgggcaacagagcaagactgctcaaaaaaaaaaaaaaagtggaaatgttgggtcttattttatgaaaggtatataagaaactgccaaactgtttcccaaagcatttataccattttatatccttactagcaatgtatgagttccagtttcttcacatccttctcaacacttgatgttacattttttaattttagccattctagttggtatttcattctgactttaatttatatttccctaatgatgaataatgttgagcactgtttcatgtgcttactggcttttttgacgaagtgtctgttaaaatctttcaccttttatattgggttatctattatttgtgttctttacaagtccattgttggattcactatctatgaataactacatttaggctgggtgtggtggctcacatctgtaatcccagcactttgggaggctgaggcgggcagatcacctgaggtcaggagttcaagaccagcctggccaacattgtggaaccccatctctactaaaaatacaaaaattagccgggtgtggtggcggttgcctgtaatcccagctactcaggaggctgaggtaggagaattgcttgaacccgggaggtggagggtgtaatgagctaaaatcacgccactgcactccagcctgggtgacagagcaagactcaaaaaaaaaaaaaaaaaaatttaaggatgaggacattttggctttggaaaatcaagtaactggtcaaggtcacagattcaaacccagtgcagttgcagagcctacactttttaacactattccaattctgcctcttgttacacctcaatgcttacaacaaaaagacctcataggaattattcattttattgataaagaaactaaagattggcagtcaatttccttaaccactttaatatggctaactgtggggacagttaactgatctctggatcccaaatctaacctcatcctaaatcatcttctttctatattgttcccacagtgatctttccaaaatgtgaacctgatcacatacggtggctccagactctggggtaggcactaactctcccgcactgcaaatggctttccttgatctaatccaccctccagtgtcatctacgaccattcttcaggcatacacacccccagctgctctgagctcccagcatcaggccctgggtgcctctgcactgccgtctcctatgctgggtggctcttctccagagttgccaggccaactgcagtttgcccttcagagtcagctcatgcctcctctagggaaccccacaggctggtcagaacccgcttccgagtgctccaaaggatctccctccccccggtcgccagtgtatagactggaactctgttcccagcacacaaccagcgcgagcaggctggggcctgagtatgctcagctaacgccccggaagcgagaaggagggaagtggacgacaccggagtctaaagtaaaagtgtcacgggaagaggcgcgtagacagacgcagcgggcggctgagtcacgctaaggctggcaagtccccagggctagaaaccgagcagtaacactagcctactctcagcttgccgcccgcccggcgcggcccctgacgtcacccctctgcgccacgccgccgcggcgcttccggccgcgaggccgcggagggcgggacggagtgacttcacgggaaatcgcgcgccggaagtggctagggctgcacggaagtcgcgggggcggggcgcggaggcgatgggggggcggcggcggccggcgatgagcggcgggagcgcgtgagcgagccgggcgggcgaggctggggggccccggagcgcgagccggagggcgggggcgcgagcgcggcgggcggtggcggcgaggcggcggcctagaagatggcggacggcgacagcggcagcgagcgcggcggcggcggtgggccgtgcgggttccagcccgcgtcccgcggcggcggcgagcaagagacgcaggagctggcctcgaagcggctggacatccagaacaagcgcttctacttagatgtgaagcagaacgccaagggccgcttcctcaagatcgccgaggtgggcgcgggcggttccaagagccgcctcacgctgtccatggcggtggccgccgagttccgcgactcgctgggcgacttcatagaacactacgcgcagctgggccctagcagccccgagcagctggcggctggcgccgaggagggcggcgggccgcggcgcgcgctcaagagcgaattcttggtgcgtgagaaccgcaagtactacctggacctcaaggagaaccagcgcggccgcttcctgcgcatccgccaaacggtcaaccgcggcggtggcggcttcggcgcgggccccgggccgggcggcttgcagagcggccagaccatcgcgctgcctgcgcagggcctcatcgagttccgcgacgcgctggcgaagctcatagacgactacggaggcgaggacgacgagctggcaggcggcccgggaggcggcgccgggggcccagggggcggcctgtatggagagctcccggagggcacctccatcaccgtggactccaagcgcttcttcttcgatgtgggctgcaacaaatacggggtgtttctgcgagtgagcgaggtgaagccgtcctaccgcaatgccatcaccgtacccttcaaagcctggggcaagttcggaggcgccttttgccggtatgcggatgagatgaaagaaatccaggaacgacagagggataagctttatgagcgacgtggtgggggcagcggcggcggcgaagagtcagagggtgaggaggtggatgaggattgaaacgggcagcttcccctacaggcctccacccaaccaccatccccttggctagagaattccc

SEQ ID NO: 1258 - DNA, 6000 bp, Homo sapiens
tctttagttgcagctacttaggaagagcacctgtcagattgactttcaaacagataacttcttgaggtagagcaaccaccatgtagtgagtagtatgatggaataatacttcatcgaggtattttaaaaaaaaaaactcacttggattgccaactaatattgtcatttacatgtgacctggttgcaacgttaagatttttaaaagactgtgatagatattgatgactctcatgtgtttgtctctcttgggcgttttaaggaaatgctagtgagtcggaggaagaccgcagcgccggcagtgtggagagcccgtccgtctccagcacgcaccgggtgtctgatcccaagttccaccccctccattcaaagataatcatcatcaagaaagggcatgctaaagacagccagcgctacaaagttgactacgagtctcagagcacagatacccagaacttctcctccgagtccaagcgggagacagaatatgtgagagcttttcctcttgttaaaggaggagggcaagacctgccaagcctgggtactcagagcctcttgagggcaattcttactcaacaaaccccagcgcctggctgatgggtgggcaacccctagcccctctgtgccctacctctctcctctccttacataaagaatattgacccttttggagaatcttatgaggatcaagctgaaataacactcttaaaagcatatgggatgtcataaagacctctgcagataatgaaaaatattctcataaagatagttttatttacttcatcctctatgcttgttgacctgctattggttccataccagcttctgtgccttactctgggaagagcaaaaaggagacagggagtgatggttagcttattcgggggactttcgtgctacatcagacataaggtatctgaggagcaaattacaggtcccacttttggtagttgtgcagcatcgtaagatttttaaagcacacattctagagtaaaaactgtgactctgttgctctggtccttcctgatccccagggtccctgccgtagagaaatggaagacacactgaatcacctgaagttcctcaatgtgctgagtcccaggggtgtacacattcccaactgtgacaagaagggattttataagaaaaagcaggtgagtgaggtcctcagtgtgttttcttcctcttctgttgacacagaggagaaacccatctcaccagcccccaggctcttctggccatagctctaactctgagcctgtgcagcaccagtgcccaggacttggtgccagtctcaggaggtcagaccaagggctgctttgacttgttgctctgagtgctgctatattggccataatcctcaaccctagtgcctttccaccacccgcttcccactcctgtcctttcaatggttcacccacagggcggacaagatgctgcccagtggcaccctttataaactgcaagtggacatgttaacacatttgttaatgctgcgtcagggagtgacatttcaaacaactattatagtcagtttccaagaagtgtgacatgaggtcataccacaaaaagcttaccctgaaatcccacaatcgtcccctttcctactgatgccttcccgatagtgagcaggttgcaatattaagattttgaaaaggctgttgctagatgttggtgactcgtgtgtctctgtctcccttgggcttttcaaggaaatgctagtgagtggggggatgactgcagcatggccagcttggagagcccagccatccccagcacataccaggtgtctgtcttggcgtggaggggatggaacttgaaatcagacactcggtccatgctggggatggccagtctctccaaactggccatgtggtcttcctccgactcactggcatttccctagaaagtccaagtgagaagaaggcatgagagtcatcaacatcaaacaacagtcttttcaaaatctttatattgcaacatagtcccattcctggaaaaggaatggagtgagaatcctggctacacatcagccccaaatgtagtcatatgcctaaaatcccaattaacctgaaaatgatcaaacaaatttaagatatagtaatattaagctgtaataaatatgcttctataggctttgtgttatgtgatggcactatttcaattggctttctaattggacaattgatactatgctatctacagaattggcctttggagacctaagtgagccacagtggcctcagggtgaccatatactaggattcatagtagtggccacagtcagaaagcctaagctttcctccattgccattgctcgtttatacccacgttttctgtcaaagtcatattcattcaacaaagtcatactgagaaggtgtcatgtgaggctggatgtgggctccaaagtcatagctgtgacattcgcaggcagcggggatgttctcagtcccacatttggcagagaagtcagtcaagaggttctacaagggctggtgtccaccttatactcctagaaacacaaaactgcccccacccccgctttcttggagcaggaagttacacccacacgcatgcacaggcgcacactcagcgggcctaggcacgcatggctcttgtgttgccttagctgaaatttctgttgtgctttctcagcatagcagagtcacgctggcaaaccatcatgcgccctggccaccgacctgacaccagacccaggagcattcacttctctgtcttctgtttctctcccacagtgtcgcccttccaaaggcaggaagcggggcttctgctggtgtgtggataagtatgggcagcctctcccaggctacaccaccaaggggaaggaggacgtgcactgctacagcatgcagagcaagtagacgcctgccgcaagggtgagtactcaggaggggcagcctggggctccagggcctcactgtccttggaccagcctcaggggctgggcgtggccactggcccttccccaggcttacagacccaggagctgcagctcagggccagaaagagcaaagcaaataggacagagccctcagaagggtgcagggagagggagaccccatcaacccaaccaaacaagtgtggggaaggaggccggccagtgcacctcagggacactctgctttatctcagatacctcacagcacctaagctatcattcatccacacacaaagtgaagattttcaaagttaggctttacccgtgaggtctggaggtccatttatcttcacagagaaaccgttttaatccgcaagaacctgctaaagatacatgtttctaaattaaagatgtgaatgtgagacagctgaaatagctcagttgggagagcatcagtttgaagatgcagctttttttttctgtaaaatatataatgaatattctgttagtctgtggctaatataattttaataaagttaatttaaatctgatagaaaaatgaaattttaaacgataattttagagaatgctattatatccagtcttcttttttcttttaataaatgagggaactattgggggaaaggaataaatacattttctttcattttattaagacaaatttagtaagcagaagaaatttgcatgtttagttataagggtttcttttttccttacaagttggaaaaaataattctaatttaagggtaactctttgacaatgaacactgtgagcagcatctggtactcgttgctttgtttgaaaacatgagttgagaccccagccctgcacttgcaggcctagtgccattagcctgcaggctgtgctggatatctcagggcaagagtcgagcccttttgattttggggggattatttcaatatatttctttttctttttgttttagttaatgtggagctcaaatatgccttattttgcacaaaagactgccaaggacatgaccagcagctggctacagcctcgatttatatttctgtttgtggtgaactgattttttttaaaccaaagtttagaaagaggtttttgaaatgcctatggtttctttgaatggtaaacttgagcatcttttcactttccagtagtcagcaaagagcagtttgaattttcttgtcgcttcctatcaaaatattcagagactcgagcacagcacccagacttcatgcgcccgtggaatgctcaccacatgttggtcgaagcggccgaccactgactttgtgacttaggcggctgtgttgcctatgtagagaacacgcttcacccccactccccgtacagtgcgcacaggctttatcgagaataggaaaacctttaaaccccggtcatccggacatcccaacgcatgctcctggagctcacagccttctgtggtgtcatttctgaaacaagggcgtggatccctcaaccaagaagaatgtttatgtcttcaagtgacctgtactgcttggggactattggagaaaataaggtggagtcctacttgtttaaaaaatatgtatctaagaatgttctagggcactctgggaacctataaaggcaggtatttcgggccctcctcttcaggaatcttcctgaagacatggcccagtcgaaggcccaggatggcttttgctgcggccccgtggggtaggagggacagagagacagggagagtcagcctccacattcagaggcatcacaagtaatggcacaattcttcggatgactgcagaaaatagtgttttgtagttcaacaactcaagacgaagcttatttctgaggataagctctttaaaggcaaagctttattttcatctctcatcttttgtcctccttagcacaatgtaaaaaagaatagtaatatcagaacaggaaggaggaatggcttgctggggagcccatccaggacactgggagcacatagagattcacccatgtttgttgaacttagagtcattctcatgcttttctttataattcacacatatatgcagagaagatatgttcttgttaacattgtatacaacatagccccaaatatagtaagatctatactagataatcctagatgaaatgttagagatgctatatgatacaactgtggccatgactgaggaaaggagctcacgcccagagactgggctgctctcccggaggccaaacccaagaaggtctggcaaagtcaggctcagggagactctgccctgctgcagacctcggtgtggacacacgctgcatagagctctccttgaaaacagaggggtctcaagacattctgcctacctattagcttttctttatttttttaactttttggggggaaaagtatttttgagaagtttgtcttgcaatgtatttataaatagtaaataaagtttttaccattaaaaaaatatctttccctttgttattgaccatctctgggctttgtatcactaattattttattttattatataataattattttattataataaaatcctgaaaggggaaaatattttagctgtagtggaaaacttcataaccacaaatgtttccctgctttcccttttagcaaaagaacccaagtcagtttccatggctttgtgggaagcctatggaggcattgggtcatatctgcaagatggtccaattctaggaggttgtgttgttgggacagtctgtggcccaggtttgatcaggtcagcaatgtgcacctatgtgactggtccttgccttttttgggttgtgtcctgtattgtcccatctaacactagcagccatccacagacaagcagggaaggaccagaacagacactcagcaattcagtctcgtgtcctttaccgctttgtccccttcccatctccaatcagagagtggcccttctctgctccaagcagaaggggttctgggatctaagccccctcatctgcagccttggaagaattgttacttgtcaaagccactttagacaaaacactgagcctgtggcttcagagcatccaaggataaactgcagtcgaagagttacctcctgtcgagttacctcctgtctagcgccat

SEQ ID NO: 1259 - DNA, 6000 bp, Homo sapiens
ttactgaaaagtgtttagattgcagagataagctagaatcccaacgcatcgagaatacagtaatacgaagtcgccttcaaaaaatgacaatgaaaattgcctattaaaggactatttggttaattacgtttcagcagtgcccagtttattgtctttattattcttttgtcatgggtgtaaactccatttgaaaacataatcagggagaatacccaagacaagaagaacagttgtcatttaaaatatttgaaaagccctgccttaaggacgcattcgcttgccggtccactcttaattggagacttgcggtgtagcaacacgtgagagtcttcttgcgttgagaagtaagcctggaaaggggcgaaggccccgggcgcatcttcagatgcgtatttgtgggcccctggggatataaacagcccagcgggtgtaaattaaaccccgcagtgccttggctccctgagacccaaatgtaagtcagaaatgtcccaagacttcgcctgccaacggaattaaattttagaaagctccacgaggtacacacgaatgcggagcgctgtatgccagtttccccgacaccggctcgccgcagggagacctcaccccgagagcggaaggggtaagggcggcggggtcaaggagatcgggggtgctgagttggccaggagtgactggggtgaccgggggtgctgaggtggcctggagtgccggggtggccgggcacaccttggttcttgtagacgacaaggtgacccgggctccgggcgtgcgcacgaggagcaggtgcccgggcgagtctcgagctgcacgcccccgagctcggccccggctgctcagggcgaagcacgggcccccgcagccgtgcctgcgccgacccgcccccctcccaacccccactcctgggcgcgccgttccggggcgtgtcctgggccaccccggcttctatatagcggccggcgcgcccgggccgcccagatgcgagcactgcggctgggcgctgaggatcagccgcttcctgcctggattccacagcttcgcgccgtgtactgtcgccccatccctgcgcgcccagcctgccaagcagcgtgccccggttgcaggcgtcatgcagcgggcgcgacccacgctctgggccgctgcgctgactctgctggtgctgctccgcgggccgccggtggcgcgggctggcgcgagctcggcgggcttgggtcccgtggtgcgctgcgagccgtgcgacgcgcgtgcactggcccagtgcgcgcctccgcccgccgtgtgcgcggagctggtgcgcgagccgggctgcggctgctgcctgacgtgcgcactgagcgagggccagccgtgcggcatctacaccgagcgctgtggctccggccttcgctgccagccgtcgcccgacgaggcgcgaccgctgcaggcgctgctggacggccgcgggctctgcgtcaacgctagtgccgtcagccgcctgcgcgcctacctgctgccagcgccgccagctccaggtgagccgcccgcgccaggtgcgctgcgtgcagcacccggcgcactggcgccgaagggcctgggggttgctgggtgccgctgcgggagactccgcttttcttctcactggagataatatgtggggaaactgaaggcgctccgggaaaggtgaaggcggtcgccggagggaccctccccagccggccctctacttgctcgattctctaagtgcagagtacttgtaaattgcaaagcgctttcagtgaaaatgggttaaaggtttccggagctgaggggagcggtaccgatgtttagctgttggaaagatcctggacacaggagattctcctcgccccgcacgggggtgcacacggactgcaatcccagggatgcttggggatgggggggatataggcggatttggaccaaggaaggtgggcaggcacgttgtaggaaatagtacctctcttttaaaatactgactttgcacagccttttggtttgcaaagcaatgtctagtcccggtatgtccaaaaacaagtaaagtggattcgggttttgatatcttctgcggttggaaaacctgaagctgaaaaagaagtaacttcttaaggttacccagcggccacaacagagtgtaggtttgaactccgcgtgccactttcagtaccataccattcttacaactcgggccacccctgcacctgcgccgacctcaaacaaacttccaggtgcgtggtgggtgcgggcaatgtggactaagtcaatttcaatgacacggaagggaattggaatcagtcctagggctgtctcccttcttaatctgaaatgggggggggaatgagatgttgttaaggggagccccagaagaggaaaaatgcaaacatttggcagagttaccctcttggcttagccactatcagtatcaggcagacagcgactctggtaagggcatcacattgttcccttaaaaaaaggagcgggggttgtttaaatggatttggcagctgttctttcaagcattcttagccagcctcacctagttatatgagaaataaagttcctgccttgcacagctgaaggctgggagaattctccccatcctaattcccccaactccccaacgatcacgttggacagatgtcactgggcaggcccccatctagggctagcaggatgaacagtccctttataatttatgtagctgtagagttccacgcccgggtgaagttattttctggctcggcaaggctggctctgttcacccctgagaaatgctggattcatggaaaggcaagatgcctgaaacatacactggctctggtcagctgttaaagctgctggaggcatttgtctctcggggcaaagttatgtcatttgccaagtgtcgtacattattgtgcattttggggtattcaaaaagtgatcttagaaatactgatacacatcgtcattcttgggctttagcaatcatcatgattaccaccttagtagcactgtagtataggttgatgtgagttataagattataaaaagatctaagtgacttctagaatctatttgacaaaaaaaggtaaattttcgacagtcaaaagtcacaattatctgttgcttaaatagaactgttttgtcttcatgccctagtctgcagcccaggcattaagaagaaaccaaggaaatttaagaaattactcaaggttcttagaaaagaagtataaatacgtttatttacatgttcttagagtatttacattcttagtatctcttttatctcagtatttccttgaaaaagaaagcaagctaagattaaaagaaattgaaaccaaatcctcgcaggtagggacctcctctgtgaggctctgtgctggaccctgggaatgtgtgcttcccaaggtatgaaaccccttggggaactttacagcaggacctcagtgagctgtttggcaggtgaggaaactaagacccagagaggagagggactttcctaaggccctggtgagtgacctgccagtagccacttccaggggagagcagagcatctgcagccaaatcattgcagccccaggtagctttctagaatagactgtggaccagatgggccacctgagctccctgctagggttacacattatagccctgtttgttgtagtagagaaatttcatgactctcaattgtggacttaagccgatgcctccagaccttggcatggtccacaggccctgggagcatgggctctgaatgtagcctttgatccccatagcggtcttacagcccctccaagttcattctgaagaaggaatggagtgagaatcctggctgcagatccagtcttgaatttagtcatatacttaaaattccaattcaactgttaacattccagcatccattttaagcatcagactttcttcatttagcactttttattataaaagggagatctgctggagggggatttctcctaccccacccccacccagggaaggaaaagctctttggcacttagaagtctgagccgtgagtgggactttggcattgtctgcatccatgtgctgctgtgttcacccggggtgaaaaggactcacttaggcaggcaccagcaagatgcacagggtctgtgtagaccttgagttttagagatgtaacggggacctagaaaacaagccaccaacatgcttgcatgattctgagcccctgaggcaaaacgctttgcaggtaataattcagttttcccatctgagctggacaccaagctcttataagcgtgtttacctggtagcattgaggacggtactggtcaaccttggaattcccataagggcttgttacaactcagactgctgccgccactccagcgtttccggagtggagaatgtgcatttcttccaagtccccgggctgccgctgctcccgcgggtgggaggaccacacttggagttgactgcaaaatttctgagccggcgctgcagcagcctcccgtggctcaggtctgccccctgccggtggaagatgaagcatactgccttcacctactgaggggcactgaagcgtttgtctgccttctttagttgcagctacttaggaagagcacctgtcagattgactttcaaacagataacttcttgaggtagagcaaccaccatgtagtgagtagtatgatggaataatacttcatcgaggtattttaaaaaaaaaaactcacttggattgccaactaatattgtcatttacatgtgacctggttgcaacgttaagatttttaaaagactgtgatagatattgatgactctcatgtgtttgtctctcttgggcgttttaaggaaatgctagtgagtcggaggaagaccgcagcgccggcagtgtggagagcccgtccgtctccagcacgcaccgggtgtctgatcccaagttccaccccctccattcaaagataatcatcatcaagaaagggcatgctaaagacagccagcgctacaaagttgactacgagtctcagagcacagatacccagaacttctcctccgagtccaagcgggagacagaatatgtgagagcttttcctcttgttaaaggaggagggcaagacctgccaagcctgggtactcagagcctcttgagggcaattcttactcaacaaaccccagcgcctggctgatgggtgggcaacccctagcccctctgtgccctacctctctcctctccttacataaagaatattgacccttttggagaatcttatgaggatcaagctgaaataacactcttaaaagcatatgggatgtcataaagacctctgcagataatgaaaaatattctcataaagatagttttatttacttcatcctctatgcttgttgacctgctattggttccataccagcttctgtgccttactctgggaagagcaaaaaggagacagggagtgatggttagcttattcgggggactttcgtgctacatcagacataaggtatctgaggagcaaattacaggtcccacttttggtagttgtgcagcatcgtaagatttttaaagcacacattctagagtaaaaactgtgactctgttgctctggtccttcctgatccccagggtccctgccgtagagaaatggaagacacactgaatcacctgaagttcctcaatgtgctgagtcccaggggtgtacacattcccaactgtgacaagaagggattttataagaaaaagcaggtgagtgaggtcctcagtgtgttttcttcctcttctgttgacacagaggagaaacccatctcaccagcccccaggctcttctggccatagctctaactctgagcctgtgcagcaccagtgcccaggacttggtgccagtctcaggaggtcagaccaagggctgctttgacttgttgctctgagtgctgctatattggccataatcctcaaccctagtgcctttccaccacccgcttcccactcctgtcctttcaatggttcacccacagggcggacaagatgctgcccagtggcacccttta

SEQ ID NO: 1260 - DNA, 6000 bp, Homo sapiens
ataaaattctggaaaatacaaactaatctagtgtgacagaaaggagatcagcggcttccaggagataagaatggagaaaaggagggctcaagattatgaaaggtcaagaagtttttgaggatgatggaaaggttcatttgtatgttagcgatttcctaaatgtatacatatgtcaaaacctatcaaatcatacacttccaatctgtgtagtacattgtatgttaattatacatcaatgaaaaagaaaaatctatctctctgtctatcaaattggagaggcaccatggaatctgtggattatgatctaggaaatccagcaaaaagggtctgcctccgtctctccatctccagtgaaagggatagataacaggactctcaggactcttctagctatgataggagagctactgggaatcttctcctttctatctggccttgcaaagctggaaaaggagcttgaagtggcaccaaagatgcccttgggtaaagacacaggattgacactggtgccggggacaaaccagctgaatgaaaagtgctcctaaaatctttcctgtccccttttaagacttcactgggcagggaaagaccatactagactgttggccagtttgaagactgtatgtcatgcccacaggtagactcaattgttagcatgttgacatttgaactaaggagacaaggtatgtgggctgtgtgctaggactcatttgagaataaaacctttaagattgttcaggtggctatgtgaacacaaggatgaacttttatttcccattccccaggcaacactgtgtctaagagttcatccttccatcagtgctgtaagataggtactagtgcccttacctggtcctagaattgagttgcagaacttgcccaatgtcagaaagctattgagaggagaactgagcaagcagttaagaataaactctagtctactgtgattgaagtccccagtctctctcattgttctgaagcttcaaccttgaagaaaagttggaagttagacagagtcaggaattgcctctgtttgaatgaccaggagacacagaggtaactcttatcatgtaaatgactaactgtgtaggcaagggtgtgggtgcccacatgtagaaggtagcactattgtgagagaaagccatgacaggagtatcattgtcctgagcagaaacctcccttccatggggtgggctcccaatgtccaggccccttctctggagcatctatctccagattgtctgacgacacgggacagcactaactctgaggagcccctgtctctggaccatggatttccactgccacaggtaccactgtccccatccagtatatccagttaccttctcttctcttccaaatctcagaattatgccttccacaggtcacatgcacaatgccaacaccatcccctctgagccctcccctcgtccctccaggcacacagaatgactctctgtggatgcccatactttcttcttgcctgcctctctcagctggactctcccacattgtttaagactcaattcaaatgccaccacctctcagaagttttttctgaccacacggacaggtttgccatccctccagcagggttataaatgcacccggtgaacctctctgttttctctgctgtcacactgcctaccactgtctggactctggtgagtcactccagccagcctgtgaaatcctgcagctggcacatggaggtgcttagtaatcattcttggactaagtggatagatgaactcttaatgatgttatttgtgagtaaaagtcatttgcagtgttgttagccaccgtgatgttggcagttgatggtccccaatgcatccccaagcccagtatatgtaattccgggaggctcacccagcaggcgatctgatggagagaaaattagatttcctgtctccaccaatacgtcccctaaaggggaaaaaaaacctgaagcttatagggtgagagccactgagtcctagcaactgggtccccaacactgcttgcctttagaagtttggctctttctgttctaagtctattggtggtcagtaagactgatagccacaccccagaggacactgagaaacagtagtgctgtcagaaggagagagaccctagggtggcttgtccagctgggggctgagcagaagaaaagcaaaggagccagtatcacgcagcgacaaggtgccctttagcagcaggagtgggctcaaagaaatgagtggtttaggtcacctggtgaaaataacgaggctgaccaaaggaaacactaattataatcaggtcagctggactccgttagtgaaaagagatctatgcagcctcctgacctctattcggatggttattcgctacttttgcaatgattagcaattgtatgccaagcaccttcacagggggtaaacatctttctcactaaatactagtttatgttaaaaactacaaacaccagatgaattggaagtttaacagaattaacgagcatgtcacaaaattaagttttatccagtccaaatccttcctgcaacaattatgttccgggaggggcagggagcttgcagttatcaaataaaactggctaaataacaaaacacaattctccccgtgtcactgcctcaaatttactctgctgttgcaagatgtcatgataaaggtgatggcaatctatataaaacattgttattggaatagcctttgaaagttgaaatgtgacttagtctttacgtgtgtcccgtggtccctgaggccgggctggacgcctggagctttggcgccccctagccattcggcactgaacaagtttctccaactgcaatgcgagggaaaaaagaagagaaccaagaataaaacaaattttttaatcctttccaaaaagacattgtttctgatcttcccctgtccactctccagatgataaagctgaataaaaagtgctacactaaccagtggtcagtccaggctctgctgcaacattgcactaaccagaactgcagacctgggacctcaagaattgcatttgatgccgaacccagctctaatttcagagtcaaggtctctgcgagtatttaaggaacggatgtaaacctgggggattcgttttgtttccttcaattttccaatgaaatcagagatcctgttcttgggtgtcaacgcagatactagaaggaggtgatacaagagaaaggaaacagcaagcgacgattatggcacggtttcctgtaaacaaggttgagtgtagccacagcctgagcactgtgggagaagagctcataagaaaatgacggtgctgggccttcgtcaccccggggcactccattgttcttgtctttggtctctttttatttgtagaggtccaattatttatttatttagtacaagagggaacgaaattgatctttccattctaaaaggagagtatatatgtataaaaggaagctgtatagatatgggggaagaggtggacagggggaaaaggggagaggacgagagagagaaagggagggagagggacaaggagagacactgggcgagagatcgattaggagagacagaaatgatgaatgaagattaacttcacccaaggcttcgtgctggaggggaatggaggagctcctgatttgctattactactccaaactgcaaagggctccttcaagtcacctatccacctcctaaggcaagcgtccaatttcaacagcgttcaggaaagtctcctcccgcggaggtctcaccgcttcccactccacccccacaaactctttggaaaagtgccttgaaaaatttaatcctcaatccaatcctggaccaccagcgtcctctgttggtcaccgaagggagggggtgcgcagacaaaactgaagaaactcgagtgccagagaaggccgacaggagttacagcgacctcagcgcgcaattgcgcccccgaactttactgaaaagtgtttagattgcagagataagctagaatcccaacgcatcgagaatacagtaatacgaagtcgccttcaaaaaatgacaatgaaaattgcctattaaaggactatttggttaattacgtttcagcagtgcccagtttattgtctttattattcttttgtcatgggtgtaaactccatttgaaaacataatcagggagaatacccaagacaagaagaacagttgtcatttaaaatatttgaaaagccctgccttaaggacgcattcgcttgccggtccactcttaattggagacttgcggtgtagcaacacgtgagagtcttcttgcgttgagaagtaagcctggaaaggggcgaaggccccgggcgcatcttcagatgcgtatttgtgggcccctggggatataaacagcccagcgggtgtaaattaaaccccgcagtgccttggctccctgagacccaaatgtaagtcagaaatgtcccaagacttcgcctgccaacggaattaaattttagaaagctccacgaggtacacacgaatgcggagcgctgtatgccagtttccccgacaccggctcgccgcagggagacctcaccccgagagcggaaggggtaagggcggcggggtcaaggagatcgggggtgctgagttggccaggagtgactggggtgaccgggggtgctgaggtggcctggagtgccggggtggccgggcacaccttggttcttgtagacgacaaggtgacccgggctccgggcgtgcgcacgaggagcaggtgcccgggcgagtctcgagctgcacgcccccgagctcggccccggctgctcagggcgaagcacgggcccccgcagccgtgcctgcgccgacccgcccccctcccaacccccactcctgggcgcgccgttccggggcgtgtcctgggccaccccggcttctatatagcggccggcgcgcccgggccgcccagatgcgagcactgcggctgggcgctgaggatcagccgcttcctgcctggattccacagcttcgcgccgtgtactgtcgccccatccctgcgcgcccagcctgccaagcagcgtgccccggttgcaggcgtcatgcagcgggcgcgacccacgctctgggccgctgcgctgactctgctggtgctgctccgcgggccgccggtggcgcgggctggcgcgagctcggcgggcttgggtcccgtggtgcgctgcgagccgtgcgacgcgcgtgcactggcccagtgcgcgcctccgcccgccgtgtgcgcggagctggtgcgcgagccgggctgcggctgctgcctgacgtgcgcactgagcgagggccagccgtgcggcatctacaccgagcgctgtggctccggccttcgctgccagccgtcgcccgacgaggcgcgaccgctgcaggcgctgctggacggccgcgggctctgcgtcaacgctagtgccgtcagccgcctgcgcgcctacctgctgccagcgccgccagctccaggtgagccgcccgcgccaggtgcgctgcgtgcagcacccggcgcactggcgccgaagggcctgggggttgctgggtgccgctgcgggagactccgcttttcttctcactggagataatatgtggggaaactgaaggcgctccgggaaaggtgaaggcggtcgccggagggaccctccccagccggccctctacttgctcgattctctaagtgcagagtacttgtaaattgcaaagcgctttcagtgaaaatgggttaaaggtttccggagctgaggggagcggtaccgatgtttagctgttggaaagatcctggacacaggagattctcctcgccccgcacgggggtgcacacggactgcaatcccagggatgcttggggatgggggggatataggcggatttggaccaaggaaggtgggcaggcacgttgtaggaaatagtacctctcttttaaaatactgactttgcacagccttttggtttgcaaagcaatgtctagtcccggtatgtccaaaaacaagtaaagtggattcgggttttgatatcttctgcggttggaaa

SEQ ID NO: 1261 - DNA, 6000 bp, Homo sapiens
gtatatgtgtaaattgaaagaaaactagagagccagctgggaatgctcaggacaaagtgggaagcaagttcaaggtcagagaggcaggcagggtagcagggccagtgtcagggtggatgagaacatggtcaacatccaggtcaaggtttaaagagctggaattcaagaccaagagtgcagggaagggaggtggcaactccaagcgaaattgcttcagtgaaaactgatcttatcttctaaaaataaggtataattttgaatcatagaatgtaaagacgctaactagaactggaagaaattgatctattcatgagtagctgcattgcctcaaggcttagtattcctagacctcagcttctaatttgtgaacttggaagaatgttgagacaacataatgtcaggagatgtgggggctggaattcaggataacagctccactgcagcccagccattacttttgttgtgatgcaacagcgtttgggactaaagtgaatggaacaggagcccacatgctcttatatcccacagttggcagacagaggagaaacacactagagagtgaagcaaactcttcccaccttggtttcgtgactgtcatgagtgactccaactgaagacaggggttggatctggaaatgcatttgcctgcgcttctcaaggctgctgagtgagtgggtctcagacacaagagaggtcattgggatggtaaagcaggtgcaacctgcattccatgggccacaggggctcagaattctctagagccacccatgttgattgacatcctggcctggcattctttcccttctcattgtaaacagtccccaccccaaaactttgcttgtgcccctccataatccctttctcttggcccttcacaggcaaccactggtttgctttctgtcactttggattaattttcctttattttttggtctggtgtctttcactcagcataattactttgagattctcccatgttgttgtatatataccaacagttcattccttttcattgctgagtagtattccatcaaatggatatgccataatttgtttattcattgacctattgatggccatttgggttgtttccagttttgggctattacaaataaagctgctatgaacatttgtgtctaaaacaaaataaaattagaaccatacattattgcagtattggccattataagatatctgaatatttgctttttaagcctatttgtttaatttgtaggagtactttggtgtagcactgctaacatagtagcttaaaacatgctggaaaagtagtctttaagttattgctcaatttgtcataaaagtcagtttgtactggtaagccatgaaagtaactcaggaaaggtgttcatttagaggcaaatgttatggttattgtgaggccacagtgttgctttgcaaagaacccgggactcaaaatcaagtgaactacttatttccttgattctgtgactcatgagatatgaacagaatgaagtgttttccttctctatatttaatcaatgatttctataggaggcatctcattgcatggggcccagagtgtcacatctaaactcttcaccacaagtattccttccaaagtcttaaatctctatcaactctgccaggtagagtcccctctctcttcccctgcccccaacttacacttagctttgtcccctctacttttcagagaagttctcttgggcatgtacatcctagttctcaacaagtctcccagattctggaggctggctcataaccaatcacaggctcaaaacagaaggtctttctctgcaaacatcattgcaccggcactgtgaggagctccattgagttaccatatgtatatatggagagacaaatccattattataattgcagacttcaatacccatctttcaataatggatagattaagaaaacagaaaatcaaatgacctgaatagtactatcaatcagtgtgatctactaacatatatctattacattaattgaatcaatgtttaaaaaccttccaaaaaaagaaaaaaacaccagcacagatgttttcaatggtgaatcctatcaagcatttaaggaagaaacaataccagttctccacaatatcttccacaaaatagaagcagagagaatgcttcataacttattctatgataccagaatttcaccaataccaaaatcaaattaagacattacaagtaaagaaaattaagaacaattatctgttatgagaataggtggaaaacttcaaacaaaatgttagctttaaatcaatccaataatgtatcaaaagaattatacaccacaaccaagtgggatttatcccatatattcaaggctggctcaacattttgaaatcaattaattaatccatcacatcaataagctaaattttttaaaaaatcatattactatatcaattgatgcagaaaaccacttgataaaatccaaaacccattcatgatttaaaaaaaaaatcctcttaccaaaatattcattaattgtaacaaataaacatgccctatatatatgatttcatatatataaatatatgaatatatatatgaattcttatataaatatatgaatatatatgaattcatatataaatatatgaatatatatgaaatcatatataaaaatatttgtatatgaattcatatatattcatatatttatatctatatgaatttatatatatgaattcatatatatatgaatatatataaatatatgaatatatatatggtgtggttttatatatgatgctgataatggggcaaatgggtgtgaaatatataagaactctctttgcaaactttctgtaatataaactaattctgaaattaaaagtttccttttttaattatttttcaatttggcccattttctagtggagaaaggaagcaactttatacacaactatgaagcagagaagaaggtggaatgtgaattgttctgacggtgttaaatggtaggacgttattaatctggggaaaataaaggtgacaagttgtaactttgcatgacatttgaaagcactgctaaaggaggatgtagcaggctgcctggaaagtcaccagcactttgaaaacagtggctgcccaagttcttgactgtgttgtcatacaggtacctcactcaaagggtgggtgccaaactgggagactgtatttgtgcttctgttgtgtgtgtgttgtttttttctttctttctttctaatttagtcttcaggtctctctcacatgagtgcgataaactctagcacttccctgattcaggaatttggtgatagatgtttgcagtgtgcctctcataagatacttctttatccttgtggatgggctgatacctaagtgtcacttgtgaccagctatcactttcacagaaactgatttttactgcccttgtggatcatgtctcacctgtgttcagtttattcctactaagatagccaatgtctaggaaagccctgcccaggagagaagttattctctggtctatggatcagatgagaaagaggaggcaactcaacaaaatccatgaaatcacagaagcagtttcttacagatcccagagagaagaaggcagcatgcttcacagggccagtgggaaaggaggagccaacagggaaacaaacgttcaaacagtggatggggaacaagagagagaacaagggacctacgggccaaagtgttcattggagtccaaggcattatcccagcaggcttcccaaggggagttctaattgattagagccagcaggcatcagctccgtgcagtcatgctgcaactgagacatgatcactgtggcacatctgtgagatccatgctgggggtgggagtcagtgaggtaagtcaagtaggttgtatccagctgtctcataggaaagtggtcagcaggggatgatttatagggcagatgtccaggtcaaccatgctcaggaactgggagcaggtaaagaactaggcaccatgtcaagggtgacaaggaagttaaacctatattcaaagtggatgttgaagccacacaaaattataagaattcactacagcttcctataccagtctgcacattaaaatcacagaaatactgcatagaaataccaattcctaggccacctatggtgatgttaatttagtaggtctgcaatgagacccaggaatttttatatttagatgggtgtacattttaccctaagcctttcgtttagatgattgcaaccacaattctttcaggcaaattattcaactacttggaatccacatccacatccttttctcctgactgaaacagaggaaagtatttttccctagcccatcctagaaacgtataactcactcaccgctccctattacaaagaatacccctgctctatggtttgtatggaatgtgactccaagtactgatctcatttgaattgtttcctttatacctgcacggccacctatgtgtccctgtcaatgttgtttttgtgttttccacatgtcaatgcatatgtttccaagtacacgcctgacagcgaagagaagtctttaacttgataaaagtgaacctggatgttagctagtttgaactgatgaagcagtgagaggcgtcgcatggtacagcttgcattaaactggtttgcacctcaacttcagtgggtatataaacccccagggccttgttaactgcagatgctgattcagtaggtataggatgggggtggagagtctgttctcaggtgaggtggaggctcctggtcttgaatgcaaggcatcactccctctagaagaggtgtgtacccttggtctctgaggcaaaccattactctccccaggtgactgggtgcccttggtctctgatgtagaccattgccctctccaggtgattgtggtaccctttctgtctgatataaggcatcaccctctccggaaagtaaatctccagtggctgggaggaagctacattattgattgtcactgaacactctatgagacagagacttgagcggagagtgttgtgccttgtggtgtgtgtagagtaaggtttgccttacaactcagcaatggtgaaagggaggaatggtatcccaggacaccagcggcaactcatatcttctcttgagaatttggttgggtgggcagacgtccacagtaaggggcccttcttcaacagcttccaggtaccaagaggagtctctctcccctgtccatggtttgagaaactcaggaggtgctgtgttccctgcaagttactgagctgttgttattgtttacctggtcccttcaggcatgctgttaaaaaaaaaatcagtactctgatttgcacagatttgcacagtactctgatttttcacttatctttggaatgttcatcaacactagtttgtgcccagtactgcagtttctgctctatgtagagcaatgaataaaacacagcctctgtcctcacatagctttcactgcctttcaggtgataagcatgtcaatcaataatcacagaattgatccatatggatgtgatggtagatgtgttcactacacagatagttttgatcacctactatgtgcccagcactactctggatacttgtaattcatcaataaaccaatagcaacaaaaacatagatttcttggccaagcatgatggctcacacctgtaatctcagcactttagaaggctaaggagggtggatcacttcaggacaggagtttgagaccagcctggccaacatggcgaaaccccgtctctactaaaaatacaaaaattagccaggcatggtggcacatgcctgtattcccagctactcgggaggctgaggcatgagaattgcatgaacccaggagatggagattgtggtaagctgaggttgtgccactacactccagcctgggcaacagagtgagactgcatctcaaaaaaaaaaaaaaaaaaaaaaagatttattcttaaaacttattttctgggagagggtaatacataataagtaaaacaaataagtaaatgtcat

SEQ ID NO: 1262 - DNA, 6000 bp, Homo sapiens
ccttagttttaactctctctgagtttcacagaggaaggtaactcgcttgagtcctttccacacagggtccctccaaaccacaaattcctgattcctagtctggtttattcctattaagaactaggctgagcccttaatccctgtttaaaggggccgtgtttattgaaggcataaactctgggcaaagggtcataaatcattctttagctgggtccagagagtgacgagggcacaagacagagaatgggctcaaagaagcaatgttattaagaatatcatctgcttgtctggtgtttttccttggaggtacacccctgagaatcctctgcgctaaaaatctctttgcctctccagatccagcgctccaaactctccagctggctctgtgcctagaagaagggatgggaacagcactgaccacatcacccttgcccttggcttccaactgggtttagacaatgggaggcactaggaggaaatcaaagtagatgagaaagagagggagagagagagagagagagagagagagagagagagagagagagagagagaaatggccgggagagagagagagagagaaatgactgggcgcggtggctcacgcctgtaatcctagcactttgggaggctgaggtgggcggatcacctgaggtcaggagttcaagaccagcctggccaacatggtgaaaccctgtctctactaaaaatacaaaaattagcaggaattggtcatgggcgcctgtaatcccagctactcaggaggctgagtcaggagaatcgcttgaacctgggaggtggaggctacagtgagccgagatcccgctactgcactccagcctgagcaacagagcaggactctgtctcaaataaataaataaataaataaataaataaataaataaataaataaatataaaaataaataaaaatatacaaaagttagccgggcgtggtggtggacacctgtaatcccagctacttgggaggctgaggcaagagaatcactcgaacacgggaggcggaggtttcagtgagccgagattgtgccactgcactccagcctgggcaatagaatgagaccctgtcgtgaaaaaacaaaaaaagagagagagagagattggggtattcatcccccagctgcctccctgccacgccactttccacagtgactgtgggttttctacctaaggtcacagctctgggaaaatgcctactttcccatgaccagagcccccaccaggttacagcacagctccctccccttttctctttaggtctagagatggtaacagcttcctggtgttccagtaatatctggtgctttacctgtcccggttgattcccttaactcaggtcacacctttgtacatagttccttctctttctttttcctgagagagggtctcggtctctcaggctggcgtgcaggggtgcaatcatagctcactgcagcctcgacctcctgggctcaagggatcctcccgtctcagtctcctgaggagctgggattacaggtgtgcaccatcacacttggctcactgcaacctccacctccagggttcaagcgattctcgtgcctcagcctcccaaatagctgggattacaggcgcgtgccatcacaccctgctaatttttgtatttttagtaaagacggggttttgccacgttgcccaggctggtctcgaactcctggcctcaagtgagctgcctgccttggcctcacaaagtgctgggattacaggcatgagccactgtggcacggccacaaaaaattttttaaaaattagccagacatggatgggcatggtggctcatgcctgtaatcccagcactttgggaggctgaggcgggcagatcacttgaggtcaggagttcgagaccagcctggccaacatggtggaactctgtctgtactaacaatacaaaaattggccgggcatggtggcatacacctgtaatcccagctacttgggaggctgaggcaggagaataacttgaacctgggaggcagagcctgcagtgagctgagattgcgacactgcactccagcctgggcaacagagcgagagtctgtctcttaaaaaaaaaaaaggaagaaactatgtacaaaggtgtgacctgagttaggggaatcaaccaggacgggtaaattggcaaagcaccaggatttgctggaacagcaggaagtcactacaccctatctctaaataaataaatgttttttaaaaattgagatttttgtttgtttgttttttgttttttgctttttggagatagagtttcactctgtcatgcaggctggagttcactggtgcgatctcagctcactgcagccttcgcctcccaggctcaagtgattctccagcctcagcttctcgagtagctgggattacaggcacatgccaccacacctggctacttttttgtattttttagtagagacagaatttcaccatgttggccaggctgattttgaactcctggcctcaagtgatctgcccgcctcgacctcccaaagtgctgggattacaggtgtgagccacggtgcccggccaaggtaatttcctcttcctctgtcagcgcccctaccgtgctcccacgctcagttgtcatctccctctccctagacatgaaaaatcaggtgacatctaatctctcccaaagcaacacaagggagggggcactcccaaagcctcccacagaaacacaatttaagtaaaggtgaaaccagtccagtccttcctatgcaaatgtagcctgaatggcaccgccattgcccatcccccaatccctgtgtccaagccttatttgcgtaacctcccacgggacagaacttcctcctctcccttctcttctaggccctcatcatctctcatctacgctagagtctccccactgatttcctcccttccatcaggcccccataatccatccccacaatacaagctcctcagtgcacacatctgagcaaaagtcttcagtggctccttagtaaccgcaaatgcccacccctctttcacttctctattgaatgtgtgaatttttaccaaacgctcttattaaaaaaaataaaaacaaaaacaaaaaaaaaacaggcagggcagggtggctcacacctgtaatcccagtgctttgggaggctgaggtggtaggatcatttgagcccaggagatcatgaccagcctgggcaatccagcaacatacccctcactacaaagaaatatgtatatatttttttgagacggggtctcgctctgtctcccaggctggagtgcagtggcgcgatctctgctcactgcaacctctgcctccctggctcaagtaatcctcccgccttgtgagtagctgggactacaggcttgcaccaccacgcccagctaattttaaaattttttgtacagatggagtcttgctatgttgcccaggctggtttcaaagttcagagctcaaacgatccgcctgcctcagcctcccaaagcgctgagattacaggtgtaagccaccgcacctggccaaatttacaacacacacacacacacacacacacacacgaatcaccaaattgttaggcctaaaggtgccattcattactccgagtttcaaataacttttaaaaaatacatctatgccgggtgctgtagctcatgtctgtaatcacagtactttgggaggccaaggtgggaggcttgcttgaggccacgagttcgagaccagtctgggcaacatagaaagactccatctctgcaaaaaagatagccaggcttggtggcgtgcatctgtagtcccagctactcgagaggccgaggcaggaaaatcgctaggacccaggagctcaaggtcccagtgtgttacgatctgcactccagcctgggcgacagagggagactgactccaaatgaaaccaaaaaaaaaaaaaaaaacaaacaaaaacaaaaacaaaaacacacctaaattggagtttaacggaaaacttttaactttctccagcactcctgctaagcatcacacttctctctgcttgctggtaccctggctgacgtctgagcaggatgggacgcgcggctcagagcctaagataaaccgaaagtgtctacagggctttctaccaacaaataagctctgacgggttcctttgatgaggtttgggaggcaggtcccgggaggtgcccgcggactcagccccgaactccgggacctgggctctgcgatccttgcagagggcatgggcaggggcagaatggagaagtgcaggacggggaagcctgggagctgggtgggggcggccacccattgagccggatccggccaggcgcccacgctgcgccccgcccgcggggctgcgctttcccgggctgcggccgcagggctggtcagtccggcgctcccgggtcccaggcccggaaggagctaacgggctattcgcaggcgggctgggattcccccgggggaggccccactgcccggcccgcgtcatccccgcccatctccacgggccgtcgcgggatagccccctgcaggagcgggcagggtagtgggcggcgcttggcggagggcagcacgctcggggcgcgcggggactgcggccgaggggaggagagggcggtgcgcgggcgggggcggggcgagcgagggcatatcagggcagcccgcccaggccacgccccatccaggcctcgccccgtccgcaccccgccccggccctgcctagaacggcgggaccacggtgactgacaggactccagaccagtcaccacgcgcctcgaggccccgagaggctagtcggggccgagccagcggaggggctcctgaaggggcgggggcgggcggggaagccgttcggcgaggggcggggtctctggaagactggcagaactcacagccaatggcaggcgggagccgtcccgttagcgccggatccccgcgggtagggcggggcgggcggcgccgtggggatcccggggcagccgagggcccctgactcggctcctcgcggcgacatggatcggatggccagctccatgaagcaggtgcccaacccactgcccaaggtgctgagccggcgcggggtcggcgctgggctggaggcggcggagcgcgagagcttcgagcggactcaggtgaggacgggggaccccggggcatccctggggcaccctgagggacgcggtgtccgggaggggctttgaagggagtaggagtcttgcaggccccagttgaagacggggcgagggtgtagtgagcgggggcattgacgtgcagatctgggcgatcccaggaaggtcggggaccccagggtaccccagctggcctggggagaagggcagaggcgggctcggaggagatggcaggatgcgtggccaagaggagcctgatcggctgggtaccgggcaggagtcccaagatgaggtgagaggggaaggaactgaaaaggggcggaatggaagggttgcccctaaacaagggaagcgcacgggagccacttggaggctcaagtgtgggggcggagagtgggggcgccgggctgggaatgtgaagggtgaggggacctctcttcccctccgatcacttcttggttgcattgacatcccttcccaccccccaccccttagcatccccctttctcgatgcctcttgcttggctctggccagccccagctgtcagctctgaggccgggcggaaggggtcggagcagggaaaaggaatgtaggaaatgcaaagtgtggccactttgtgggaaaattactttgggggctaaagtggagaccatggtgcccctgagccctgacttggggtcttggttttatcccccaagatgtgcctgacagctaataggcagactgccctatttgtcctgcctggccagggcttggggccaaaattcctcagtgtcatcaacaaaaagccacaatccatttttttctccgagtttttaatgcctggtgtattgattgggctgaattaagctgacatgttgatggtgttcatcaattcatttgtat

SEQ ID NO: 1263 - DNA, 6000 bp, Homo sapiens
ctcgactttatacagctggggatgggtggggctgggagcactggggagcaaaaacctggggctttctgatgctgtcccatggggtgtcaaccaggagctcccaaatgagacccactgggctcatgacaatgacccagccagggaggtgaggtagaaggcaggggtcctgtctgcctcccaccattggctcccgagagccccaggagttcagaggcctttccaggagtgatctcagattcatggtccagccccagctcttccctgatggggagcaggtgggtaagacagaaaggcatctagggccggtggctcacacctgtaatcccagcactctgggaggcgaggcaggtggatcacgaggccaggagatcaagaccatcctgactaacacagtgaaaccctgtctctactaaaaaaaaaaaaaaaacaatacaaaaaattagccgggcgtggtggtgggcgcctgtagtcccagctactctggaggctgaggcaggagaatggcgtgaacccgggaggcggagcttgcagtgagccaagatcgcaccactgcactccagcctgggtgacagagtgagactccgtctcaaaaaaaaaaagaaagaaagaaaggcatctaggtcgggcgcagtggctcacgcctgtgatcccagtgctttgggaggcctaggcagaaagatctcttggggccaggagttcaagactagtctgggcaacatggtgcgacacctgtctctacaaaaaatttaaaaattagccaagtgtggtggcacacatctgtagtcccagtgactcaggaggctgaagcagaagaatcacttgagcccaggaggtcaagactgcaatgagctatgatcactccactgcactccagcctgggcaacacagcgagactctgtctcaacaaaaaaaaaaaaaaaaaaggagagagagaaaggcatttatgagctctctctcaaaaaggaaactgaggctcagagaaggcatgaggacttgctgcttccccagctcatcaaggtgagtggcctggagtctgccccgattctgggcctgggcagggcaagacttcagtggccttggctccccatagaagtaggaggagtggagcctcagtcccaggatagggacagcaagtacagtgggacagaagaagtgggaggccctgggtactagagaggcaggaggttggctctgagagcactttaccggagacagcagaaagccatttaatctctgtgcacagcagtttccttgtctaaaaaccagggataacagggccgggtgcggtggctcacacctgtaatcccagcactttgggaggccgagacaggtggctgacttgaggtcaggagtttgagaccaacatggcgaaaccctgtttctactaaaaatacaaaaattagccgggtgtggtggctcatgcctgtaatcccagcactttgggaggccaaggcaggcggctcacttgaggtcaggagtttgagaccaacatggcgaaaccccgtttctactaaaaatacagaaattagccgggtatggtggcacatgcctgtaatcccagccacttgggagtctgaggcaggaggatcgcttgaacccaggaggcggaggttgcagtgagctgagattgcgccactgcactccagcctgagtgatagagtgagactctggctcaaaaaaaaaaaaaaaaaaaagacaaaaaaaaaaaaaacaacaacaactaaaacagggacctaagtcaggggagaaggaaggctggaatggccatgcctacaaagacaggaaagagggaatgtcagggttgtggcaggagcctagggcagcaccctccctccaagctgggagataggagccaggatcccattggtgtttagatggatgaggtagggtcaaggggcaagctccaggctctaagcacttctgtgcagactctactacttggagctcccctctccctctgtgatgtgggcatcaaaatctgcagaaagggaaactgaggcctagagaaaggaggggatttgcccagaatgacacaggaagtccagactaattcaagtttgcggcatttgaggttcctggccagtgtttctttttcttttttgttttttcttttttgtttgagacagagtctcgttctgtcaccgaggctggagtgcagtggcgcgatctcagctccccgcaacctctgcctcctggaatgatcctcgtgcctcagcttccccagtagccgggattacaggcacccatcacacctggctaattttttgtatttttggcagacacggggtttcggcatgttggccaggctggtcttgaactcctgaacccaggcaataagtctgcctcagactctcaaagtgctgggattacaggtgggagccaccacgcccggccaaccagtgcttcttaaggaaagatacatatagtaggagatgtgacagtaatcttcctcctggcccctctcagcactgtgccatggaggttctgatctgggccagctgcgctgttaggggaagggggaaaatggccaaaccccatgtattctccttccttttccctctcttcaatcccaggcaggtaacaataattatgatgtaccaggctccgggccaaagtcatcacctgcattaggtcaccaaatcctcaggccaacccattacagtcatgagtcacttaataacagacacattcaacaaattccttgttaggcaatttcatcattgtgggaacatctcagagtggacttacacaaacctagatggtctagcctactacacacctaagccatatggtctagcctactgctcctaggctacaaacctctacagcatatgactgcaccaaatattgaaggcagctgcaacatgagggtaagtattagtgtttctaaagatagaagatggccaggcgcggtggctcacgcctgtaatcctagcactttgggaggcccaggcgggtggattacttgaggtcaggagttcaagaccagcctggcgaacatggtgaaaccccatctgtactaaaaatacaaaaattagccagtgtcgcggcacttgcctgtagtcccagctactcaggaggctgaggcagaagaatcacttgaacctgggaggtagaggttggagtgagcctagatcaggccactgcactccagcctgggcgacagagggagactccatctcaaaataaataaataaataaataaataaaacatagaagatgtacagtaaaaacacggtaattgtttttgtttgtttgttttgagacagggtcttgttctgtcatgcggactggagtgcagtggcaccatcaggctcactgcagcctcgacctccttggctcaagtgctcctcccacctcagcctcctgagtatctgggactacaggtccacgccaccatgcctggctaatttgttctgaattttagtagagatggggtctcactgtgttgcccaggcttgttccagccttctggcttcaagtaatcctcccacatcagcctcccaaagtgctaagattacagatgtcagccactgcacccagccagtaatataattttatgggaccaccttcatatttgctgtcccttgctgacttacacatctttatgcaatgcatgactgttaccatcattatcatctctattttccagatggggaaactgaggcacaaagaatctaacttgcacaagttcatctgcttagtgatggaacaaagatgtgaattcaggcagtctggcttcaaagtccacacgcctaacaaccacaccagattactagattgcttttttcttttttctttttttttttttgagatggagtctcactctgtcacccaggctggagtacagtggtgagatctcggctcactgcaacctctgccttctgggttcaagcaattctcctgcctcagcctccccagcagctgcgattacaggcgcccgccaccacacccagctaatttttgtatttttagtagagatggggtttcaccatgttggccaggctggtctcaaactcctgacctctggtgatcctcccacctcggtctcccaaagtgctgggattacaggcgtgagccaccacgcccagcccagactgctttatttttgtatttgtatttattcatttacttattttgagacagggttttgctctgtagcccaggctgaagtgcagtggtgcaatccagctcaccacagcctctactcaccggggttcaaaggatcctcctgcttcagcctctggagtagctggggccacaggcatgcaccaccatgcccagctaatttttaaatattttttggtagaagtagggtctcactatgttgcccagactggtctcaaactcctagcctcaagggacccttctgccttggcctcccaaagtgctgagattacaggcatgagccatgcacccagcccctttttaaaatttttttgagagacaagactttgatctgttgcctaggctggagtgcagtggtgagatcatagctcactgcagcctcaactcctgggctcaagcaccagactccttttatcacattctatctcacacgcgtgtggttccaatcctgcctctgccacttctcagttgtatgccccaacccaacctgtctggctctgtcctccttaacagaaggacggccctggccacgggccacagccagcaacgcttaagcaccagggccggcgagtgccctgccgtggcacggctccagcgtcgcgctctcgaattcatttgctttccttaacgagagaaggttccagatgagggctgaaccctcttcgccccgcccacggcccctgaacgctgggggaggagtgcatggggaggggcggccctcaaacgggtcattgccattaatagagacctcaaacaccgcctgctaaaaatacccgactggaggagcataaaagcgcagccgagcccagcgccccgcacttttctgagcagacgtccagagcagagtcagccagcatgaccgagcgccgcgtccccttctcgctcctgcggggccccagctgggaccccttccgcgactggtacccgcatagccgcctcttcgaccaggccttcgggctgccccggctgccggaggagtggtcgcagtggttaggcggcagcagctggccaggctacgtgcgccccctgccccccgccgccatcgagagccccgcagtggccgcgcccgcctacagccgcgcgctcagccggcaactcagcagcggggtctcggagatccggcacactgcggaccgctggcgcgtgtccctggatgtcaaccacttcgccccggacgagctgacggtcaagaccaaggatggcgtggtggagatcaccggtgagcccccctgctcctgcaggggagaggaggaggctagcagggcgggcagggccgggggcgtgcggttgaaacgggggtcccgggggcctggggagttaaacgttggcccagcaccgggaaaaacaggactcctgattcccttgctcaggaattgggagtgcgggtcgcttctaagggcgctttctgctctgtaatcccagcgctttgggaggccgagacgggaggatcgcttgaggccaggagttcaagactagcctgggcaacatagcgagacgcgcccccccgccccgaccccgcgccattacaaaaaaaaagcaaacaaaaatttttttaaagatcatcgatgaagagagaaaatgcgcttttctacagagtccccttcccacccacagccccatccccagataagcggggagttccctggcgcggtgccagtttctagccgctgagtgggcgtgtgcgcggctccaagtgcgcctgcgtactgctcactccccagctccgcgccctgctccgttcctcccaaaactctgaatcgaagaactttccggaagtttctgagagcccagaccggcgggcacgcccccatccccaaccccctctgttaatccctaccagcctgcagtcctggctgcttccaagcaggaggt

SEQ ID NO: 1264 - DNA, 6000 bp, Homo sapiens
tggccttggctccccatagaagtaggaggagtggagcctcagtcccaggatagggacagcaagtacagtgggacagaagaagtgggaggccctgggtactagagaggcaggaggttggctctgagagcactttaccggagacagcagaaagccatttaatctctgtgcacagcagtttccttgtctaaaaaccagggataacagggccgggtgcggtggctcacacctgtaatcccagcactttgggaggccgagacaggtggctgacttgaggtcaggagtttgagaccaacatggcgaaaccctgtttctactaaaaatacaaaaattagccgggtgtggtggctcatgcctgtaatcccagcactttgggaggccaaggcaggcggctcacttgaggtcaggagtttgagaccaacatggcgaaaccccgtttctactaaaaatacagaaattagccgggtatggtggcacatgcctgtaatcccagccacttgggagtctgaggcaggaggatcgcttgaacccaggaggcggaggttgcagtgagctgagattgcgccactgcactccagcctgagtgatagagtgagactctggctcaaaaaaaaaaaaaaaaaaaagacaaaaaaaaaaaaaacaacaacaactaaaacagggacctaagtcaggggagaaggaaggctggaatggccatgcctacaaagacaggaaagagggaatgtcagggttgtggcaggagcctagggcagcaccctccctccaagctgggagataggagccaggatcccattggtgtttagatggatgaggtagggtcaaggggcaagctccaggctctaagcacttctgtgcagactctactacttggagctcccctctccctctgtgatgtgggcatcaaaatctgcagaaagggaaactgaggcctagagaaaggaggggatttgcccagaatgacacaggaagtccagactaattcaagtttgcggcatttgaggttcctggccagtgtttctttttcttttttgttttttcttttttgtttgagacagagtctcgttctgtcaccgaggctggagtgcagtggcgcgatctcagctccccgcaacctctgcctcctggaatgatcctcgtgcctcagcttccccagtagccgggattacaggcacccatcacacctggctaattttttgtatttttggcagacacggggtttcggcatgttggccaggctggtcttgaactcctgaacccaggcaataagtctgcctcagactctcaaagtgctgggattacaggtgggagccaccacgcccggccaaccagtgcttcttaaggaaagatacatatagtaggagatgtgacagtaatcttcctcctggcccctctcagcactgtgccatggaggttctgatctgggccagctgcgctgttaggggaagggggaaaatggccaaaccccatgtattctccttccttttccctctcttcaatcccaggcaggtaacaataattatgatgtaccaggctccgggccaaagtcatcacctgcattaggtcaccaaatcctcaggccaacccattacagtcatgagtcacttaataacagacacattcaacaaattccttgttaggcaatttcatcattgtgggaacatctcagagtggacttacacaaacctagatggtctagcctactacacacctaagccatatggtctagcctactgctcctaggctacaaacctctacagcatatgactgcaccaaatattgaaggcagctgcaacatgagggtaagtattagtgtttctaaagatagaagatggccaggcgcggtggctcacgcctgtaatcctagcactttgggaggcccaggcgggtggattacttgaggtcaggagttcaagaccagcctggcgaacatggtgaaaccccatctgtactaaaaatacaaaaattagccagtgtcgcggcacttgcctgtagtcccagctactcaggaggctgaggcagaagaatcacttgaacctgggaggtagaggttggagtgagcctagatcaggccactgcactccagcctgggcgacagagggagactccatctcaaaataaataaataaataaataaataaaacatagaagatgtacagtaaaaacacggtaattgtttttgtttgtttgttttgagacagggtcttgttctgtcatgcggactggagtgcagtggcaccatcaggctcactgcagcctcgacctccttggctcaagtgctcctcccacctcagcctcctgagtatctgggactacaggtccacgccaccatgcctggctaatttgttctgaattttagtagagatggggtctcactgtgttgcccaggcttgttccagccttctggcttcaagtaatcctcccacatcagcctcccaaagtgctaagattacagatgtcagccactgcacccagccagtaatataattttatgggaccaccttcatatttgctgtcccttgctgacttacacatctttatgcaatgcatgactgttaccatcattatcatctctattttccagatggggaaactgaggcacaaagaatctaacttgcacaagttcatctgcttagtgatggaacaaagatgtgaattcaggcagtctggcttcaaagtccacacgcctaacaaccacaccagattactagattgcttttttcttttttctttttttttttttgagatggagtctcactctgtcacccaggctggagtacagtggtgagatctcggctcactgcaacctctgccttctgggttcaagcaattctcctgcctcagcctccccagcagctgcgattacaggcgcccgccaccacacccagctaatttttgtatttttagtagagatggggtttcaccatgttggccaggctggtctcaaactcctgacctctggtgatcctcccacctcggtctcccaaagtgctgggattacaggcgtgagccaccacgcccagcccagactgctttatttttgtatttgtatttattcatttacttattttgagacagggttttgctctgtagcccaggctgaagtgcagtggtgcaatccagctcaccacagcctctactcaccggggttcaaaggatcctcctgcttcagcctctggagtagctggggccacaggcatgcaccaccatgcccagctaatttttaaatattttttggtagaagtagggtctcactatgttgcccagactggtctcaaactcctagcctcaagggacccttctgccttggcctcccaaagtgctgagattacaggcatgagccatgcacccagcccctttttaaaatttttttgagagacaagactttgatctgttgcctaggctggagtgcagtggtgagatcatagctcactgcagcctcaactcctgggctcaagcaccagactccttttatcacattctatctcacacgcgtgtggttccaatcctgcctctgccacttctcagttgtatgccccaacccaacctgtctggctctgtcctccttaacagaaggacggccctggccacgggccacagccagcaacgcttaagcaccagggccggcgagtgccctgccgtggcacggctccagcgtcgcgctctcgaattcatttgctttccttaacgagagaaggttccagatgagggctgaaccctcttcgccccgcccacggcccctgaacgctgggggaggagtgcatggggaggggcggccctcaaacgggtcattgccattaatagagacctcaaacaccgcctgctaaaaatacccgactggaggagcataaaagcgcagccgagcccagcgccccgcacttttctgagcagacgtccagagcagagtcagccagcatgaccgagcgccgcgtccccttctcgctcctgcggggccccagctgggaccccttccgcgactggtacccgcatagccgcctcttcgaccaggccttcgggctgccccggctgccggaggagtggtcgcagtggttaggcggcagcagctggccaggctacgtgcgccccctgccccccgccgccatcgagagccccgcagtggccgcgcccgcctacagccgcgcgctcagccggcaactcagcagcggggtctcggagatccggcacactgcggaccgctggcgcgtgtccctggatgtcaaccacttcgccccggacgagctgacggtcaagaccaaggatggcgtggtggagatcaccggtgagcccccctgctcctgcaggggagaggaggaggctagcagggcgggcagggccgggggcgtgcggttgaaacgggggtcccgggggcctggggagttaaacgttggcccagcaccgggaaaaacaggactcctgattcccttgctcaggaattgggagtgcgggtcgcttctaagggcgctttctgctctgtaatcccagcgctttgggaggccgagacgggaggatcgcttgaggccaggagttcaagactagcctgggcaacatagcgagacgcgcccccccgccccgaccccgcgccattacaaaaaaaaagcaaacaaaaatttttttaaagatcatcgatgaagagagaaaatgcgcttttctacagagtccccttcccacccacagccccatccccagataagcggggagttccctggcgcggtgccagtttctagccgctgagtgggcgtgtgcgcggctccaagtgcgcctgcgtactgctcactccccagctccgcgccctgctccgttcctcccaaaactctgaatcgaagaactttccggaagtttctgagagcccagaccggcgggcacgcccccatccccaaccccctctgttaatccctaccagcctgcagtcctggctgcttccaagcaggaggtggggcctctggcctagcggggccgaaaggcagtcccctcccccgcagtctgatttccctcttccccccaaaggcaagcacgaggagcggcaggacgagcatggctacatctcccggtgcttcacgcggaaatacacgtgagtcctggcgccaggtcggggtgggtgggtggcgtgggggtggggtcagggaagagggcacagggacccacccggtgtgtaatgtaacgcttgcctttcctctctgcacgtccaggctgccccccggtgtggaccccacccaagtttcctcctccctgtcccctgagggcacactgaccgtggaggcccccatgcccaagctagccacgcagtccaacgagatcaccatcccagtcaccttcgagtcgcgggcccagcttgggggcccagaagctgcaaaatccgatgagactgccgccaagtaaagccttagcccggatgcccacccctgctgccgccactggctgtgcctcccccgccacctgtgtgttcttttgatacatttatcttctgtttttctcaaataaagttcaaagcaaccacctgtcactggcccaggccctggtgtttgtggaaggaagcctcaggcacctgccatttgctggctttcaggagtcatctttgctcaggcccgtgctgggccatgtgggtacactggtgtaggttgctggacacaggctgactcacatccataaagacagaggtcttagggccgggcgcagtggctcatacctacaatcccagcactttggggggttgaagcaggaggagtgcttgaagccaagagttctagaccagcctggacaacatagtaagactgtctctaaaaaataaaaattaggcagggtggtactgcacgcctgtagtcccagctactcaggaggctgaggcaggaggatcgcttgagcccaggagttgtgaagggtacagtgagctaacatcgtgccattgcactccagcctgggcaacagaacaagatcctgtctcaaaacaaccaaaagcccagagagaaagagtgagaccccatctttaaaagaaaaaaaaaaaaggtc

SEQ ID NO: 1265 - DNA, 6000 bp, Homo sapiens
tgtgtctagctcaggatttctgaatgcaccaatcgacactctgtatctagctactctggtggggccttggagaacctttgtgtccacactctctatctagctaatctagtggggatgtagagaacttttgtgtctagctcagggattgtaaacacaccaatcagccctgtcaaaacggaccaatcagctctctgtaaaatggaccagtcggctctctgtaaaatggaccaatcagcaggacgtgggtggggccagataagcgaataaaagcaggctacccgaaccagcagtagcaagccacttagggtcttcttcgtcagtgtggaagctttgttgtttcgctctttgggtccacaccgcttttaagagctgtaacgcttgacgtgaatgtttgtagctttactcttcagctagcgagaccacgaacccaccgggaggaacaaacaattccagatgcgccgccttaagagctgtaacactcaacggtgaaggtctgcagcgtcgcttctgagccagtgagagcatgaacccaccagaaggaaaaaactcccgacacgccgcctttaagaactgtaacactcaccgtgaaggtcctcggcttcattctttgagtcggtgagaccaagaacccacgaattctggactcaccgggactacaggcgtgctacgacgcctggccatattggtgaggctggtttcaaactcctgacctcgtaatcctcctgccttggcctcccagtgtgctgggattacaggtgtgagccactgtgcccagccggaaacaccttttctttgcttttcttaaatttatttatttttgagacaaggttttgcactatcacccaggctggagtgcagtggtgtgatcataactcactgcagcttctagcttttcggcttaagtgatcctcctgcaggtgcgcaccagcacatgtggctaattttttttttctttttttgcagggatgagttcttgctatgttgcccaggctgctctctaactcctggtgtcaagtaaatctcctgcctaggccccccaaggtgctgggattacaggtgtgagcccctgcgcccagcctgcagtgcctttctatagtttccactacacatttacagatcagggacactttttttttttcctgaaagttttgctctgttgcccaggctggagtgcagtggcctgatctcagctcactgcaacctcttgagtagctgggattacaggcgtgcgccaccacacccggctaatttttgtatttttagtagagacgggttttgccatgttggccaggctggtcttgaattcctgacctcagctaatctgcccccttcagcctcccaaagtgctgcgattacaggggtgagccaccacgcccagccagatcagggacacttagagctatgatgctgttcactatcccccatgtcttgatatgccctccaggccccaggggagctacactcagaggttccccccatattccctggggggcaatttccctgggaggggcagtatggcagtggggcttagcccccatatcagggattctgagctttgagggctagtgccagactgtctgagacaagcccagcctcacccgcatccctctgctcttctgctttcttcctcctctccctcccctgccaacccgtgacctctggcactgttgcaaccccccaggtcctggtgtatgcatgtgggaatggtggggaggtgtttgggggggccagcctgacccctgccctgccctgggctctgccatggtggcatagggcttcggtggtctggggctctgtgcctgggctggaggtggtttggggctctgtccctgggccggagctccagttcccccaaccctcctgtcccttggtggctctcctccatcaccaagaggctcttgggacctagctctggggttccctgtcgcctttctgtgggcagcttttgcttctgtctccaccctctcaacagagcagtcgaaagctgcacctgtcaaatcctgttgattctatagtcggagtgatgatggcgcctggaaataattcactcctgggcagccaaggcccggggctgcctgatctcacagactgtgaggtcagcaagccctagacaacacccgtcctgggggggaggggcagttccaggcctgtcctgcctttttgtttgtttgagaccgagtctcactttgttgcccaggctggagtgcagtggtgcaatctcagctcgctgcagcctccacctcctaggttcaggcaattctcctctttcagaatttgagaccagcatggccaacatggaggaagcctgactctactaaaaatacaaaaattagccaggcgtggtgacaggtgcctgtaatcccacttaggaggctgaggcctgagaatcgcttgtacccgggaggcggagcttgcagtgagctgagatcatgccattgcactccagcctggctgacagagtgagactccatctaaaaaaaaaaagaaaaggcaggacaggcctggagaggcccagaattgccccaccaccccagaagcagcacaaagactccacaaatctaacacccagcagagacccccagatctgggccagcctgtcctgtcctgccagccagagcccactatgcccagaggtgctgccccaggctcacatcatctgagctgagccctagagcgtgggctgggacctgctctgactccccaccctgctccagatgtgggtctctggacagggaactcgagggagtagactgggctgggcgcagcagctctcccctgtaatcccagcactttgggaggtcaacgcaggaggatggcttgagctcaggagtttgagaccagcctgggcaacatagcgagactctgtctaccaaaaaaaaaaaaaaaatcagccaggcttgtggcgcgctcctggagatgccttgagcctaggagttccaggctgcaacactttggtatggtgcaccaagatcccactactgcacgccagcctgtatgacagtaggagactgtccctaaaaaagaagctggggccgggcgtggtggctcacgcctgtaatcccagcactttgggaggctgaggcgggcagatcacctgaggttgggagttcgagacccacctgaccaacatagaaaaaccctgtctctactaaaaatacaaaaattagccgggtagggtggcgcacgcctataatcccagctactctggaggctgaggcaggagaatcgcttgaacctgggaggcggaggttgcagtgagccgagatcacgccattgcactccagcctgggcaacaagagcaaaacttggtctcaaaaaagcagcaaggtggtggggggtgatattgggggtggtgtggacatgctccaggccctcgcctgcagggtgccacccttcttagggaacctgggaaagtcagactgtgggctgagaaaagaacatgggagtatttttttttttttttttttttttttttttttcttctgagacggagtcttcctctgtcgcccaggctggagtgcagtggcacgatctcggctcactgcatgctccgccttgaacatgggagtatcttgctacagcctcagactctgggtccctcaaatatttgaggaccttgggactgagctccaaagctcccatctgttttttgttttttttttttagatggagttttgctcttgtcccccaagctggagggcagtggcatggatcttggctcactgcaacttctgcctcctgggttcaagcgattcccctgcctcagcctcctgagtagctggaattacaggcatgcaacaccatgcccggctaatttttgtacttttagtagagacggagtttcactgttggccaggctgtctcgaactcctgtcctcaggtaatccacccgcctcggcctcccaaagtgctgggattataggtgtgagccaccgcgcctggtcccccatctgctttctacctcaactttccctgggcctggtgagagggtggcagctagggcaagggcagacaagagagaggggaactgggcccttggaagcctgtctacacctggagggaggccagctggaaataaacacaggcaacaagagctgctggcccagccagcagcacaggtctgagcccgtcggttggccagggctctgcccaatctccccaccccgagactctgcgggctccgttctcaccccatttcggcttgccagttcccttgtgactgccaacagggatgccctggcctcagggagtgtggcggtgacagagatctcaaagcttgccaggtccactgtggtgtccttggggtgtgctgaagccgatgccaagcttttgacatagtaatcctcccatcagctctgaggtgcaattacctctgtgccccttcacctgggacccaacctaggtgctcctgagaactcaagcctcaggtgcttctcttatttcctcctccttccccaccttacagttttaattgcaatcgtgaccttgcaatcatgaccttttttttttttcttttaaagatggggtctcactctttctctctgggcttttggttgttttgagacaggatcttgttctgttgcccaggctggagtgcaatggcacgatgttagctcactgtacccttcacaactcctgggctcaagcgatcctcctgcctcagcctcctgagtagctgggactacaggcgtgcagtaccaccctgcctaatttttattttttagagacagtcttactatgttgtccaggctggtctagaactcttggcttcaagcactcctcctgcttcaaccccccaaagtgctgggattgtaggtatgagccactgcgcccggccctaagacctctgtctttatggatgtgagtcagcctgtgtccagcaacctacaccagtgtacccacatggcccagcacgggcctgagcaaagatgactcctgaaagccagcaaatggcaggtgcctgaggcttccttccacaaacaccagggcctgggccagtgacaggtggttgctttgaactttatttgagaaaaacagaagataaatgtatcaaaagaacacacaggtggcgggggaggcacagccagtggcggcagcaggggtgggcatccgggctaaggctttacttggcggcagtctcatcggattttgcagcttctgggcccccaagctgggcccgcgactcgaaggtgactgggatggtgatctcgttggactgcgtggctagcttgggcatgggggcctccacggtcagtgtgccctcaggggacagggaggaggaaacttgggtggggtccacaccggggggcagcctggacgtgcagagaggaaaggcaagcgttacattacacaccgggtgggtccctgtgccctcttccctgaccccacccccacgccacccacccaccccgacctggcgccaggactcacgtgtatttccgcgtgaagcaccgggagatgtagccatgctcgtcctgccgctcctcgtgcttgcctttggggggaagagggaaatcagactgcgggggaggggactgcctttcggccccgctaggccagaggccccacctcctgcttggaagcagccaggactgcaggctggtagggattaacagagggggttggggatgggggcgtgcccgccggtctgggctctcagaaacttccggaaagttcttcgattcagagttttgggaggaacggagcagggcgcggagctggggagtgagcagtacgcaggcgcacttggagccgcgcacacgcccactcagcggctagaaactggcaccgcgccagggaactccccgcttatctggggatggggctgtgggtgggaaggggactctgtagaaaagcgcattttctctcttcatcgatgatctttaaaaaaatttttgtttgctttttttttgtaatggcgcggggtcggggcgggggggcgcgtctcgctatgttgcccaggctagtcttgaactcctggcctcaagcgatcctcccgtc

SEQ ID NO: 1266 - DNA, 6000 bp, Homo sapiens
aaagcccaatcttccgttatttgtggacacatcagaattcagcatgagtgacagcggtctgctggatgacagatcgtcagtgcagaatgagacacgaggtgcctgtgtttattcatgcaggaggagtgtttgcagaagtgccgggaacaagaggtggtggagcaaagcatctctttcctggtttccttctgctctgaactcaagtagtacccaccccctattcttcccctcttttgagtctgtttcactgagggcacggctggtaggagtaacgttgtccagcattaaaacagagcatcagtaatgtctaggaaaatgttaactttaacaacaccactaatcagtttagagaatatttgagcgtgtagcacttgctgatcattcattcagaaaatgaattgcctgccataaactaataagcatgatttggtttatgttttgatttaattatctctgagtagatgctgcttgaagtaatgactgtaatcacttttgccaagcataccccccgtttataatttaagaaaaaaaatttttttttttttgagatggggccttgttatgttggccaggctggtcttgaactcctggcctcaagcagtcctccccacctggtgtctcaaagcactgggattacaggcatgggccaacatactgaacataatgattcaaacatagaaaaaaaagtctcctggtagttcagttcccccatgccccaggagtttagtacaggggtgtccagtcttttggcttccctgggccacattcccttgggccacacataaaatacactaacactaacaatagttgatgagctaaaaaaaaaaaaaaaatcgcaaaaagaattctcagtgttttaatagagtttacgaatttgtgttgggctgcattcaaagccatcctgggctacatgcagcctgtgggccacaggttggataagcttggtttagtagatctttttggattctaggtccctacctgtcgtctctgtatgtaatataatgttatacagatgctgcagttgatcaacacggaacaatggggactcaagggacagggagtaaccacttttcttctctcctctcctctcctctccccatccccagccagttggcatgtgctggtagtcccagctcctcggtaggcagaggtgggagaatcatctgagcctggggaggttgaggctgcagtgatctgtgatcctgctgctgcactccaggctgggcaatagaatgagaccctgtgtcaaatataataataataataatgtatttcatatggttgtcaagtaatgtaatagtatatgactctgatactatagaaaccaggtaaataaatttagtattattggctgatattaataagcagttatttgtagtcataaaaatatacaacattggtttgagatgccactttagtcttctgaaagtgattagccttgggggtgatgagggcgggagccttgagaaatggccatcttgggagaagcattgattcctgttgcccagctagaggcgctgtgctcgcctcgttcttttgtattgctggttgtaaagttgtattcagtcagacactcccactgccacaaataacatgttccctgggttgctaaagtatcacagcgatcagactcaatcctatgccccttatttggactccctgaggtttagaattcacatggtgttggcatatgagcagaaaggcctccatgtttctcagaagtcagcttgaagttgactcagtattttcttatccagaagagatgggactgaagtttagtagacagggcaggattaggaggaatttgtcagtccgttttcctaaaaaaccactgagttagaccatctgtactcatagtctctcatctaaggcctagacttgacagtgttttgtggaacacacgtgataagcctgtgtccttttctggggaggaagccagggttcagacaccgttgatccattgatccagccgcacttttccctcccttgtgtgtgctccacctccagcccccttcccccagcccacacaaagtaatttccttctgttcatcatgttactcaacagagctctgttctagtgtctcaaagatacagttaacccagtggacaccatctgtaccataacaactctgttctttcctcctggcaggtgacagagctgaatgagccactgtcgaatgaggaacgaaaccttctgtctgtggcctacaagaacgttgtgggggcacgccgctcttcctggagggtcatcagtagcattgagcagaagacatctgcagacggcaatgagaagaagattgagatggtccgtgcgtaccgggagaagatagagaaggagttggaggctgtgtgccaggatgtgctgagcctgctggataactacctgatcaagaattgcagcgagacccagtacgagagcaaagtgttctacctgaagatgaaaggggactactaccgctacctggctgaagtggccaccggagagaaaagggcgacggtggtggagtcctccgagaaggcctacagcgaagcccacgagatcagcaaagagcacatgcagcccacccaccccatccgattaggcctggctcttaactactccgtcttctactatgagatccagaacgccccagagcaagcgtgccacttggccaagaccgcgttcgacgacgccatcgccgagcttgacaccctcaacgaggactcctacaaggactccacgctcatcatgcagctcctccgcgacaacctcacgctctggacgagcgaccagcaggacgacgatggcggcgaaggcaacaattaaggccccaggggaactggcagcgcacgcggatgctactactgcagtctttatttttttcccatgagttgggggtcgggtgggggagggaaagggagggatgaccttcccagggagaaacccacgacctgtcctgtctttgatcgcctctttgacatttttgccaaaataccactagtggaaagtcaggctagctgtgctggtattggaatagcagcctcacactggcgtctggactgttctgtagattcatgcaagtggagctgtctgtctctaatttaacttattgctagataatagggttttcagatgaaaagaaaacttaaagaggaatggccctcattcagtaagttctgtggttccagtaaggatttttatgtacatacgctctcgtctctcgttttgggtactttctatctcatctgtctcggctctgcatgttttccagggtgtagcctacagacatggaacagtgtaaatcccagactgacagacttagaacctgaggtctcattcatccttatggtttaggccttgccagttttccgaagtctctgattagttgacagtattaacactaaattgcagtttacagtatttctacattacagccatatgtaacatcaagccatcgattgtgtacttttcctttgctagttgtttgggctttaacatccttattcagccttatccaggttggttttgctgttgatcggtctcctaggctaaatgagaatgaaagcgacttcaggtcaggtggctgtgggattttttttttttggtccttctttcctcttaacgtaaatccaccaccaaaattattaatcctcttgagagaaacgtgaaacgccacaaaaatagagaaaattcaggtctgtatgtcatggatcgtgttggtattttcagagaacatcccgcttctgaagctgctgcagctccctcctcagggatcacactgccgtcacccactctgcactggggcgtttcctactgcgcctcgtgctggcggacgcagctgggtgcagaagctgtggggtcggagaggcgtttggagaaggtctgtggtgcagtgtgtgaaaattcaggtgctagaagcctactggtagaaaaacccaaaaggaagagctatatccttaaccattctgtccaatttcgggagccttgtcagtgtgtcagtttttcctccccgaagacactccttccccaagtaattgtaggaagataaaaaaactgttaccagataacaaacactgaactcctatttgaccagaactttttcctctcgagatagttttttctttttaatgaaaaaagcataggaattggagattggcttgtctcacgcagccagtgcacatttggaattgacggaaacaacgttgctatttccacccatttgttttcggcagccttaaggccctcattctcatttcgggtgaatctgtctatctgtgaacgtggcccgcatgtgcattcttttttttatatatataaagtcagtgacgaggaactcccgagacgtgtaatgacaccacacttgttttctttgtttctttgttttatttaggcaagaagaggtgtgagtaattgaggaaaaactgacagatgcttttgctaataccaaaattgagcttacaattaggaactgagtatgtgtaacaggatacaggtgacagtgaagatagaagaaccacgatgaccacagactcaatgtgctctgtaacatcgcacagtttacccagcatgactttccttaggaggccccctcctcacgctagagtaaaagtcccagttaagtgaagcctaccagaagaactagtagaagaagctttgccgcttttgtgcctctcacaggcgcctaaagtcattgccatgggaggaagacgatttggggggggaggggggggggggcagggtaggtggggctttccctaatttatcttcatgtccagtgagcagtgttgcgtttttccttgtagcatttggaaatgatttactggaattacaaaacctatttttcctttaaatttcagctttggctctggctgctttttagaataatgcaagataaaaatcacacctgagggctgaaaacggagagggaatgggagacttgatatttaagcagcttgaatggtttttcttttctttatttttaaagaaatgcacttgcctatgatactgtctctccagtgaaatgattactcctccattactctattgatacaatattgtgcatgctagtgttgtatttctatacagtagcttgaaattgattaacttatactgtaggtgttatgtattcctatgacaaaaaaaattaagtcttcaaattttttaaaggttttttttttttaatttaatttttccttttgggggtaaagtttgctctaccaaatagtgattgtaacaaattgatctgttttggatgttgctatagtgacatgcagttatatattttgtttttaaaagggggggagcaaaagaaacaccagtgttagcttaatcttaatgtctggtgtttgtcatggtgaaattataactattacagtgttggagaacaacaaatatgttctctgaatgagcctttgtgctttttgtcatgttatgcagtgaactatttttaaggtctaatcagtgattatttttccagctccgtgtttctctaaggaattatttcacacacggaccatctttagcagtttcctcagtgatggaatatcatgaatgtgagtcattatgtagctgtcgtacattgagcaaataaacttacagatctgacgccagtgctccttagcttcattgtgtgagttttactgtcctttgcttttgaaggttggatcagatgttggtgttctcttccctccccagcccaagcaatgaagttggattggcaggaaaaaggggaaagacagtagatactggaaagcgcctccaaccaggaatcagatttgggtttggggacttaaaaaaaccattgcaccaggccaggcgcagtggttcatgcctgtaatctcagcactttgggaggctgaggcgggcggattacctgaggtcaggagttcaaggccagcttggccaacatggtgaaaccccatctctactaaaaatacaaaaattagcagggcatggtgctgggtgtctgtaggaccagctactcgggaggctgaggcaggagaatcacttgagcccaagag

SEQ ID NO: 1267 - DNA, 6000 bp, Homo sapiens
gtgagaactaaaatgaaggaaaattattcagggtattcttaaaagtagttcctcatgtttctgtagcattttactttttcaagaagactttgctgggcacaatggctgtcacctgtaatcccagcactctgagcggccaaggtgggaggatcacttgaactaagggttcaagaccagcctgggcaacatagtgagaccttgtctctactaaaaatttttaaatggctggatgcagtggctcacacctgtaatcctaacactttgggaggctaaggtgggtggatcacttgaggccaggagttcaaggccagcctgggcaacatggcaagaccttgtctctacagaaaaatacaaaaattagctgggtgtggtggcatgtgccttagtcccagccactcaggaggctaaggtaggattgcttgaagccctgggaggctgaggttgcagtgagccaagatagtgccactgcacttccagcggattgatatagtgagaccccatctctaaataaagaaataaataaatcagccatagactgaggcgggtggatcacttgaggccaggagtttgagaccatcctggccaacatggcaaaacgctgtctctactaaaaatacaaaaactagccaggcatggtggcacacgcctgtaatcccagctactcgggaggctgaggcaggagaatcgcttgaacttggggggaggttgcagtgagccgacatcatgccattgcactccagcctgggcaacagagtgagaccaggtctttttgaaactctgtctccaaaaaaaaaaaaaaaagaaatcagccatgcatggtggtgcacacctgtagtcccaggtactctggagattgaggtgggaggattgcttgagcccagtagtttgaggctgcagtgaggtgtgatcatgcctctgcacttcagcttgggaaacagagtaagaccatgtctcaaaaagaacaaaaaaagactttcttatttgtctgatatacctgtatattaccttatgaaagaagcagaaatccccattttgcagataagaaaaccaaagcccagagaaatgaagcggcttgtccccaagattgcttagcgaatgatggagctgggaaaagcccaatcttccgttatttgtggacacatcagaattcagcatgagtgacagcggtctgctggatgacagatcgtcagtgcagaatgagacacgaggtgcctgtgtttattcatgcaggaggagtgtttgcagaagtgccgggaacaagaggtggtggagcaaagcatctctttcctggtttccttctgctctgaactcaagtagtacccaccccctattcttcccctcttttgagtctgtttcactgagggcacggctggtaggagtaacgttgtccagcattaaaacagagcatcagtaatgtctaggaaaatgttaactttaacaacaccactaatcagtttagagaatatttgagcgtgtagcacttgctgatcattcattcagaaaatgaattgcctgccataaactaataagcatgatttggtttatgttttgatttaattatctctgagtagatgctgcttgaagtaatgactgtaatcacttttgccaagcataccccccgtttataatttaagaaaaaaaatttttttttttttgagatggggccttgttatgttggccaggctggtcttgaactcctggcctcaagcagtcctccccacctggtgtctcaaagcactgggattacaggcatgggccaacatactgaacataatgattcaaacatagaaaaaaaagtctcctggtagttcagttcccccatgccccaggagtttagtacaggggtgtccagtcttttggcttccctgggccacattcccttgggccacacataaaatacactaacactaacaatagttgatgagctaaaaaaaaaaaaaaaatcgcaaaaagaattctcagtgttttaatagagtttacgaatttgtgttgggctgcattcaaagccatcctgggctacatgcagcctgtgggccacaggttggataagcttggtttagtagatctttttggattctaggtccctacctgtcgtctctgtatgtaatataatgttatacagatgctgcagttgatcaacacggaacaatggggactcaagggacagggagtaaccacttttcttctctcctctcctctcctctccccatccccagccagttggcatgtgctggtagtcccagctcctcggtaggcagaggtgggagaatcatctgagcctggggaggttgaggctgcagtgatctgtgatcctgctgctgcactccaggctgggcaatagaatgagaccctgtgtcaaatataataataataataatgtatttcatatggttgtcaagtaatgtaatagtatatgactctgatactatagaaaccaggtaaataaatttagtattattggctgatattaataagcagttatttgtagtcataaaaatatacaacattggtttgagatgccactttagtcttctgaaagtgattagccttgggggtgatgagggcgggagccttgagaaatggccatcttgggagaagcattgattcctgttgcccagctagaggcgctgtgctcgcctcgttcttttgtattgctggttgtaaagttgtattcagtcagacactcccactgccacaaataacatgttccctgggttgctaaagtatcacagcgatcagactcaatcctatgccccttatttggactccctgaggtttagaattcacatggtgttggcatatgagcagaaaggcctccatgtttctcagaagtcagcttgaagttgactcagtattttcttatccagaagagatgggactgaagtttagtagacagggcaggattaggaggaatttgtcagtccgttttcctaaaaaaccactgagttagaccatctgtactcatagtctctcatctaaggcctagacttgacagtgttttgtggaacacacgtgataagcctgtgtccttttctggggaggaagccagggttcagacaccgttgatccattgatccagccgcacttttccctcccttgtgtgtgctccacctccagcccccttcccccagcccacacaaagtaatttccttctgttcatcatgttactcaacagagctctgttctagtgtctcaaagatacagttaacccagtggacaccatctgtaccataacaactctgttctttcctcctggcaggtgacagagctgaatgagccactgtcgaatgaggaacgaaaccttctgtctgtggcctacaagaacgttgtgggggcacgccgctcttcctggagggtcatcagtagcattgagcagaagacatctgcagacggcaatgagaagaagattgagatggtccgtgcgtaccgggagaagatagagaaggagttggaggctgtgtgccaggatgtgctgagcctgctggataactacctgatcaagaattgcagcgagacccagtacgagagcaaagtgttctacctgaagatgaaaggggactactaccgctacctggctgaagtggccaccggagagaaaagggcgacggtggtggagtcctccgagaaggcctacagcgaagcccacgagatcagcaaagagcacatgcagcccacccaccccatccgattaggcctggctcttaactactccgtcttctactatgagatccagaacgccccagagcaagcgtgccacttggccaagaccgcgttcgacgacgccatcgccgagcttgacaccctcaacgaggactcctacaaggactccacgctcatcatgcagctcctccgcgacaacctcacgctctggacgagcgaccagcaggacgacgatggcggcgaaggcaacaattaaggccccaggggaactggcagcgcacgcggatgctactactgcagtctttatttttttcccatgagttgggggtcgggtgggggagggaaagggagggatgaccttcccagggagaaacccacgacctgtcctgtctttgatcgcctctttgacatttttgccaaaataccactagtggaaagtcaggctagctgtgctggtattggaatagcagcctcacactggcgtctggactgttctgtagattcatgcaagtggagctgtctgtctctaatttaacttattgctagataatagggttttcagatgaaaagaaaacttaaagaggaatggccctcattcagtaagttctgtggttccagtaaggatttttatgtacatacgctctcgtctctcgttttgggtactttctatctcatctgtctcggctctgcatgttttccagggtgtagcctacagacatggaacagtgtaaatcccagactgacagacttagaacctgaggtctcattcatccttatggtttaggccttgccagttttccgaagtctctgattagttgacagtattaacactaaattgcagtttacagtatttctacattacagccatatgtaacatcaagccatcgattgtgtacttttcctttgctagttgtttgggctttaacatccttattcagccttatccaggttggttttgctgttgatcggtctcctaggctaaatgagaatgaaagcgacttcaggtcaggtggctgtgggattttttttttttggtccttctttcctcttaacgtaaatccaccaccaaaattattaatcctcttgagagaaacgtgaaacgccacaaaaatagagaaaattcaggtctgtatgtcatggatcgtgttggtattttcagagaacatcccgcttctgaagctgctgcagctccctcctcagggatcacactgccgtcacccactctgcactggggcgtttcctactgcgcctcgtgctggcggacgcagctgggtgcagaagctgtggggtcggagaggcgtttggagaaggtctgtggtgcagtgtgtgaaaattcaggtgctagaagcctactggtagaaaaacccaaaaggaagagctatatccttaaccattctgtccaatttcgggagccttgtcagtgtgtcagtttttcctccccgaagacactccttccccaagtaattgtaggaagataaaaaaactgttaccagataacaaacactgaactcctatttgaccagaactttttcctctcgagatagttttttctttttaatgaaaaaagcataggaattggagattggcttgtctcacgcagccagtgcacatttggaattgacggaaacaacgttgctatttccacccatttgttttcggcagccttaaggccctcattctcatttcgggtgaatctgtctatctgtgaacgtggcccgcatgtgcattcttttttttatatatataaagtcagtgacgaggaactcccgagacgtgtaatgacaccacacttgttttctttgtttctttgttttatttaggcaagaagaggtgtgagtaattgaggaaaaactgacagatgcttttgctaataccaaaattgagcttacaattaggaactgagtatgtgtaacaggatacaggtgacagtgaagatagaagaaccacgatgaccacagactcaatgtgctctgtaacatcgcacagtttacccagcatgactttccttaggaggccccctcctcacgctagagtaaaagtcccagttaagtgaagcctaccagaagaactagtagaagaagctttgccgcttttgtgcctctcacaggcgcctaaagtcattgccatgggaggaagacgatttggggggggaggggggggggggcagggtaggtggggctttccctaatttatcttcatgtccagtgagcagtgttgcgtttttccttgtagcatttggaaatgatttactggaattacaaaacctatttttcctttaaatttcagctttggctctggctgctttttagaataatgcaagataaaaatcacacctgaggg

SEQ ID NO: 1268 - DNA, 6000 bp, Homo sapiens
gttccaatgtgtctggggacagctaggcagactttacataagtacagattgcctctctgggcactgctgggagacttcatttgtggcaggaggagtgcccccaggactggtgagataatttgagctttaaatagctcctggcccttgaaataaggacaacatgatttaggggaaaggccagaacttgatctttgtggccttcggcacgctggcctctccttgcactggaggcagtcatgagggctgcaccgcggggcggtttgtcttcagcattcgcacactcagtaaagtatgccagagatgggtggcagcagcgcccaagggctcagctccttccaaagccaagtctgggcagttttttttcaggctgtatggaactagggtttatggaaaggaagcgatgtgaggcagctaaggcagtttccgcttaatatagagaagaggatgaaacggagaagagacactcgatacaggaagatgagctgggagatcgttaggaaatgtagacatcccctgtggtgagaactaaaatgaaggaaaattattcagggtattcttaaaagtagttcctcatgtttctgtagcattttactttttcaagaagactttgctgggcacaatggctgtcacctgtaatcccagcactctgagcggccaaggtgggaggatcacttgaactaagggttcaagaccagcctgggcaacatagtgagaccttgtctctactaaaaatttttaaatggctggatgcagtggctcacacctgtaatcctaacactttgggaggctaaggtgggtggatcacttgaggccaggagttcaaggccagcctgggcaacatggcaagaccttgtctctacagaaaaatacaaaaattagctgggtgtggtggcatgtgccttagtcccagccactcaggaggctaaggtaggattgcttgaagccctgggaggctgaggttgcagtgagccaagatagtgccactgcacttccagcggattgatatagtgagaccccatctctaaataaagaaataaataaatcagccatagactgaggcgggtggatcacttgaggccaggagtttgagaccatcctggccaacatggcaaaacgctgtctctactaaaaatacaaaaactagccaggcatggtggcacacgcctgtaatcccagctactcgggaggctgaggcaggagaatcgcttgaacttggggggaggttgcagtgagccgacatcatgccattgcactccagcctgggcaacagagtgagaccaggtctttttgaaactctgtctccaaaaaaaaaaaaaaaagaaatcagccatgcatggtggtgcacacctgtagtcccaggtactctggagattgaggtgggaggattgcttgagcccagtagtttgaggctgcagtgaggtgtgatcatgcctctgcacttcagcttgggaaacagagtaagaccatgtctcaaaaagaacaaaaaaagactttcttatttgtctgatatacctgtatattaccttatgaaagaagcagaaatccccattttgcagataagaaaaccaaagcccagagaaatgaagcggcttgtccccaagattgcttagcgaatgatggagctgggaaaagcccaatcttccgttatttgtggacacatcagaattcagcatgagtgacagcggtctgctggatgacagatcgtcagtgcagaatgagacacgaggtgcctgtgtttattcatgcaggaggagtgtttgcagaagtgccgggaacaagaggtggtggagcaaagcatctctttcctggtttccttctgctctgaactcaagtagtacccaccccctattcttcccctcttttgagtctgtttcactgagggcacggctggtaggagtaacgttgtccagcattaaaacagagcatcagtaatgtctaggaaaatgttaactttaacaacaccactaatcagtttagagaatatttgagcgtgtagcacttgctgatcattcattcagaaaatgaattgcctgccataaactaataagcatgatttggtttatgttttgatttaattatctctgagtagatgctgcttgaagtaatgactgtaatcacttttgccaagcataccccccgtttataatttaagaaaaaaaatttttttttttttgagatggggccttgttatgttggccaggctggtcttgaactcctggcctcaagcagtcctccccacctggtgtctcaaagcactgggattacaggcatgggccaacatactgaacataatgattcaaacatagaaaaaaaagtctcctggtagttcagttcccccatgccccaggagtttagtacaggggtgtccagtcttttggcttccctgggccacattcccttgggccacacataaaatacactaacactaacaatagttgatgagctaaaaaaaaaaaaaaaatcgcaaaaagaattctcagtgttttaatagagtttacgaatttgtgttgggctgcattcaaagccatcctgggctacatgcagcctgtgggccacaggttggataagcttggtttagtagatctttttggattctaggtccctacctgtcgtctctgtatgtaatataatgttatacagatgctgcagttgatcaacacggaacaatggggactcaagggacagggagtaaccacttttcttctctcctctcctctcctctccccatccccagccagttggcatgtgctggtagtcccagctcctcggtaggcagaggtgggagaatcatctgagcctggggaggttgaggctgcagtgatctgtgatcctgctgctgcactccaggctgggcaatagaatgagaccctgtgtcaaatataataataataataatgtatttcatatggttgtcaagtaatgtaatagtatatgactctgatactatagaaaccaggtaaataaatttagtattattggctgatattaataagcagttatttgtagtcataaaaatatacaacattggtttgagatgccactttagtcttctgaaagtgattagccttgggggtgatgagggcgggagccttgagaaatggccatcttgggagaagcattgattcctgttgcccagctagaggcgctgtgctcgcctcgttcttttgtattgctggttgtaaagttgtattcagtcagacactcccactgccacaaataacatgttccctgggttgctaaagtatcacagcgatcagactcaatcctatgccccttatttggactccctgaggtttagaattcacatggtgttggcatatgagcagaaaggcctccatgtttctcagaagtcagcttgaagttgactcagtattttcttatccagaagagatgggactgaagtttagtagacagggcaggattaggaggaatttgtcagtccgttttcctaaaaaaccactgagttagaccatctgtactcatagtctctcatctaaggcctagacttgacagtgttttgtggaacacacgtgataagcctgtgtccttttctggggaggaagccagggttcagacaccgttgatccattgatccagccgcacttttccctcccttgtgtgtgctccacctccagcccccttcccccagcccacacaaagtaatttccttctgttcatcatgttactcaacagagctctgttctagtgtctcaaagatacagttaacccagtggacaccatctgtaccataacaactctgttctttcctcctggcaggtgacagagctgaatgagccactgtcgaatgaggaacgaaaccttctgtctgtggcctacaagaacgttgtgggggcacgccgctcttcctggagggtcatcagtagcattgagcagaagacatctgcagacggcaatgagaagaagattgagatggtccgtgcgtaccgggagaagatagagaaggagttggaggctgtgtgccaggatgtgctgagcctgctggataactacctgatcaagaattgcagcgagacccagtacgagagcaaagtgttctacctgaagatgaaaggggactactaccgctacctggctgaagtggccaccggagagaaaagggcgacggtggtggagtcctccgagaaggcctacagcgaagcccacgagatcagcaaagagcacatgcagcccacccaccccatccgattaggcctggctcttaactactccgtcttctactatgagatccagaacgccccagagcaagcgtgccacttggccaagaccgcgttcgacgacgccatcgccgagcttgacaccctcaacgaggactcctacaaggactccacgctcatcatgcagctcctccgcgacaacctcacgctctggacgagcgaccagcaggacgacgatggcggcgaaggcaacaattaaggccccaggggaactggcagcgcacgcggatgctactactgcagtctttatttttttcccatgagttgggggtcgggtgggggagggaaagggagggatgaccttcccagggagaaacccacgacctgtcctgtctttgatcgcctctttgacatttttgccaaaataccactagtggaaagtcaggctagctgtgctggtattggaatagcagcctcacactggcgtctggactgttctgtagattcatgcaagtggagctgtctgtctctaatttaacttattgctagataatagggttttcagatgaaaagaaaacttaaagaggaatggccctcattcagtaagttctgtggttccagtaaggatttttatgtacatacgctctcgtctctcgttttgggtactttctatctcatctgtctcggctctgcatgttttccagggtgtagcctacagacatggaacagtgtaaatcccagactgacagacttagaacctgaggtctcattcatccttatggtttaggccttgccagttttccgaagtctctgattagttgacagtattaacactaaattgcagtttacagtatttctacattacagccatatgtaacatcaagccatcgattgtgtacttttcctttgctagttgtttgggctttaacatccttattcagccttatccaggttggttttgctgttgatcggtctcctaggctaaatgagaatgaaagcgacttcaggtcaggtggctgtgggattttttttttttggtccttctttcctcttaacgtaaatccaccaccaaaattattaatcctcttgagagaaacgtgaaacgccacaaaaatagagaaaattcaggtctgtatgtcatggatcgtgttggtattttcagagaacatcccgcttctgaagctgctgcagctccctcctcagggatcacactgccgtcacccactctgcactggggcgtttcctactgcgcctcgtgctggcggacgcagctgggtgcagaagctgtggggtcggagaggcgtttggagaaggtctgtggtgcagtgtgtgaaaattcaggtgctagaagcctactggtagaaaaacccaaaaggaagagctatatccttaaccattctgtccaatttcgggagccttgtcagtgtgtcagtttttcctccccgaagacactccttccccaagtaattgtaggaagataaaaaaactgttaccagataacaaacactgaactcctatttgaccagaactttttcctctcgagatagttttttctttttaatgaaaaaagcataggaattggagattggcttgtctcacgcagccagtgcacatttggaattgacggaaacaacgttgctatttccacccatttgttttcggcagccttaaggccctcattctcatttcgggtgaatctgtctatctgtgaacgtggcccgcatgtgcattcttttttttatatatataaagtcagtgacgaggaactcccgagacgtgtaatgacaccacacttgttttctttgtttctttgttttatttaggc

SEQ ID NO: 1269 - DNA, 6000 bp, Homo sapiens
caggtgtggtagcatgctcctgtagtcccaactacttgggtggctggggctggagggtcgctttagcctgtgaggtggaggctgcagtgagccatgctccagcctgggtgacagagtgagaccttgcctcaaaaaaaaaaaaaacaaaaaacaagcaatcaaacgcacacataattatagactggaatatctggtaaaacactaagtaactttcaaaagaaggcaaagagaagataacgttttatatcatttaaaagtagtatttccctttgactaccgagcatagaaagtggtccttgaggctgggcacggtggctcacgcctgtaatcccagcactttgggaggctgaggtgggcagatcacctgaagtcaggagttcgagctcagcctggccaacatggtgaaaccctgtctctatcaaaactacaaaaattcactgggcgtggtggtgggtgcctgtaatcccagctacttgggaggctgaggcaggagaatcacttgaacctgggaggcagaggttgcggtgagccgagataccacaccactgcccactgcactccagcctgggtgacagagcaagactccgtctcaaaaaaattaaaataaaatacaataaaataaaataaggttaggactgctgatattgggaatgggcaaagaagggaaaagtaactacttttcccatccagctcctgacagccacaatgtactgaatgtcttgtgctggcgtcccatcagttaagagcctcatgctgcaggagctccccagtctcaaccctgcatcctactcattaggaaaccactaccacacaggcggcaaatcactgataataaagccagccttagggctgaaaacgagtcactagaacaccagcaaaatttccataatccccaaagagttaacgatttgctcagatttcaagtaaattgttcttatttatttgggtgaacattatacagtgttcaagttccataactttttaagtggaaatacagtacaaacgtagctaaagctaattcccttttttcagttcagacgcttggaaatgaagacaaagggatagacaattatcgctggctgtgagctgttgtgggcactccattatcgacacattcctgaataggtgctgaattccagccagctgtagtccagaccggcatcactttttaaaaataaccactttctctcttcttcaacataggtgatggctgcacaacacggaatgtacccaatgccactcaattgcacttgaaatctgatgtgactatgtgacagttatgttacgcaacttttacctcgataaaaacacatcgttttctccactcttttcaataatttaaagattggcttaataaataaggcttccctgagtacaagagatgaaatcctactcttaggtttgcagttaatccaggactgcaatgaggatgaacatttagcgccatgttgaatctcagtagaattcaaaaaacacatagatttccaaaataatcagaaaaagcacttaatatctgcttcagttactgggaaggctaacacatgaaaggcaagctgtatgatctgtattctttccacgcccaagaagagaacaattcaagccacatgacttagaataatggttggcagaactccacctctgaagagtctacagaggtaccattactccattagtgataatagctattgatctcctggaagagcctgggggggagggggaatggaatatttaagatagaaagaatttgaaagtctattgatcccactaggaatatttagaaaaattatgatagccttttgccacctttgccctcccacccctcattgagttaaactgcttaactcagtaacttcaacaaaattagtaaccctgaaccttttctccccaaggcaagtaccagtagcctatttaaaatattaacttctcaagagactagtaaaagtcaaaggacaagacagtattgtctaatacgtaggatacatctaggtgttcactctccttcaatacaagactaaacatctgtcttaaaagacctaacattcctctttccttcttttcaaaatactgcacaatacagtacttctgtcctggttacccacaaagaactatcattctgcacagatcccaatagtgttagcactaggataatttcattaaactcaaataaattttaatccctttatcaacaggatgatttcggccttaaaagagagctcacttgagtggtaagattggtttctttctctgcagtttccaaattctccacgatgacttttataaacaggaagaaaatttcttaggtagttgccattttggaacacctactacatttcttattgaatccgcacaactttttcaagtattgtcccattttacagatgaggaaaatgagggacagagcctatttccttaaagtcacaggaaacagatttgaaaaaaggtttttattttacaaactgttctttcctctatactgtgaaggagcagaagcacaaatctagtaaaaaacaaacttcccaaatctcaacttaaaaggttttggaacgggttttcattccctactagtaactgaaaatgactcagtaggaagtcatcatttttttaaggtttttattaaaacctgccaaattaattatctgcaataaacacaagtatacatcccatctgtgcactagtgtcataaactatattcttgtttaaaatttcttttattccataaattatcgtttaaaatttctacttttattccatcattgcccagtattttaaataaatgagatgaatgtttaaaaatataaaaaagcatcttataaacttttgtgagaaagctagcaatagggtgaacaaggcctagctagaggtcacagatttgcatgtctaagggtaaatgatatccttattttttggactaattctcatctagtggaatatgaagtgctcgattccacctggcttatcggctaatttctgcattaccttggataaatgccatttgcacactccctaccagcccttaggtgcattgcagcctctgtgtcattgtgtgtgacatcacttggttgctatggatataggtgcgaggtcactcgctttcctgtggaactagaaatatggaaaagaaatatggaaaaattataagagtctaaataacacgaactgaagatatttccaatactgatacctattagaagtgcaacttacatcatttaagcattaaaaccttgtaagacagcaactgtggccacagcagtattccgaatttcagaatcagttctcttcaataagacaaaaacctttctttgttaacatagctgctttaaatataaaggtatcagcattgtcctcttttgagaaccagtaaatttattcaagaattgatctgtaatatcaataatgcttcatttaaaagatgtaacacgcaaggtacactccagcatccacttcacaatggagatgaatttgaaaatctttgttacataaggcaggaaattaaatattaagatagtgggggcccgaaatcattagattaattttctacctttcatttcataatgctcaatacttccccctcctctaatatcaaactggttgacagcccattagataaatgtggtgttactgacaaaatggtgcaatacagggatgaatctgcaacccagacaaaatgcgacaactggcgatcggtattctcttttcatcagcatgaagatgtactcgcttaaacaaaaaaaagcctcagatgcatctaacaaccaaaaatttttaaaaagactttttcccctttaaaataactcctcccagcctccacccagtctaggctctctgcaatatgacaaatgcagaatcttctggaatgacttgatactgcctctcaccacggctttgtttgcactatcagatcagacagaatattttttcccccaacttataggaatttcaacagacgcgtgcctgtattcaaaaaagaaacggcatatgtcacacgaatcgaaccagtcagctacattcaccaccttttaattttacaggcaatacctacccttttcaatacaaaaacattagggaataaaatggagatgacatgttgagaatgatcaatgaaaacgctagcgagacaaacgttctcccttcctaaaagccggaggacttgctttgggcgaatggagaaagaagagccttttgttaagaaaaacgtgagcaaggtggtttcgattttgcaccacggagctcaggttttcaagagaccctatacaatgtttctgggaagattctcagggatgtgtcgggacagacagtggggaagattctgggggggctggggaggtggaaaaccgggagacctgctgagtgaatgggaaaggcgccgcccagacaccagggagagaaagaggaaccgcatccatgcggtcccccgcccccacgcccaggctaggaggaggggggaagtggggcacaaaggatgcgcacgcctccccgctcgggtcccctgcacccctagagccgcgggggccggagaccccgctcccaagtccagccccgcgggacctcgccccggcccgcgcccgcgccgggcctgaatggcagcgccgcggggccacggggactccgaaaagaggccgcgtcacagcccgggttcccgtcgcctctcgggaccctccccagcccccctcagtgagcgagacggggcggtcaacccgccatcgcgacagggcgacgaagccccgggccttccacgccaaggaccgcgtcttcggaggggcagggagcggcgggggaggggaggagacactcacgttcttcatggccgcggccatgtcgtcgtagcgctccgcctgctcggccagccgggctttctgcaccagttgctcgcggtccaccatcttcgcggggctgggtctggccggagaaggaggaggacactggggcggcctgaagggcttggagggcgcgactggagcccaagtgccggagaggaccgacccacagagcgagcagctgaggcggcggctgcgcggaggaggcggctggagctgcgaccgcgggaccgggcgcgaggcggctgcggctgctgtgcgtgccactgacggacaaccccctgcggccccgcccacgccgcatgacgaaggcaggccccgcccacccgtccgcaagccccgcccatgccccgcccgagcccggccgcggctagaactccccgctccccagctgggctcactgcgcgtcttccgggcaccccgtcctttcccactgcgcccccactctccccttttttcacttcactccccagttccctcaccccagcttctccagtcgcccccttacgcctcccccttgagcctcccgccccgccagccctcggacgcatgggcccctgggagttgtagtgtaacctgcagtgcactgaggcgctgaggagaccaaggacaaaggggcggtcaagactacaactcccagcggacatagcgcgcaggcgcaggaggacgggggggggtgcttcgaatcccgaggccgctggggacccctggcggggatcagggctgcatcagtccctgcgagtgctgattcaccgccccgccccatattctccgggaaattacgagaggagggggcaggggcctcagtcctagaccctgtttccgagatcacgtagcaggtcgtggtgggggaaggacaggaggcgcgtccattgtagatccagactctcagtgtggtgcctgcccgcgggatggccgaattaaggggccagaccctggggactgtcacctccaccccctacgagcttccattaaaccccccaccccaccttgaggctcttgggcctgaataggtgaaaacatggacgaacgacaaataccggctggccacagtggttgatttccagaaaggatgcagctgtctgctggctgaccctggagaaccccttcttcctctccagggtggagtgctaaagattgagttcagctaccaggagcctactccacatctaactgggctgcgtct

SEQ ID NO: 1270 - DNA, 6000 bp, Homo sapiens
ctgcctcagcccccaaatagctgtgatgaccatgcccagctaatttttaaattttttttttttgtagaaatgaggtcttgctatgttgcccaggctagtctcgaactcttggcctcaagtaatcctcctgccttggcctcctgagtagctaggactacagctacattcatttcttgtttttctttcttttttttttcttttttgagacacagtctcactctgtcgcccaggctggagtgcaatggcacaatcttggctcactgcaacctccacctcctgggttcaagcgattctcctgcctcagcctcccgagtagctgaaactacaggcacacgccaccacgcttggctaatttttgtatttttagtagagacagcatttcaccatgttggccaggctggtctcaaactcctgacctcaggtgatgagcccacctcggcctcccaaactgctggtattaccggcgtaagccagtgcacctggccatattcatttatttatttcctattctctctctatgtacttatcatgtgccaggtactctgctgagcactgagaagccaaggtgaggatgaaaaagacaaaacccaaatctgatcattttctgccattgttaaaatctcttcacaggcttccgattaatttcagaatagaaatttaactcctggggctgccattcagtgcccctcatgttctggcccctgactctatccccagccccttacccatcacccagacaccagatacatcagattctttgcctatcaataaatatttcaggggagatgggtgtggtggtgcatgcctgtagtccccactactcaggaggctgaggtgggaggatcacttgagcccaggaattagaggctgcagtgagctatgatcgtgccactgtaccccagcctgggcaacatagtgagacccccacctctaaaaaataagtacataaataaataagtcagggaggaacttgcctttgagtcttgctacctgtgcctttgcctgctctcaaatcctacactcatttaaaggctgggttggaaatgttaccaaactccctggagaagcttttcagaatctcttcctatgcagcctgaaagaagttattttttaaacaaaatatttacagtgcttaacacactctgaattccttgaggacaggggtcctccagcatctggcatagagcctgcaatattcccccatggaaactctttcattccacattctcatccacacttcatgtttcctattttatttttcacttcttattgatttttttgttgttatttagtttttatttcatagtcacaaacttaactctgcaatccacccagacatggaagggaataagaaaatcatgggactcaaagggaactgtagcaagaacacaaagatgataggatactgggagcaaatggggtggatggataggtgctctcctgagctactgaaggaatggtctggtggttaagataaaacacaagtcaaatttactagagttgtccacagtcagcaatggtgattttattttatttatttatttattttttagagggagtttcactctttttgcccaagctggagtgcaatggtgcaatctcagctcactgcaacctctgcctcccaggttccagcgattctcctgcgtcagcctctggagtagctgggactacaggcacctaccaccacgcccagctaatttttgtatttttagtagagacaggggtttcaccatgttggccaggctggtctcgaactcctgacctcaagtgatctgcccacctcggcctcctaaagtgctaaggttacaggcgtgagccaccgcgcccggccatagcaatggtgatcttcttgctggtcttgccattcctggactcgtagcgctccatggcctccacaatattcatgctcgctttcaccttgccaaagacctccatgctggccatctaaccacttagtcttggcagtgcagatgaaaaactgggaagcatttgtgttgggtccaacatctgccatgggcaagatgccaggatctgtatgcttcaggatgaggttctcttcatcgaatttctccccatagatggacttgccaccagtgccattatggtgtgtaaagttaccaccctgacacataatccctggagtaattctgtgaaagtaggaacccttgccgggcgtaatggctcacacctgtaatcccagcactttgggaggctgaggcggatggatcatgaggtcaggagttcgagaccagcctaacatggtgaaacaccgtctctactaaaaatacaaaaattagctgggcgtggtggtgcgcgcctgtaatcccagctacttagaaggctgaggcaggagaatcgcttgaacccgggaggcagaggttgcagtgagccaagactgcaccactgcactccagcctgggctacagagcgagactctgtctcaaaaaaaaaaaaagaaaaagaaaagaaaaaaaaagagagagtaggaacccttataaccaaatcctttctctccagtgctcagagaacgaaagttttctgctgtctttacaacactgtctgctaacagctccgatatgttaacatggctttacagtttagatgagaggtcacttctttttttttttttttttttgagacggagtctttttctgtctcccaggctggagtgcactggcacaatctcggctcactgcaagctccggagaggtcacttggcttcttggtttccatgcccctaaccttgaaggagacgcagcccaagggctcaatagtaatgtcaaagaacacggtgggattgaccatggccagtagtagagtactcctggcagcagcagagtctgcaaagctcactttttttttgttttgttttttgatatggagtttcgctcttgttgcccaggctgaagtgcaatgaaacgatctcggctcactgcaacctccacctcccaggttcaagcaattctcctgcctcagcctcccaagtagctgggattacaggtgcccaccaccacacccagctaatttttgtatttttagttgagatggggttttgctacgttagccaggctggtctcgaactcctgacctcagatgatccacccgcttcggcctcccaaagtgttgggattacaggtgtgagtcaccgtgccaggccaaagctcacttctttttttttttcgagacggagtctcgctctgtcacccatgctggagtgcagtagagggatctcagctcactgcaacctccgactcccgggttcaagtgattctcctgcctcagcctcccgagtagctgggataacaggtgggcaccaccacgcccagctagttcttttgtattttttgtagagacagggtttcaccatgttggccaggatggtctcgatctcctgaccttgtcatccgcccgcctcggtctcccaaagtgctgggattacaggtgtgagtcaccgtgcccagcctttaaaaaactttttattttattatttgtttttgaaacggagtcttgctctgtcgccagactggagtgcagtggcgcaatctcagctcactgcaacctcaaaactcactccttactgacttctagcatactgtacatatctcacctattttcttgggcagggatttttgtctgttttgttcactactgtacctcgtggcttagaatagggcttggaacacagtagcttctcatagataattgttgaatacataaagtaaataaaatgtgcagtcaaaactatcaggcctgcaggcatggtggctcacatctgtaatcccagcaccttgggaggccgaggcgtgaggatcgcttgagcccaggagttcgagaccagcatgggcaacaaagctagacccccgtctctacaaaaaagcaaaacaaagcaaaaaaacccatgctatctgcaagctatgtggaataatatgaacgagaatatatcagcgtgacctcagtaggtatgtatgtcttaggaggggagagaagggctggacaaccaagccctagacgcagcccagttagatgtggagtaggctcctggtagctgaactcaatctttagcactccaccctggagaggaagaaggggttctccagggtcagccagcagacagctgcatcctttctggaaatcaaccactgtggccagccggtatttgtcgttcgtccatgttttcacctattcaggcccaagagcctcaaggtggggtggggggtttaatggaagctcgtagggggtggaggtgacagtccccagggtctggccccttaattcggccatcccgcgggcaggcaccacactgagagtctggatctacaatggacgcgcctcctgtccttcccccaccacgacctgctacgtgatctcggaaacagggtctaggactgaggcccctgccccctcctctcgtaatttcccggagaatatggggcggggcggtgaatcagcactcgcagggactgatgcagccctgatccccgccaggggtccccagcggcctcgggattcgaagcacccccccccgtcctcctgcgcctgcgcgctatgtccgctgggagttgtagtcttgaccgcccctttgtccttggtctcctcagcgcctcagtgcactgcaggttacactacaactcccaggggcccatgcgtccgagggctggcggggcgggaggctcaagggggaggcgtaagggggcgactggagaagctggggtgagggaactggggagtgaagtgaaaaaaggggagagtgggggcgcagtgggaaaggacggggtgcccggaagacgcgcagtgagcccagctggggagcggggagttctagccgcggccgggctcgggcggggcatgggcggggcttgcggacgggtgggcggggcctgccttcgtcatgcggcgtgggcggggccgcagggggttgtccgtcagtggcacgcacagcagccgcagccgcctcgcgcccggtcccgcggtcgcagctccagccgcctcctccgcgcagccgccgcctcagctgctcgctctgtgggtcggtcctctccggcacttgggctccagtcgcgccctccaagcccttcaggccgccccagtgtcctcctccttctccggccagacccagccccgcgaagatggtggaccgcgagcaactggtgcagaaagcccggctggccgagcaggcggagcgctacgacgacatggccgcggccatgaagaacgtgagtgtctcctcccctcccccgccgctccctgcccctccgaagacgcggtccttggcgtggaaggcccggggcttcgtcgccctgtcgcgatggcgggttgaccgccccgtctcgctcactgaggggggctggggagggtcccgagaggcgacgggaacccgggctgtgacgcggcctcttttcggagtccccgtggccccgcggcgctgccattcaggcccggcgcgggcgcgggccggggcgaggtcccgcggggctggacttgggagcggggtctccggcccccgcggctctaggggtgcaggggacccgagcggggaggcgtgcgcatcctttgtgccccacttcccccctcctcctagcctgggcgtgggggcgggggaccgcatggatgcggttcctctttctctccctggtgtctgggcggcgcctttcccattcactcagcaggtctcccggttttccacctccccagcccccccagaatcttccccactgtctgtcccgacacatccctgagaatcttcccagaaacattgtatagggtctcttgaaaacctgagctccgtggtgcaaaatcgaaaccaccttgctcacgtttttcttaacaaaaggctcttctttctccattcgcccaaagcaagtcctccggcttttaggaagggagaacgtttgtctcgctagcgttttcattgatcattctcaacatgtcatctccattttattccctaatgtttttgtattgaaaagggtaggtattgcctgtaaaattaaaaggtgg

SEQ ID NO: 1271 - DNA, 6000 bp, Homo sapiens
accatgcccggctaattttgtatctttaatagagacggggtttctccatgttggtcaggctggtctctaagtcccaacctcaggtgatccgcccgcctcggcctcccaaagtgctgggattacaggcgtgagccactgcgcctgccttgttttgttttgttttgacagcatctcgctctgtcgcccaggctggagtgcagtggtgcaatctcggctcactgcagcctccacctcccaggttcaagcgattttcctgcctcagcctcccgagtagctgagagtacaggcacgttccaccttgcctggctaatgtttgtatttttagtagagacagggttttaccatattggccaggctggtctcgaactcctgacctcaaatgatccacccatctcggcctcccaaagtgctgggattacaggtgtgagctactgtgcccagccaagttaagggctttttatgtaagcttgatcacgtagacatgatcgattattaactcaatctccagctcctctctcttccccaaaggatgaggggggaggctaaaagttcaagcttaagaggctaaacttcaaatcctggcttggtcttcctggtgaccagccctcatcctgatgctgtccaggagcccagcgagtcacttcattagaagaaaaggcactcctgtcactcaggatgttgcaagggattttggagctctgtgtaagatgctcttattggccgggcgccgtggctgacacctgtaatcccaggactttgagaggccaaggcgggcggattgcttgagctcaggagttccagaccagcctgggcaacaaaacagcctgaacaacatggcaaaaccccgtctctacaaaaaaatacaaaaattagccgggtgtagtggtgtgtgcctgtggtcccagctacttgggaggccaaggtgggagaatcgcctgacttgggaggtcgaggctgcagtgagccaggatcccgccactgcagtcaaagctggggtcagagtgagacgctgtctccaaaaaaaaaaaaaaaaagatgctcttattacttctatcactcaggaaattacaaggattttaggacctttgtgttgggaaccagggcagagaccaaatatatatatgtgtgtgtatgtatatatgtatatatatatatatatattttttttttttgagacagagttcgttcttattgccccggctggagtgcaatggcgcgatctgtgctcaccgcaacctccacctcctgggttctagcgattctcctgcctcagcctcctcaatagctgagattacaggtgcttgtcaccacgcccggctaatttttatatttttagtagagacgggtttcaccatgttggtcaggctggtctcgaactcccgccctcaggtgatctgcccgcctcggcctcccaaactgctgggattacaggcatgagccaccgggcctggccccaaatatataggtcttattatgtcacagtgcttttatttgttgagttatttttttctgttttccccatgaaaatgtaagctccaccttggcttacactgtgccaggctactatttgtaggcaactaattgagcacctactacacagcaggagctcaattagtatttcttgaatgaattaaatcatgagggaatgaatgagccaaataagcaatggaggaggagacagatgttccaaacagagaggactgcctgtgtagcggagctgtggccaccaggggtttgagagctgaaggaaggcctatagggccagtgtacatagtacataccaggagaggtagtgatagatgaggaagagaattaagcatggctagatcctaacggaccttgaaggctgtgtttgttttaagggcaatgagaaggcatgaaagggtttttttttcagacggagtctcgctctgtcacccatgctggagtgcagtggcgtgatctcggctcactgcaagctccacctcccgggttcacgccattctcctgcctcagcctcccgagtagctgggactacaggcgcccgccaccacgcccggctaatttcttttttgtatttttggtagagacggggtttcaccatgttagccaggatggtctcgatctcctgacctcgtgatctgcccgcctcggcctcccaaagtgctgggattacaggcgtgagccaccgcgctcagccattgggtgtaaaattaacagggactactttctatcactatgtcggaggtggatgactatgctaactagacttgaaaagctacagactacggatctcttcattggcacacaactgagccacctgagtaaatcactctcccttcatcccttgttgacattcagcaaatcctgatggtgcttctgccatgcaccaggcctctaccaagggctgcagcaaatataaacatgactgtggttcaggctgccccccaaaaaggagcctcctaatagaaggagtgcccccttcatcttcctgtgtcccctgccctgccagtgtttgcctcccgtcttcagtcctgttttcagtcacctgcttcatatcgtgtccatcttttttattttttatttttttagagatggagtttcgctctcgttacccaggttgaagtgcagtgatgggatctcggctcactgcagcctccaccacctgggttcaagcgattctcctgcctcagcctcccaagtaactgggattacaggcacccaccaccatacccggctaattttttttgtgtgcatatatatatatatatattttttttttaattaaaaagtaaactttaatgttgaaaatgcaaacttggggagggcagaaagatcacatacaaggctgtcacttcacacttggaaggttgcacagcggctgggcagaggtgcattttttgtatttttagtaaagatgggatttcatcatgttggccaggctggtctcgaactcctgacctcaggtgatccacccgctttggcctcccaaactgctgggaatacaggcgtgagccactgcactcagccctagtgtcctttgtgccaccccaaggcccaggcaaaattaggtgctgtatacttctctgaatgaacatgaagttttccccttgaggcttatgctagtgggcagccagttccccaacctggggattctctcaaggcttacagagcttactgtatcagtcatttcaaccatccacgccaaatagggaagaataactcttgtctttctaactcacgagactattatgaggagaaaaatattagaggcttggctgggcacggtggctcacgcctgtaatcccagcactttgggaggccgaggcagtctgatcacctgaggtcaagagtttcagaccagcctagctgacatggtaaaaccccatctctgctaaaaatacaaaaattagctgggtgtgatggccggcgcctgtaatcccagctacttgggaggctgaagcaagagaatcgcttgaacccaggaggcggaggttgcagtgagccgagattgtgccactgcgctccagcctgggtgacagagcgagaaactgtctcggaaaaaaaaaacaaaaaacaaaaaacaacctgggtgtggtggtgcacacctgtagtcccagcttcttgggagactaaggcaggaggattacaggagctcaggaggtcaaggctgcagtaagctctgattgtgccgctgcatgcactccagcctgggccacagaatgagaccctgtctctaaaaaataataaaaattaaaggggctttgcaaacgcggaaggtgtctggatgattatcccctgcatgtgcagtgccttgtttacaattaatttgctttttccgtgtttattcaacaaatatttattgagccctcactctctgccaagccctgtgctagatgctggataagcaaggtaagtctctgccctcaaggaacttacactccaatgtgactcaaggggaaaagaatttgaaagttgctacttacccagtcccctcactgcacagaaactgaagccagaggtgtccacacctttctccttcccatgctctgatagctcctcactgctaagctccccattgcccgtgaccccatgtggcaggtttcccgcctggggtgcactcccaaaatggtttatgtaaataatattgaaaattggaccttctctgccaataatggggccgttgctttttgaaaaacttcccgttgatagtgtctcctatgactacccctgtgtggctgtgtggtttacagatccagttgcctctgctcttgcattgtgagagtcagcagaggcccaagaaaccccgatactagtttgctgctgttggtgggttttttgagacaaggtctctgtcgctcaagctggagtgcagtggcgcgataactcactgcagcctcgaactcccggactcaagcgatcctcctgcctcagccgccccagtagctgggagtacaggtgcacgccaccacgccggttgatttttttaaaaattttgtagagatagggtctcgctatgttgctcaggctggtcttgaactcctggcctccagcgatcttcccgccgcggcctcccaagttgttgggcttcggacgtgagctacgcgccgggctcccggttctagttaagattttgttgcaggcgatgaatagtcacgtggcctccaaggtcctagatttctgaggggcgtcagcttggcaccctaatgtactgtgatctctggtcagctacccaccctctttttgctgttttcatcctgggggctaaccgccaagacatggcctccagtttccctagggaagcctccacagaggaaggcaccggctgaggcacctgggaagaccaacctggggaaggtctccctgcgcgcagtctgcgggctggagggaccggccgagcctgcgcactagcgccccgccggcgctgctgaactgagaggaaggggcggggcgtcgccaggtcgtgccagcatccgccggacgccggaagtggttctccgcccctgccactgggccatggagactgtggcacagtagactgtagtgtgaggctcgcgggggcagtggccatggaggccgtgctgaacgagctggtgtctgtggaggacctgctggtgaggcctggcccggacagagggaaagggaaggtcggagggcgggtcctgaggagagtcaggtaggggccgaaccctcctcccggcatcggcttggccgagggaagccgaactacggctcccggcagcctccacagcgcctggctcctgcccggagggcctgctatgccgcagaggctcctgggagttgtagtgtcctgagccccccacacctcagactacgggcctggagcccgaccgtggttagactgacgggatctgggatcatgcaggagctgtgagctcagggcgctcctccagcggtggaggaatacagtgaccatcataaggtgtcacctattactgcgtccggcacggtgctaaggcatcgcatgccagatctcagtctttgtagctctaggaggtaggcactacttctattcctggacaataaaaggtccaggcccggcagggtggggcaggatggggccagcagcctcaaatgaggaccgcgtgggctgttgagcagttctgacagcgtgtttactgttcggccgccggggtcagctgctccgggagcggtgcctggagctgccaccaggtggcatctccgctcggtaccgccgcggggaggggagaccgggggcctctgtcccaagagctggcccgcaggcccggaggagccgaaagcctgggtcccgggcatggagatagcagaagctggggtgccagataccgagacctgcgagggaaaggggcagagccagggagatggcatgtccagatagagaatggttgacgccctacatttctaaatgattcctttcctcccctgtggcagaagtttgaaaagaaatttcagtctgagaaggcagcaggctcggtgtccaagagcacgcagtttgagtacgcctggtgcctggtgcgg

SEQ ID NO: 1272 - DNA, 6000 bp, Homo sapiens
tttgttttaagggaacaggtcttgctctgttgcccaggctggcctcgaaatcctagactcaagcaaatcttccttcctcagcctctggagcagctgggactacaggcacacaccaatgcactcagctttgagtaagttttacccttttttttttttgagatggagtctcgctctgttgcctaggctgaagtgcagtggcgtgatcttggctcaccacaacctctgcctcctgggttcaagcgattctcctgcctcagcctcccgagtaactgggattacaggcacgcgccaccatgcctgcctaatttttgtatttttagtagagacagggtttagctgcgttggccaggctggtcttgaactcctgacctcgtgatccacccgcctcagcctcccaaagtgctgggattacaggcatgagccaccgcgcctggccagttttatatgtttccagaatgcattcccacctgtgctatgcttgtatggtttgtctcctggtatgaataaccaatgtggcccccggtttgagcactgattgaaagcctccaactcacagggcctctctctctgctgtgaattcctggtgcctaagaagcctggaggcctgcctgaagatgtttccactccctttccagccacctggtttctctctaaggtgaattccctgaaactgaatgcagcgtgaggcttgaacaaaagacttcccatattcaaaacactcaaagatgtgagtagtcgccccaatgtaaattatcatataccaaatgagtattcattttccctgaaagcttttccacattaagtacgtttctctcttgtattaattatacaaatttggccaggcgcagtggctcacacctgtaatcccagcactttgggaggccgaggtgggcggttcacaaggtcaggtggtcaagaccagcctggccagcatggtgaaaccccatctctactaaaaatacaaaaattagccaggcatggtggtgcttgctactcaggaggctgaggcaggagaatcgcttgaacctgggaggtggaggttgcagtgagccgagatcgcaccactgcactccagcctgggtgatagatggagactctgtctcaaaaaaaaaaaaaaatgatatatatatatatacacacacacaaatttgtttatagtttggattgtggttgaaggttttcccacatttatcacagtcatggaatttttctctaccacaatttttaaaatacataaatagatgccgagtcttgctatgtcgcccaggcaggtctggaactcctgagctcaagctatcctgctgcctcagcctcccaaagagccgggattagattatgggtgtgagtcacatccagacagtgatttcacttctgcaaaaccttcctcctttccattcggcatcttctcattcccagtctcacatgtagaaacaatagaaaatgtaaatatcaccaattccccattcaatgaaaaaggaagctattgattggatatccatggagttttagacgcaagcttaaggggaaaagtccttctgagtatcaatatagcatgatgagatttgtctttgataacaactttactccagagtaaacaacagaaagtatttgtgtgttgaatataaggtgatgtacagacatcctgtgaaaatagttttgagttttctggttaacagatatgcttatcatgtttattcttgtggtgctgatcagttgattttactgaagactgatttcttctttttcttctttttttgagacggagtctcactctgtcgccccatgctggagtgcagtggcacgatctcggctcactgcaacctccacctcccaggctcaagtgattctcctgcctcagcctccagagtagctgggactacaggcgcccaccaccacacccagctcatttttgtttgtttatttatttatttagagacggagtctcactctgttgcccaggctggagtgcagtggggtgatctcggctcactgcaacctctgcctccccggttcgagcaattctcctgcctcagcctccagagtagctgggattacaggcatgtgccaccatgcccagctaagttttgtatttttagtagagatgggatttcaccatgttgtccgggctggtctcgaactcctgacctcaggtaagccacccactttggcctcccaaagtgttgggattataggcatgagccactgcacccagccagcttctccttcttcttgagaaagggtcttgctcggtcacccagactgagtgcaatggtgcaatcatagctcactgcagcctgaaactcccgggctcatgcaatcctcccacctcagcctttcgagtagctgggactataggtgcacgccaccacacctggctaattctttaatattttgtagagacagtctcattatgttgcccagactgcagatctatttcttggtgataactagtcaaggtttcctttgtgatcaccttgaaacaactgactaatatggggtgtcttagatacttacaagcttggaactaggatatggaggaaaaaggggagcagaccagtgaaagttctagaatagctatagaggagggacttgggggtagtagtgtagttgaaagggggtgaagctgtgtctacaccctaagtattcagattatcagtaagaccataatctaattacttggggtggttttgggaagggaaagctaatgaggattacagggagctaaatcctcctaaaccgtttctactgcaaccacaactctacatcattgctatgataaattaaattctgggccaggcacagtggctcacacctggaatcccagcactttaggaggccaaggcgggaagattgcttgaacctgggaggtggaatctgcagtgggctgtgatcgggccactgcactccagcctgggcgacagagcaagaacctgcctcaaaaagaaaaaaaaaaaaaggcctgtcgcggtagctcacacctgtgatcccaacactttggggggctgaggtgggtggatcacgaggtcaggagtttgagaccagcctcaccaacgtggtgaaactctatctttacaaaaatacaaaaattagctgcacgtggtgtcgtgcacctgtaatcggagctactcaggaggctgaggcaggagaatagcttgaacccaagaggaggaggttgcagtgagatgagatcaagccactgcactccagcctgggcgacagagtgagactccatctcaaaacaaaacaaaacaaaacaacaacaccacaaaaaacaacaaaaaactgtgcataaagccattaagtgtgctagtgacaccatcaaaaataacaattgtaactgttaccttttagaacgtgaggtagcaggtagagtaggaatgctgtccttagctgacctgagtcaactctagactcatttttctaccaataatttgcacatattggataaatatttgctaaatgaacgggcgaatgaatgaatgaatacatctggactcccttgtgtagcttagcaaaaagggagcatgctggctgggcacggtggctcttgcctgtaatcccagcactttgggaggccgaggcgggaggatcacttgaggtcaggggttcgagaccagcctggccaatatggtgaaaccccgtctctactaaaaatacaaaaataagccgggcgtggtagtgcacacctgtaacccagctacttgggaggctgaggcaggaagatcgattgaacccgggaggcagaagttgcagtgagctgaaatcatgccactgcactccagcctgggagacagagcaagactctgtttcaaaaaaaaaaaaaaaaaaaagaaaaagaaaaaagaaaggagcatgctaatacctatttgatcttttattttcctttccttccctccctccctccctcccttccttccttccctccctccttcctttctttttctttctttctttctttttttcttgagacggtctcactgtgttgcccaggctggagtgcggtggcacaatctctgcccactccagtcatgaactcctgggctcaagcaatgctcccatctcatcttcccgagtagctgggactacaggcattcaccaccgtgtctggcttattttttgtaatttttttgtggagacggggtttcactatgttgcccaggctggtctcaaactcctggcctcaagtggtacccccaccttggcctcccaaagtgctggcattacaggcaggagccatcgtgcccaacctataatacttgattcttttctttcatgcattattattgttattattaagacagagtcttgctctgtcgcccaggctgcagtgcagtggcgcgatctcggctcactgcaacctccttctcccgacttcaagcaattctctgcctcagcctcccgagtagctgggactacaggcatacgccaccacacccggctaattttgtatttttagtagagacggggtttctccatgttggtcaggcttgtctcgaactcttgacctcgtgatccgcccgcctcggcttcccaaaatgctgggattacaggagtgagccaccgcgcccggccgatcagtactttttaaaaacttttaggttcagggtacacgtacaggtttgttatatagataaacttgtgccacgggagtttgttgtacagatggtttcgtcacccaggtactaagcctagtacccgagatgacaacttctgaaaataaaataatctgataaaagcgatggacattctctttcacttccaggtggcgtggcgccgcgcccctcctgcagagctgagtcgttcattggccagtggggtccccgtgccccgcaccgggcttcgctcggccccgcctccccgcctagggtggctcctgcgcagatgccttgagcgttgctccgagtcctccagcccaccgagtcctcctcctagagcggccccagaagaagcgcttcctcctccctctcgggagccaacgaaaccgacacccggaagcctagtcgcccggaggttctgagcgttctgttcggacctcctaccgttactctttcattcactcaagaaatgatttcttgagttcccggcctttgtcagagagatgaacgaggcacggtccgtgtccagctaaaggacagtaggactggaagagcgttgttttccaaggtacaggatgccgcgcctcctaggagccgaagggacgggaggccgcgtagaggaggggaccgtccccgagcctcgccgagcctgcggtgtagacacctctggtgtctagtggttgaggatctgttgaccgggcatggtgggtagaaggaacgctccgagcagaagaaaagtggctgtcgtgaagacatctgcgtgtgcggggtgcgtgggtgcctggagatgaagctggaaaggtgagcaggggcgggcctggagggcttcgtgtgcgtggtaagaaatttaaacaggatcctgagtagcctagacggtattttaggggctttttttgtttttgtttttttgtgagacagattctagctctgtcacccaggttggagtgcagtggctagatcttggctcactgcagcctccgccttccgggttcaagcgattctcctgcctcagcctcccgagtagctgggattacaggcgcgcgccaccacaactagcaaatttttgtatttttagtagagacggggtttcgccatgtttgccaggctggtctcgaactcctgacctccagtgatcttcccgcctcggcttcccaaaatgctgggattacaggcgtgagccaccacggccggcctaggctgtattttcatctggacatatgagcttgtatttgcacttcgaaatacaccaggtaaccaggttgggttgaggaggaaaagtatgcagcctgtttgggtatggtgacagaatcgaggcagggacggcctgacatgtgtttattggtgagcagtcttgtgtctcttccattgacatgtaactctcatgagagcaaggactattacctct

SEQ ID NO: 1273 - DNA, 6000 bp, Homo sapiens
tttctattaaaataaggtaaagacaatatttcaatctattgataggataatccattacttaggaaatgaaagattattgcttttgtctgatgctgttgggagtatctatcctaaataaattggtagctggtgtatggaaatgttgaaaataagacatttagtaaaagaatatataccataattttcatttatagtcctgaaaaacttcctctttgtacttttaacaaaagttaaagcctccctttaagtttcaccaaactttcaactttagctatgtagtatttaatgttaagaaacattactggtgccaagtgtagaaaataggaaaaatatttgcactaaaatttcacaatgaaaagaaaataaaccaggaatcagtttttccgtgacaggttgaaaacatatttctttttttgagacagagtctcactctgttgcccaggctggagtgcagtggcacaatcttggctcactgcaacccctgcctcccaggttcaagcaattctcatgcctcagcctctcaagtagttgggattacaggtgtgtgtcaccacacctcgctaatttttgtattttttagtagaaacgaggtttcgccacgttggccaggccagtcctgagctcctggcctcaagtgatccacctgcctcagcctctcaatgtgctgggattacaggagtgagccacggtgcccagcctgaaaacatatttcaagataaagtattatattctcccactgggggatgggggcatgcacagcaaatattaaggtttaaattcatctgtgacagtactttcatgggtctttcatttatcaaagccaaaacatagaagcactaggtctaagataaaacttgttttttgtcctttgttgtcaatagtgaaatagctaaatttgaggtcttgtgtaggaactgctccctgaagaaaaccttgctgataatgacatagagtaataatatgatatagcaaagctaactaatttggtagatgaaataccattttagtcagttaatgttagcattaagatttgtgtgctgtgaacagataaatgtaattttgaaattgtaggatccatgatgaccttaaaagaactgtagatctttgtcaaaaggctgaagcaacaggagtttcatggattacagtccatggaagaactgctgaagaaagacatcagccagtgcactatgattccattaaaataattaaggaaaatatgtctatacctgtaattgctaatggagacatcagaagcttaaaggaagcagaaaatgtgtggcggattactgggacagatggtaagaaataagtacttgggttcttttaattggggggggaagaaatgagagtggggaagtaatgttaatttgattttcatttgttttgtttaacattaagccatattttcccattgtactgttttaagctaagcgatttattaaaatgatgttaagttttctacctagaaaaacatggattatcttaactgggataaattaattcagttacttttctgacaccatcatatctagtgaccagtgaagaattttccagatagcctactagtaaaataaagcacctagaaataagagtaagtgaactcgagaatgataagagctaaaggaatcccagaactgctatgcagtttcattattcccttaaattattggcatgccaagccctataattgctagatgggagaatatagataaactgaactttaagcagcccaatttatgacaatccagatttaccctaaagaaaaactaaagactaatggtttaatgtagaaatctttaaaaaataaagatttctgtacgtacatttaaactttcctggtttacaaaaggtaccaaaattaattcttttgtaatcggattaaacatattaatgcaataaagacattacaaaaccttgtgataatactttttaaaaatatactgtttgcttcattgagcttgaactaataaccaggggttcttaatgtatggacaaatatggtgtgctttaatttgtaggtgtgatggttgcaagaggactcttagcaaacccggccatgtttgctggatatgaggaaaccccactgaaatgcatctgggactgggttgacattgctcttgaactcgggactccttacatgtgtttccatcaacatttaatgtacatgatggaaaagataacttcaaggcaggaaaaaagggtatttaatgctctgtcaagcacatcagcaatcatagattaccttacagaccattatggcatttgactagacttcccaaataattttaatatatacttttagacccacagtgaaaccacagaaggtcatattttgtaccttaaaccagtagctctcaaattttagtataaaaacaattcctgggagcgttttttaaaaatcagttgtagacaccaccctcagagattctgattaggtagatctggagtagacccagaaatacacagtttaaagaaaactcccagtggttcaaacatcctgatcatcctaggcaaacattgacaaatactgctctgaatcctgttctatagatattggggggatgggtagagtgggaattttttcctaatcatgtttttaacattttaaaataaaatttaatactaagaaattatggcttatagtatctataaattaacaagaagtatgcaggtgcaaaaaagtggtggaacaaataccaacatccatccaaaatgaaaaagaacaggaaattctgaatagaattgcactcagaacttatattaaaaattccatttggttaatgacattaaatttggtacatttcaaaacttctaggtcctccaaagattgaaagcttaataatctcctacctaaaaagataaaattaattgcaatctaccatatcttaagtataggaaatttggtgtccaacctggagatgattatatatttgaaatatttcctagagaatagtaaccaggttttgtttttaactttaaaacctaattacttttgtgcctctcagccgttgattgtaactttaaagtcccatggttttggagtgttattaatagattttgttatcggtgggcatgcactgcaagaattaagtatctcagactgaaataaaaccgttcataattaaagtattattttgttttgccaacatgaaaactgttataaggaaacaattatgtaaaactgtttaattcacgtttgggaatattgaatgaatccattttaacataagcactgtggtgccatcttttttctcagtacattctgttttcacttttcagttaatgcatttttttttttaaagataactcgctgtttcattttctatgaatactgtacaaaatagggaggtatggtcagaactctgaattgaattaccctagtgttgtgagcacagcatcatcactagagtaatgtgctcggtgtttggaaggaaccagcgtggatgggcaagaagttctaacacttttgattaaaagtaacttcctggccgggcgcggtggctcacgcctgtgatcccagcactttgggaggccaagacgggcagatcacgaggtcaggagatcaagaccatcctggataacacggtgaaaccccgtctctactaaaaatacaaaaattagctgggcgtggtggcgggcgcctatagtcccagctactcaggaggctgaggcaggagaatggtgtgaacctgggaggtggagcttgcagtgagctgagattgcgccactgcactcctgcctgggcaacagagcaagactctgtctcaaaaaaaaaaaaaaaaaagtaacttcctggctaggcgcggtggctcacacctgtaatcccaacagtttgggaggccaaggcaggcagatcacttgagtccaggagttcgagaccagcctggccaacatggtgaaaccctgtctctgctaaaaatacaacaattagctaggcatggtggcaggcgcctgtaatcccagccactctggagactggggccagagaatcacttgaacctgggaggcagaggctacagtgagccgagatcgcaccaccacaatccagcctgggcgacattgggagactccatctcaaaaaaaaaaaaaaaatcttccttatggttaatttatgttcaaagtctatttttctattttttctgttacatgtgatccagaatattagtgataaattaagaaaaagcaccaacttaaatgtgtttttgaatgttttatattctataattatcaattttcaacatttatttactattccccaaataattgttaccaggatagtacttttattaaattcctgatacgttgtcaatattgaaaaaactcaacaacttaaatgtacacgcacagtttgaaaagctggaaaatagtgaaagaatatccccatacccacctttcgtaccagtccccaaacatcacggtaaagtttactgtctcttcccagcccatggacgggaacgggaacgcctacggaatatgttgtgacatacagttgatcctaggttctccagaacaaaatgctgcacgaccacctcatcctggccctttattaaatatagcttaattctggacacaaacagttcccaccatgaagagagagtaggtgaccggaaaggagtgcgtcttaagcgcgttcgctgaatttgcaccacccaatccagccccgccgcccggcgccgctccttagacctggaccccggcaccctcccgccggggccgcacttagcagtggaaagtctgtcctcctgaagaagttgcgctccgacctccaagcatcaggtcaaaagtctaactcattctctgacctgccgccaattagaaaacaactgttgccaataaacgtggtcgcgccgcctgtgacctcagccgggacggacccgcgggcgggagcctgcggggcgtgaggcggggtggggccctggctcccctcccccgcccagccgcggcgtctgacgtcccgcgcgtcggcggccgcggagcagcgcagggagccaggcgggctgccggcgggtaagggcttctgcgacccggggacccgtggggcgtaggccgcggagggagagcgccgctgcctggtctggagaaccccgcggagctggcctggcccgacccggcccggcccggtccgcggcgcggtggtcgagggcccgcggcgccttctgggagcgggagggccgggaagccgggcgttggtggagggaggcgttgggcttctgtcgccgcgaagctggcggaaaaggcagtggccagcgagccgcctcgccagttcccacgactcccagggaggtggcgacacccgcttcccgggccacccttttccccttcctgaccggggtccgtgcttgccttcccaggtgggggaaggtggaacactgtccatcccctggacaaaaacgctgcgcctcggggccttgaacccggttttgtttgaaaggaagcaagagaaaataagtgtttttccatttaggtgtgaagaaaaaaatgacactccaatgggctgcagtggcaacctttctttatgccgaaataggactcattttaatcttctgcctaccttttattcctcctcagaggtaggaaaccttcaaatcgttaactaataaatattggatcgctcttaatgtaaaatggaaaaagttttctgaacattaaaaagtttcgaaagtctttgaaaataaactcacctaacgaattaggtagtatataatgacaatattaaaataacattttatataaaactctgttacgtgtacaagtgaaataactttttcttcccttctaaaagaaaaggcgcctatacttttgattctgttgattacagatataataaagcaacgattatacttttaacacctgccctgccttgtctcaggttttacctttgttttattgccctgaattggagccatgaactaaataaatataagtggataaatcatgtttacagtacagcatgggtgtaaaagtgtttcactgaggcactggaacagcaatttagaaacc

SEQ ID NO: 1274 - DNA, 6000 bp, Homo sapiens
gcctcttagcctacaccttcccattcccacaactcactccttaacaaaccccctttcctatcacacacaccaatgacccttggccaatttccttctattcatatgttaactgtagactgcagtcctgattccagctgtactttccccttatgagcagaacagtgaggaaattggctgaaacagaacaacaatcagcccccctcactcctgtgcctactttgcatagagacacacctcatttagactcccacagccttcctgttaatgtctccttcctctctctgctatcgatctggggctctgggacagagaatcttcaatatcccaccagtgcccacacttattaccactacagacacagttattctcattcccatactctctctctctctctctcacacacacacacacacacacaccctctcctatgcttccccaccccagctgtccctggggagcctggattggatttgtgcccacggtctgcagcttccctcggtctgtctgctggtcaccctctgaaggaacggggcccagttttgttcaccctctggctcaaggaccaagtatgcttctactcactctctacctccaagcacctaccctactccgacttaactgcctgacccacaactaaaaagaacagctctttgatcttcacaggtgtggtgaggcctggtgagaggggagccttctagttagtgacctaccacgtttcaggaaccatgttagtttccaggattcagagatgattaaaactaatcacgcaccttgagaaactcacagtggaaggaaaatcagtaagcagaaaaatgctacataaccaggtaaatgctgggacaaatttaggaaggaacgatgtggatacactggagcaggctccaaagcagcatcacctcggaggaggatcttgaagactcaagagttaactgggtcaagaaatatacacactaacacttctgacaggtctgcagaatacagggagtccataaaaatagcacttgggtaatggaagcaggacacaccattccatgcccacagcattactttctgtgtgcagtgcactgtgtgatgatctacagagattaaataagccgaggtctccgcttccagtcacttgggagagacgcacaaggtaaattacccaaatagaaggcaaactgcccagggctgtaattaacatacaatatgcgccgagagggaaaggttaatgctaactccggtcctaagtacaaagatcattgggagtcaggggtgcactctcattagggtacagcatgggtgggtggagagagtaaaaaccagaacaaatcaaggttcagcagttggaagtcagccttagggagaaaaggggcggagactgactgggccagaacagggattgggacagaaaaagagggtggggccagtgggctccacctacccgctccggcccttcccaccaccccccaccccatctactttctacagtctgtggagacaggtgagcgacgaacttctgagacaggtgtgggtgcgagggtcgggagggtcatgggattgggaccgaggtgtgaggagggaatctgcaattccttgctacacagagcgctggcaacttctgacaggctgtttctggggtatgggctgcctcgggttgttgctgttacaaggaaagaaaagagttcccctgcccaccgcctcccagccactgggctacctcctggcaggaaatttgcaaactgagtttaacaagttaggatcagcagagggtagaggagggccctggcagatgtggggtctagaagaggacaggagttatcagggcctccggccattgtgctgggcctttgcctgtacaattgtttctcaagcagttgtgtccctgtggctttggtgcgcctgtgtgcactttctccctccacctggagcatgggctaacaccggaggaaaggaaaagacagagtcagacagggtaagtggggctccctcccctcttctctctaacggggctggattgagggcctctggctggggaggtgggggtggagatccagtaggagcaataacagaggaagggcagggcctgccccatcacctgaattccagagatgccagtgtgcactgaagccccaggcagggcgtgcccaggaccggatcctggatggtggtaagggacaaagctggaagggagactacagggaaggagaaaggaaagaaggcagagccatgacacagtcaacttacagaatggctgggagtcaaagctcctgggctggtttcctggctattccacacactccaagacatagagagaatttcggaactggaggggactctacagatgatttatttgagattgaagaacctagaaaccaaacaaagaaatatcatatggttactttggtatctgacacagccatgacaccaattgctagtgtagacacaatagctgtgtgtctttttgcaggagcctggggaggggccatggtgccaatgcacttactggggagactggagaagccgcttctcctcctgtgctgcgcctccttcctactggggctggctttgctgggcataaagacggacatcacccccgttgcttatttctttctcacattgggtggcttcttcttgtttgcctatctcctggtccggtttctggaatgggggcttcggtcccagctccaatcaatgcagactgagagcccagggccctcaggcaatgcacggtgagttaagggtgggcatcgtaagaggaatacaccttgggcccatcctccctctctccctgtagtctctgaggcagagagtctctggtttcctgtcattggcatcagcgggaggaggggtcagaggccaacagaggatcttttgcccacagcagacaaaaaaaagggaaaaagggcttctttcatggaagccaccaatggccttatttctcttccctcagggacaatgaagcctttgaagtgccagtctatgaagaggccgtggtgggactagaatcccagtgccgcccccaagagttggaccaaccacccccctacagcactgttgtgatacccccagcacctgaggaggaacaacctagccatccagaggggtccaggagagccaaactggaacagaggcgaatggcctcagaggggtccatggcccaggaaggaagccctggaagagctccaatcaaccttcggcttcggggaccacgggctgtgtccactgctcctgatctgcagagcttggcggcagtccccacattagagcctctgactccaccccctgcctatgatgtctgctttggtcaccctgatgatgatagtgttttttatgaggacaactgggcacccccttaaatgactctcccaagatttctcttctctccacaccagacctcgttcatttgactaacattttccagcgcctactatgtgtcagaaacaagtgtttctgcctggacatcataaatggggacttggaccctgaggagagtcaggccacggtaagcccttcccagctgagatatgggtggcataatttgagtcttctggcaacatttggtgacctaccccatatccaatatttccagcgttagattgaggatgaggtagggaggtgatccagagaaggcggagaaggaagaagtaacctctgagtggcggctattgcttctgttccaggtgctgttcgagctgttagaacccttaggcttgacagctttgtgagttattattgaaaaatgaggattccaagagtcagaggagtttgataatgtgcacgagggcacactgctagtaaataacattaaaataactggaatgaactcctgatcccaaagcctattgtgttttcaacacaaggtaataggaagccaagcaacttgcatgtctcccaatccctgtctagggacagctgctggtgcaggatggaagacttcctataaacagaatgggcgaccaattgtgtctacagagggggtgggctgagcatgggcacgcatgtccccagcctcctggacgagcaaagtcagtcaaagcgctggtgatccctgctccgcgtgcgtagcagtgtctgtgcctctcctgcccaggggctagagagcagtctccagtgcagggtccccatcctatctgaaaacagtggagtcagtgaccccaggtggagggacttccagttttaacaatgggttggtatgaaggccagaaggagtgaaacatgtgaactttctggcgaggagactccctcttgaatcatccatatgtagccccggggtcacttgcgaagagtctctaacagcttctgcctcactcctaagctctgaccgctaggctttcaccccagccgccggtcctgattcctgagatcccaatattgagcaccaggtttcctggaattgtgtgctgcggctgtgatgtaggtttcggtcgctggaagctgctaaaccatagctgacgccccctcctaagccagccttccttccccgcgcgggcatctgtccagggccttgtcgcgctctcagtctccttcgcagcctggccccaaccgttcaacttcaataaagcaaaactccagccacgcccgtctccgtgaagttatcgccataggccggccagggggcgcgagaggcaccggggtgatttccgcgggaatcgataaccaatcggattcccaggccgaacggagcacacccgcccgccctcgctctttccccgccctttgccccgccccgctccttcccctccttttgtctgtccgccgagcaccccacttcaccccattggaccgcgcggccgccgctagagctctgcgcctgcgcacgcaccgggccggggactgggtggcctggtgtgtgggcgcggcagggcgcaggcgcaggcgcagtgtgcgtccgcgtctgaggggagggatgtgggggaagcgacggcccccggtttgtttgggctgtgggcggtgcgcagcggagagcccgggaaaagcgggaaatggcggcgccgagcgcggggtcttggtccaccttccagcacaaggagctgatggccgctgacaggggacgcaggtaagtagggaacggtcttagggctccttaggggagcccagggaaggggagcgtggcccccaggcgtgcggccctgcagccccctcccctcggagccccggaaagcagccgtgtccgcgcttcctgccaagggtgggacgcccgcccgagccgctccgagcctgactccgcgcaagggcccgcgggcggacctcttggccttgtctctcgtgggaaaagactgccccagcctccctttgttcaacccacgagggttctaaaggggaggtctttgcagtcctgcccgctcttgggttctcttgaagattcttcatcctttcctctggctcccttatgagggaaactataaaaagaccatactctgtctccttaaaaatcgacgagaccttctgcagacctcggtgctctgcctgatgtgcatttgatttgtatcgattgtatcatgatctgcatggctttgcatagaatgaccagattttcaaagaagtcaatacagggtttggaaattgagtacttttggcagaacaagggggttcctgtggctccgagtgtccatgcctctgccccggtcattccatttcatggcagtcatcacccaggagaacattgtaatgcctcctgctcgagactgaagattaaggtcttcgcaaagggaacctgcagaaggacacagaattaagacgtaggaactccgtggtgcccttcgcccctcctccccttccagttgtgtcctgaaattctaaatgattggaaacttttataatgttcacgtttaagactctcatactacagagtagaggaaggagcgggtgtgcagagggggtgatgcttcagattaaaactaaagagttgattgaaaattcaagtctggaactcgagagagttaagaactataagtcagtaagttgcaagtatgggtgagattgtctagggaaaggctctttgaaggggcgtccctaatg

SEQ ID NO: 1275 - DNA, 6000 bp, Homo sapiens
gcttccagtcacttgggagagacgcacaaggtaaattacccaaatagaaggcaaactgcccagggctgtaattaacatacaatatgcgccgagagggaaaggttaatgctaactccggtcctaagtacaaagatcattgggagtcaggggtgcactctcattagggtacagcatgggtgggtggagagagtaaaaaccagaacaaatcaaggttcagcagttggaagtcagccttagggagaaaaggggcggagactgactgggccagaacagggattgggacagaaaaagagggtggggccagtgggctccacctacccgctccggcccttcccaccaccccccaccccatctactttctacagtctgtggagacaggtgagcgacgaacttctgagacaggtgtgggtgcgagggtcgggagggtcatgggattgggaccgaggtgtgaggagggaatctgcaattccttgctacacagagcgctggcaacttctgacaggctgtttctggggtatgggctgcctcgggttgttgctgttacaaggaaagaaaagagttcccctgcccaccgcctcccagccactgggctacctcctggcaggaaatttgcaaactgagtttaacaagttaggatcagcagagggtagaggagggccctggcagatgtggggtctagaagaggacaggagttatcagggcctccggccattgtgctgggcctttgcctgtacaattgtttctcaagcagttgtgtccctgtggctttggtgcgcctgtgtgcactttctccctccacctggagcatgggctaacaccggaggaaaggaaaagacagagtcagacagggtaagtggggctccctcccctcttctctctaacggggctggattgagggcctctggctggggaggtgggggtggagatccagtaggagcaataacagaggaagggcagggcctgccccatcacctgaattccagagatgccagtgtgcactgaagccccaggcagggcgtgcccaggaccggatcctggatggtggtaagggacaaagctggaagggagactacagggaaggagaaaggaaagaaggcagagccatgacacagtcaacttacagaatggctgggagtcaaagctcctgggctggtttcctggctattccacacactccaagacatagagagaatttcggaactggaggggactctacagatgatttatttgagattgaagaacctagaaaccaaacaaagaaatatcatatggttactttggtatctgacacagccatgacaccaattgctagtgtagacacaatagctgtgtgtctttttgcaggagcctggggaggggccatggtgccaatgcacttactggggagactggagaagccgcttctcctcctgtgctgcgcctccttcctactggggctggctttgctgggcataaagacggacatcacccccgttgcttatttctttctcacattgggtggcttcttcttgtttgcctatctcctggtccggtttctggaatgggggcttcggtcccagctccaatcaatgcagactgagagcccagggccctcaggcaatgcacggtgagttaagggtgggcatcgtaagaggaatacaccttgggcccatcctccctctctccctgtagtctctgaggcagagagtctctggtttcctgtcattggcatcagcgggaggaggggtcagaggccaacagaggatcttttgcccacagcagacaaaaaaaagggaaaaagggcttctttcatggaagccaccaatggccttatttctcttccctcagggacaatgaagcctttgaagtgccagtctatgaagaggccgtggtgggactagaatcccagtgccgcccccaagagttggaccaaccacccccctacagcactgttgtgatacccccagcacctgaggaggaacaacctagccatccagaggggtccaggagagccaaactggaacagaggcgaatggcctcagaggggtccatggcccaggaaggaagccctggaagagctccaatcaaccttcggcttcggggaccacgggctgtgtccactgctcctgatctgcagagcttggcggcagtccccacattagagcctctgactccaccccctgcctatgatgtctgctttggtcaccctgatgatgatagtgttttttatgaggacaactgggcacccccttaaatgactctcccaagatttctcttctctccacaccagacctcgttcatttgactaacattttccagcgcctactatgtgtcagaaacaagtgtttctgcctggacatcataaatggggacttggaccctgaggagagtcaggccacggtaagcccttcccagctgagatatgggtggcataatttgagtcttctggcaacatttggtgacctaccccatatccaatatttccagcgttagattgaggatgaggtagggaggtgatccagagaaggcggagaaggaagaagtaacctctgagtggcggctattgcttctgttccaggtgctgttcgagctgttagaacccttaggcttgacagctttgtgagttattattgaaaaatgaggattccaagagtcagaggagtttgataatgtgcacgagggcacactgctagtaaataacattaaaataactggaatgaactcctgatcccaaagcctattgtgttttcaacacaaggtaataggaagccaagcaacttgcatgtctcccaatccctgtctagggacagctgctggtgcaggatggaagacttcctataaacagaatgggcgaccaattgtgtctacagagggggtgggctgagcatgggcacgcatgtccccagcctcctggacgagcaaagtcagtcaaagcgctggtgatccctgctccgcgtgcgtagcagtgtctgtgcctctcctgcccaggggctagagagcagtctccagtgcagggtccccatcctatctgaaaacagtggagtcagtgaccccaggtggagggacttccagttttaacaatgggttggtatgaaggccagaaggagtgaaacatgtgaactttctggcgaggagactccctcttgaatcatccatatgtagccccggggtcacttgcgaagagtctctaacagcttctgcctcactcctaagctctgaccgctaggctttcaccccagccgccggtcctgattcctgagatcccaatattgagcaccaggtttcctggaattgtgtgctgcggctgtgatgtaggtttcggtcgctggaagctgctaaaccatagctgacgccccctcctaagccagccttccttccccgcgcgggcatctgtccagggccttgtcgcgctctcagtctccttcgcagcctggccccaaccgttcaacttcaataaagcaaaactccagccacgcccgtctccgtgaagttatcgccataggccggccagggggcgcgagaggcaccggggtgatttccgcgggaatcgataaccaatcggattcccaggccgaacggagcacacccgcccgccctcgctctttccccgccctttgccccgccccgctccttcccctccttttgtctgtccgccgagcaccccacttcaccccattggaccgcgcggccgccgctagagctctgcgcctgcgcacgcaccgggccggggactgggtggcctggtgtgtgggcgcggcagggcgcaggcgcaggcgcagtgtgcgtccgcgtctgaggggagggatgtgggggaagcgacggcccccggtttgtttgggctgtgggcggtgcgcagcggagagcccgggaaaagcgggaaatggcggcgccgagcgcggggtcttggtccaccttccagcacaaggagctgatggccgctgacaggggacgcaggtaagtagggaacggtcttagggctccttaggggagcccagggaaggggagcgtggcccccaggcgtgcggccctgcagccccctcccctcggagccccggaaagcagccgtgtccgcgcttcctgccaagggtgggacgcccgcccgagccgctccgagcctgactccgcgcaagggcccgcgggcggacctcttggccttgtctctcgtgggaaaagactgccccagcctccctttgttcaacccacgagggttctaaaggggaggtctttgcagtcctgcccgctcttgggttctcttgaagattcttcatcctttcctctggctcccttatgagggaaactataaaaagaccatactctgtctccttaaaaatcgacgagaccttctgcagacctcggtgctctgcctgatgtgcatttgatttgtatcgattgtatcatgatctgcatggctttgcatagaatgaccagattttcaaagaagtcaatacagggtttggaaattgagtacttttggcagaacaagggggttcctgtggctccgagtgtccatgcctctgccccggtcattccatttcatggcagtcatcacccaggagaacattgtaatgcctcctgctcgagactgaagattaaggtcttcgcaaagggaacctgcagaaggacacagaattaagacgtaggaactccgtggtgcccttcgcccctcctccccttccagttgtgtcctgaaattctaaatgattggaaacttttataatgttcacgtttaagactctcatactacagagtagaggaaggagcgggtgtgcagagggggtgatgcttcagattaaaactaaagagttgattgaaaattcaagtctggaactcgagagagttaagaactataagtcagtaagttgcaagtatgggtgagattgtctagggaaaggctctttgaaggggcgtccctaatggaatatcaatattaagggcaggccaaaggccctctaaagaaaacaggaactgggtaggcagagagaagactcccaaagaatgctgtcatggaaaccagaggaagagaacgatttaaggagcgaatactactggtaaactaatggaagaaatctgctgcaccactggttagtatcccagctgcagtgttatatgtgatcgttattactgctttgacgtattcgaaagtgattcattcttaaataggtttttttatttgtatagctctttttcttgtagccagtttttcctgaaagtcttgggtaatggaaatattacagtaaaaagaagaaaaaatggagtttcagactcatttttccaaacctcagattcattggctgcttccaacccacttcatctgttttaggatcccacctgctatcttagttctcccagttcttccaggacccagctcttccctcttctaactataaatctctcacccaatagcatctgcaagccaagtgcatccattccatagatgtgtggtatttcactgactctaagatacacattttttccctccctttttttttttttttttttttttggacggagtctttgctgtgtcacccaggctggagtgcagtggaatgatctcagctcactgcaacctccatctccaaggttcaagcgattctcctgtctcagcctcccgagtagctaggactacaggcatgcagcaccacactcggctaattttttgtatttttagtagagacagggtttcaccatgttggccaggctggtcttgaactcctgacctcaggtgatctgcccaccttagcctcccaaagtgcagggattacaggcatgagccaccgtgcccggcctcccctcatgttttaacaccttagaaatcagaatgcattttagagtaggtttttaagttataaatggaagttattgtattttcactgctatcaggtgccacccttcctgctgttacatatgtggaaaatgtgacggggcaggctagagaactctggatttatgtaaactaggcatgtagatgacatattggcaataggattattttagtttataagcagaagctgatctctttgc

SEQ ID NO: 1276 - DNA, 6000 bp, Homo sapiens
aagttaaagaagttaaatggcatccctccatctcagtttcctcaatataaaatgaaaatagtccttgtacctacttcataaggtgcttgtgatggttaaatgagattatgcatttaagggcttacatagctcagtacctggctcacagcacatccacaaaatatgccagctgtaactcttaaaacacgatcagtgccgtaaagggcttatagtttgctttaaaggtcactttgtccaaacattcaaataattacttttttaatctctcatgtggccaaatgtaaatagctaatattattgtcatcctgatctagtattaccgcagaatatagtctgctgaggccctgcaacatgactcagactacggcagttactaccgcaaaagcagaaggaaatgtggcctctctaaggagcagaccagttactcaggaaaataaagtaaatatacatgaagtagcttaagactagttcacaggcctcatgtaagcaaaggtgaaattagcaaggtacaaactgtacttaggaaggagtatgcagtaagagtagatcattttaagtgagggtagtttaaagagattttttagataagataaggcttaatttgtacctggagtaatttgatttacatagttatagagtagtatctagagtctgtcgtaggaaagaaacaatacaatatgataagtacactgagaggcagagggcatgttgtgtctcccctcctcccaaacagatgctcggatctgattttaaaatagcatctgtgtgagtatgtgagatgtggctggtcacaatgaagtgggttcacctccttacaaacctttagtcataactgaggttttggacatcagcaggtaaaagtaaggaacagttgggagcttaagtaagaaataatgtgatgaattgtttttccagcaaggttgccatggagggggctgcactaaggaaagaggttatgggtcagcaactttacttttcattccctgctctatccccaggcccagggcactgcctgatgcatggtagcacttataaatgttcaatgaatggatgaaaattaatctgcctgaaaaactgtaggtattatgtaaaaaacaaatatgaggatattgtgacaaaagaaccagtgacatttattgattgatggatctgtgatataaaggtgagagaggaattctcctttctctttagcttggcctgtttcctttaggcgtctttactaacaaaacgacgttaaattgtgattttctcatcctatatccagggatttaatacactattggatctggataaggagtaattgctcttttctggagtaatctggatcttttgctctgtctctctaacttttctgaaattaaatccttcaaggaatgaccagtagccaattgttccattgaaaatttgagttcacctgtcttcctgctgtatttggttaatataattaatgtctagaaaaagctccacccccctgccccagtcagcttctaaactggagtgtaagctccatgacggcaggaattttctcttcactctatccctaggccttaaagtaagacagtgcccaacacatggcagttgcttgacacatttttattaaacctgtgctttggtccttttcccccaattcttgaagcttcccttctttcctaggctccctcgacattgcatggatcaggaagtactgtaaaagagcatactcttacttttgatgtgttgacctgagagtcctccccatctgtcttgcctactgacagcacccctgcccacacccaaaataaaacaacatcatcaaaaataagagtctgtcttgggatacataaggcttgtatcaagagcaaggatctgctcagggtatgttgagaaattactgctaaaattgaataaggatgatctttttaaattttctgggagaaaacagtcaagttctccccactttaagtttttcctcttaaaattttcataaggccaggtgcagtgactcatgcctataatcccaacactttgggaggccgaggcagaaggatcacttgaagccaggagttcaagacaagcctggtcaacgtagcaagaccccatctctattaaaaaaagaaaaaaaaagatttaaaaagttattttaaaaaataaattaaaaattttttttcttaaatcttggatgcttgctataatttatcttatgaaattaataaacatagtgcttcgaagatatcaaaaccaccttggaaacaactgatcatacttagttttattattttttgatacatagttcgaggttgtgatttttatatagcatacatatggtaaccgtatttgttatttattaccttgttttttcttgtttatgtaattaaatatatcaatattttattatgtattgcaataaaaagcactgtgactcccaggcatattgttaattgaacaagtgagttgtggacttagatgattttcagttccatttacaaggagtatttgatttggcattttccctgtcttacacagaatgggaactgctccaaccgcatagatgtgcatgtgcttgagcgtggtgcccggtgtgtatgaggcatcccctgagtaacagatgcatgctgagagagtaataattttttttttttttttttagtttatcagccataggttggaggcaacagctggaaatggctcttccccttcaaggttgtagggaacgtgggcttgcctgtgacaggcccaagagagataggaagaagtaacatcattgtccattctgtctgcctttgttacagatgagactgatcgtggggttgaccaacaagatggaaagaaccacgcaggatcccctgggtgcgaggagagtgatgccggtaaagaaaagttgccgaagatgagactgcccacgcgctcagacatgatatgcggctatgcctgcctcaaaggtactttgagttccaaaagagttgagtcatacctcattttgttgcactttgctttattgtgctttgcaggtacaggttgagtatcccttatctgaagtgttggaaccagaagtgtttcagattttggatttttttgtttttttggattttggaatatttgcgttatacttactagttgagtatcccgtatccaaatattctaaatttaaaacactcccatgagcaccttctttgagcatcatattggcacttggaaagtttcagattttgaagcatttcagattttttggatttgggatgctcagctgctttttacaaattgaaggtttgtggcaatcctttgagcatctgtcagcaccatttttctattggcatgcctctgttagcatttttcagcaataaagtatgttttaattacagcatatgcatgttttagacataatgttgttgcacacttaatagactgtaggatagtaaccataacttccgtatacactgggagacctgaaaatttgtatgacttgctttattgccatattcactttcttaagctggtctggaaacagacctacggtatctccaaagtatgccaataatccaaaagagtaccctcctagacttagattcttcatgctgggttctctgactagggagggtgcaggtgtcatggccgagtctagtttgggaagtgcagctgtgtgatggcattcacactgtgattaatgcccttttggttgcagggactgccgccatgcggaacaccaaacgaggttcctggtacatcgaggctcttgctcaagtgttttctgagcgggcttgtgatatgcacgtggccgacatgctggttaaggtgagccagcgggctccgtgacccctgtgtgtctccacagtgctctactttcctcctctcttgaatgctctttcatagtccgtctccccttcccgtttgctgctctcctgaagcccgagattctcagacttgggcctattggttctgcccctccaggtgaacgcacttatcaaggatcgggaaggttatgctcctggcacagaattccaccggtgcaaggagatgtctgaatactgcagcactctgtgccgccacctctacctgttcccaggacaccctcccacatgatgtcacctccccatcatccacgccaagtggaagccactggaccacaggaggtgtgatagagcctttgatcttcaggatgcacggtttctgttctgccccctcagggatgtgggaatctcccagacttgtttcctgtgcccatcatctctgcctttgagtgtgggactccaggccagctccttttctgtgaagccctttgcctgtagagccagccttggttggacctattgccaggaatgtttcagctgcagttgaagagcctgacaagtgaagttgtaaacacagtgtggttatggggagagggcatataaattccccatatttgtgttcagttccagcttttgtagatggcactttagtgattgcttttattacattagttaagatgtctgagagaccatctcctatcttttatttcattcatatcctccgccctttttgtcctagagtgagagtttggaaggtgtccaaatttaatgtagacattatcttttggctctgaagaagcaaacatgactagagacgcaccttgctgcagtgtccagaagcggcctgtgcgttcccttcagtactgcagcgccacccagtggaaggacactcttggctcgtttgggctcaaggcaccgcagcctgtcagccaacattgccttgcatttgtaccttattgatctttgcccatggaagtctcaaagatctttcgttggttgtttctctgagctttgttactgaaatgagcctcgtggggagcatcagagaaggccaggaagaatggtgtgtttccctagactctgtaaccacctctctgtctttttccttcctgagaaacgtccatctctctcccttactattcccactttcattcaatcaacctgcacttcatatctagatttctagaaaagcttcctagcttatctccctgcttcatatctctcccttctttaccttcatttcatcctgttggctgctgccaccaaatctgtctagaatcctgctttacaggatcatgtaaatgctcaaagatgtaatgtagttctttgttcctgctttctctttcagtattaaactctcctttgatattatgtggcttttatttcagtgccatacatgttattgttttcaacctagaaacctttatccctgcttatctgaaacttcccaacttccctgttctttaagactttttttttttttttttttttttttgagacagagtctcgctctgtcgcccaggctggagggcagtggcacgatctcagctcactgcaagctccaactcccgggttcacgccattctcctgcctcagccttccaagtagctgggactacaggtgcccgccaccgtgcccggctaatttttttgtatttttagtagagacagggtttcaccatgttagccgggatggtcttgatctcctgacctcatgatccacccacctcagcctcccaaagtgttgggattacaggcgtgagccactgcgcccgggcaagacctttttttaaaaaaaaaaaaaaaaaaacttccattctttcttcctccagtctgttctcacataacagagtagttttggtttttaattttttttggttgtttgctgttttttgttttttaaggtgagttctcactatgtttctcagactggtctcgaactcctggcctcaagccatcttcccgcctcagcctctcaaatagctgggcttacaggcatgagccaccacacctggccaggatttggttgtttaaatataaatctgatcacccccctgcttagaacccttctgctttctattacccctcatttaaaatgtaaactcttcaccttggtttatgagaactggttcttgccttccccttgaacctcattaaatggtgatttcttgctaagctccagcccgagtggtctcctctcagcttctaattttgtgctctttcctgcccttttcctg

SEQ ID NO: 1277 - DNA, 6000 bp, Homo sapiens
cctttctcccctactcatcccattggagagaccaaccaaagcccacgtggctctcaatttttcttgtcctcaccccttgtccatcctgtcctttcactccctctagggccagggagctccctgaaatgtcccagttcctctgcagtcccattgccaaagtgggctgcagttctgttagccccctcccccccaccaacacacacacgtttcctaaaacctacaagaggtgacatttgcagaggccgcagccaataaatctgccagagatgttgcagggtatctgctacccccagatatcctagggcatcagtgacacacatcgtccttcttacgcacacttccacttccctggccaagctggatcttttcccagcatgaagctgtccactgtttgattacccacacaactcagccccagaaccaacccagtcactattcccgagttccttgtaccttccaaagcacctggtgcaagctaatcaacacacagggtctcctaagctcctgaggaacctgtgtttctatctccctgcataagcttaaggatatcttgtgccctctctgggtttcatctgcgaaatatagtggttgaacataaaacctagttctgatgttgtataattctaaaagtaacatccaacatctcttttaggtgcttaattagaattgacagcaggaagtagcaccaggtatacctcccaagagagacactaagagcaaagagctcctcaaatgtgttgccccagcaactagcacacacgtgttatagcactgttgggctgttcacacgtctagctcttctactagtatatggagccacatgagggcaggaagagggtctgattcaccattttattcccagtatcttgcacaatgcctgggatatagtgtgtgtgtgtgtgtgtgtgtgtgtgtgtgtgtgtgtgtgtgtaattttttttgagacggagtctcactctgtcacccaggctggagtgcagtgactcgatctcagctcactgcaacctccacctcccgcattcaaatgattctcctgcctcagcctcccgagtagctgggattacaggcgcccgccaccacgcccagctaatttttgtatttttttttgtagagacagggttttaccatgttggccaggctggtctcgaactcagtgatccgcctgccttggctcccaaagtgccaggattacaggcgtgagccactgcgcctggccatagtacatcttttaaaaaatatgttagtagaataaatgaatgaacaggagggatggaactagaggtaggttagttctgtatggtatcaatctagactgacattcctaaggcaatatttgggccacttgctcccacagtaggcaagaaccatgggaagactaggatagattattttaaatcaagactggcctgtaaaaaccaggatgtgagatctctgtggctacaggagcccagagggaaaaatccagatatccacaggcctgggattcaatgccatccacacagtaacacaccaaagacccgactcctgagaccaggtttgggtggaggtgagcgaatagctactgtgtgacatgtaccttagtttttacactttttaataaaacatctaatttcttccttatgattgacttacgaggtgtgttttagagaggaagaaattaatgttcagagagattcaataacccacccaaggtcatatagctgagaagcacaagataagggatcaggatttctgccaggttccaaggtctatgcttcttccacagccctgaaggggctgtggagtcccgaaggtggaggaggggaccaaggaaaggggcagccctgaggatgggtatccctagccagcctggtggggcagcccatggatattgggctctgggctgaagaattaattttggtggccaaagtgccttctggcgtccactgtgacataacagtaggggccacctgagttcctcagagccttccacactgcatcacgaacacgggtactctgacgtgctccagctgacgtcggtgtctggtgtgatagatgccctggctgttggcaggggagggggcggacgctgctgccgcccaaacctctagggggtagcacaacccccaaaaccgcccccgccagccccttcgcgatctgcaggcgcagagaaccgcgggtggagccccacacgtgggtccgcagggcggagggcggggacagcgcggcgccggactacaagttccacaatgccccgggccgcggcggcggggaaggaggggtgcttcaggtgcctgcgacctccgcgcctcccgcccggaagtgcccgaggggccgcgatggagctgggggagccgggcggtgagtccccgcgccgtgaccgcgcccaccccgccgcccagggccccggtcgggccgggatcgccgtgccctcctgcggcttcggggggcgggaaggtgggaggggtgatgagaggtgggggtggggaacgtgaagtctcggattccgggcgggatctggggtcaggcagcccggggggcttggagagacttccagaggaggcgcggagttagtcctccgcggagtggggttgaggggacctggagggggccgagctgggtgggtggtgacgctcggtggctccagattgcccaggggcggagtttgacgtttgctgtgggggaagcctgggaagcagtcctgtgccgcgggtggggtttaggtgaaccgtaacgcggggggcgggggtgggggcacagaggctctacccccacctcttagaaactttagcagcggagtagatgagcctggggtgaagtcggtgaaggagtagacacactggggtgaagtgggcaggagaatagatacgcttgggggtgaagtttggttggggtgaagtttaggagaggcgttgcttaggcccttaccttgggatagggtttgggtgagttgggagctggttgaagacctcgagctcagatgacagaaagttaggacttgggattcggcgatgggaaggggcacccggaggcaagtttggggcgactgggaggcagagaagccggtaccctggggtgggtgaggggacggaggctgaggacggtgggagcgtcgcggtggggtgagggcaggaccctgtggaggttccagggctcctggccagggggcccgggcctcacgggctctttgtgcctctccagctcggtagcgcggcgggcaaggcaggcgccatgaccctgattgaaggggtgggtgatgaggtgaccgtccttttctcggtgcttgcctgccttctggtgctggcccttgcctgggtctcaacgcacaccgctgagggcggggacccactgccccagccgtcagggaccccaacgccatcccagcccagcgcagccatggcagctaccgacagcatgagaggggaggccccaggggcagagacccccagcctgagacacagaggtcaagctgcacagccagagcccagcacggggttcacagcaacaccgccagccccggactccccgcaggagcccctcgtgctacggctgaaattcctcaatgattcagagcaggtggccagggcctggccccacgacaccattggctccttgaaaaggtaagtaggtcaagaggcaggagcaatgctaaagacaggggttgggagagtggtcgcagaaggcccccagagacacctaagacccagccctcctttatactggaggcgctgagcgccccagatcacaactgtacttgttcccctggcagacggcccctcccaggccagggccggtgtgttgtggagggcagggggagggtgggagtgctgttccggggccagggactaggattgcctgaggcctgctctcttacccaggtccctctctcctcaggacccagtttcccggccgggaacagcaggtgcgactcatctaccaagggcagctgctaggcgacgacacccagaccctgggcagccttcacctccctcccaactgcgttctccactgccacgtgtccacgagagtcggtcccccaaatcccccctgcccgccggggtccgagcccggcccctccgggctggaaatcggcagcctgctgctgcccctgctgctcctgctgttgctgctgctctggtactgccagatccagtaccggcccttctttcccctgaccgccactctgggcctggccggcttcaccctgctcctcagtctcctggcctttgccatgtaccgcccgtagtgcctccgcgggcgcttggcagcgtcgccggcccctccggaccttgctccccgcgccgcggcgggagctgctgcctgcccaggcccgcctctccggcctgcctcttcccgccgccctggagcccagccctgcgccgcagaggactcccgggactggcggaggccccgccctgcgaccgccggggctcggggccacctcccggggctgctgaccctcagcccgcactgggagtgggctcctcggggtcgggcatctgctgtcgctgcctcggccccgggcagagccgggccgccccgggggcccgtcttagtgttctgccggaggacccagccgcctccaatccctgacagctccttgggctgagttggggacgccaggtcggtgggaggctggtgaaggggagcggggaggggcagaggagttccccggaacccgtgcagattaaagtaactgtgaagttttcactcttgcagtgtgtctgagtgtgtgcgggctggcgggcggggagtcctcgccccttgggagagaagggcacggactgcgcctggggtctggccctccgccttcccttctccccagcgttctgctctggctttggcgccggcctccgtggccccgccctcggcgccgggcgcgcacttcccgcgggcggggctcgcggctccctggctcgcagtgcctgccgggagccacgtctccgaagaccgatagctgcttcgggattggcgtccgggcggctatctaggggctgctgggaagatggcggactcggtggctagccgatgaggaggccgcggggggaacccggcccccgggccccgagaccgactgagggagcgacctgcgcagggcccggggagtcatgtaggggtggcgcctgcggggagggctgcgggagggcagcgggagctggtgttagcggcagcggccacggtctcctggcgtccctgggccggggtgggtgttggggcccccgacttcgccgactccgcgccatcgcaaagcggtgcactcgggctccacgcgcgccctgcgaggtgggcgctgcgttttcatttcacgggtgaggagacttagagagacgaagccacttgtccaaggtcacgccgctggtgagtgggagcgcccagcatggaacccagcaccgtccagccgcggagcccgcgttccaccctctgtgccgccgccgcctcctgtgggagagggaggtggtcgggagagtgcacgccggtgccgcctgggctccagactgggcgcgaccactaacccggttaatgacctcgggcttaacttaaccccttcgctgctctgggcctgcgtttctccaccggtgaaatgaggtaatgccagccctgcctactcttcatgggcgtgtaaggagcatcagagatggtgcatgtggaattgctttgcaagtagtgctgcgctgagcgcactgaggattatgattgctgtttcaaaggcgtggaaggaggcagaggggcggggtggggaagaggcccagagcagtcacaaaggcttgctctgaccacaggccccctaaatgaggagtgaggtaagcagtaggtagcaggtctttctcccctttggagaaaacctcacccccttttttgggctgcccctcagggtctccatcacccaactccatgcttcgagtcctgctctctgctcagacctcccctgctcggctgtctggcctgctgctgatccctccagtacagccctgctgtttggggcccagcaaatggggggaccggcctgttggaggaggcccc

SEQ ID NO: 1278 - DNA, 6000 bp, Homo sapiens
ggggctgtggaagccatctctgaccggatctgcatccacaccaatgcgcacgtcagcgtggaggtgtcggcggaggacctgctcacatgctgtggcagcatgtgtggggacgggtgagtcaggctgtgcttccacagcgggtttagtgctgagagaccctgggccccagcttctcagtggaggggactttgaggacttcctgggactgctgcgagtcagaagtgtttcggggagactccgagagtctggcaggcagggcctggcaaggctgctgcttcctgggaggtgcctgaaccaaggctggcccggcagagctgtctgaggggtggcatcccagcaaaacagtcagtttcagaaaatgtggtggaatgtctggcccctggtctggtttgtgtcatcgcatgttcctttttcctgcttggggaaccagtttggggcatttccttatgtgtagttagcggggatggctccaccttaacaacaaggtggtggcacagaactttctgctccagctgcctgcagcctcgccttggttccgcagtagcggtgttcactggcggctgcagatccgaaatgcctgagggcttaaaaaaatgcatgggcttctcccctaactagttaaatgggaatcactggcgattctcatttcagagaactggtggtgtttttaagtaccttagggaagtttagcgtctgctcagttgagaatcagtgttctacccggaagggcactcgtagcctggtctggtatggacatgaacaggagagcctcctgtcttctcccggatctttgtgggcaggggtggggctggcggttattccctgcaagctgtgcttatctagggagcgtcccttggagggtttggggtctgggaggtctgctcgcaccacttgctgcagctgggggtgggtccacgagtggcctcgggcacttgggtagcacacagtggtctggagagctggtggtgcttctctcagaggttttcattagaggctgtcttttcagctgtaatggtggctatcctgctgaagcttggaacttctggacaagaaaaggcctggtttctggtggcctctatgaatcccatgtaggtaagtgtgtccccttggccactttctggccagatggattgtttgagcaattaaccatcatggctttatttgcctttataaactgggggttgagacagaggggctgctgagaggtgctagccaggtgcacaggcctctggcaggacctgcctggcgtccatgctgcaggcacgaggcttgccttgccccaggtcttctccgtgggggctgtaggttgactccgctttctcccgcgtcccatcagggtgcagaccgtactccatccctccctgtgagcaccacgtcaacggctcccggcccccatgcacgggggagggagatacccccaagtgtagcaagatctgtgagcctggctacagcccgacctacaaacaggacaagcactacggtaaggggcctggggcctggccacggcgcacgtggaggctggggagctgctgcatccctcctcacgctgcagcgaagaggtcagggctgaggagccttggggtcccggaactctaggatagaggagggggagtgatgccctcttgccaggagaagcagcacactctccactttctgcctgttccaccctgaactcagcctcagcccttccaaactggaagggaccaaagccctccttttacaagggagtggcgtgtcctggagtcttgaggtatcctggcctcttccggggcctcgtgctcattgctccgttctcccatttctgagcttccagccccagccctgtccttagttcttcaggggagccttccttgagctcccctggcagggcaagtccccttagatgcagtcttcccctggaggccaccagaaatcagtgactggctgaccgtggcgtgccacgaggcacggtcactgccctccccaaccccgagctcggttcattttccaggatacaattcctacagcgtctccaatagcgagaaggacatcatggccgagatctacaaaaacggccccgtggagggagctttctctgtgtattcggacttcctgctctacaagtcaggtgcgtgctgatggctgatggcaatagagggtgggggtcgggaggggagcctgggtgccaggatggttcatgttgaccaatagggctggattgggcaggcaggtgaggggctggggaagagggctgtgtggggccttccatataggctcactcctctgtggaccagcctggcacctgactgtctttgtccaggtgttgtgccaacacacacaattccagaggcctctcccagagcctctgggctagttccttcccatccattagcgtccagctcatacatgttctctgtgggaacgcccccctccctggtggctggccacgcctgccctcgccttcctggctttgcattgctttaccagcatgtttctgttataatggcaggccgttcgtgtttgcactggctgacacattttcttcatctttctctttgcaaaggcctagatcgtgcctcacaccagtggatgaacacacagggaggaccttgccctgggtagtgccatagggactccaaccaaggaatctggacagtccccatccccaagtcctgtcttagaaatcccttgctccagatgaacagtctttgctgactgcatctatcccattaatattttgctagattggaaacttgtaaaacaacagtttgacaaaggaagatgattctggcaagaaaaagtttctgtgaagatggcacttcttagcatagtcctcgcccttattattaaaagatgcatttccactttgacagtgatttccccacccgagagcctggttgggcagccctgagccccttagccagtatctttcccatcagctagcattagctgccaccagtcctcccttctcctccctcacctcttcagggtgtacctggagcagctattaaaactctttaagccgtgtaacgcttttgacaaacccttacttacatggaatcccagtataaagaacagatgaatcagtcatctagcattaaatgttttatcaattagaatgtattagaaattctatttttaaagccaacaagcacattttgtaggaatctatttcaatatttactcaacaactttgagtgtgttgggccttcaaaaatatatttaattccccagtattgtgggaccccccctggagcctcctggtggagcagcaggttccctctggaagctgtttctccttcccggagcatgaccagctgagtgtggggggtgctgtggggcgtgggacagtggcccggtctcggtctcagccagttcttcccttttcaggagtgtaccaacacgtcaccggagagatgatgggtggccatgccatccgcatcctgggctggggagtggagaatggcacaccctactggctggttgccaactcctggaacactgactggggtgacaatggtgagtggctgcccccttcctgccaagaacagtgaattgtgagccacaccccgtggccatctcggctttctctgttctacccaccgcacagccttaaaccctggacctacggccaggctgtgagctcctcctaagtgccaggcagtcaggagttcccttttgctgtgagggcagactctgagcagcttcagagccaacgcctgcaacagttcccacagcatcgcgccagatcctgtgatgggaagggtgaccgggcagggggcttgcccgtggaggtgtgccccacggctccagaagccttgtggtgttgaggactgtgctagtgggccaacagcaggagtggccagggatgagtgacttaaggtcttttaaggatgagtctgactatattggttgacccttgtcacactttaaaagcaccttactttttattcccaggcttctttaaaatactcagaggacaggatcactgtggaatcgaatcagaagtggtggctggaattccacgcaccgatcagtactgggaaaagatctaatctgccgtgggcctgtcgtgccagtcctgggggcgagatcggggtagaaatgcattttattctttaagttcacgtaagatacaagtttcagacagggtctgaaggactggattggccaaacatcagacctgtcttccaaggagaccaagtcctggctacatcccagcctgtggttacagtgcagacaggccatgtgagccaccgctgccagcacagagcgtccttccccctgtagactagtgccgtagggagtacctgctgccccagctgactgtggccccctccgtgatccatccatctccagggagcaagacagagacgcaggaatggaaagcggagttcctaacaggatgaaagttcccccatcagttcccccagtacctccaagcaagtagctttccacatttgtcacagaaatcagaggagagacggtgttgggagccctttggagaacgccagtctcccaggccccctgcatctatcgagtttgcaatgtcacaacctctctgatcttgtgctcagcatgattctttaatagaagttttattttttcgtgcactctgctaatcatgtgggtgagccagtggaacagcgggagacctgtgctagttttacagattgcctccttatgacgcggctcaaaaggaaaccaagtggtcaggagttgtttctgacccactgatctctactaccacaaggaaaatagtttaggagaaaccagcttttactgtttttgaaaaattacagcttcaccctgtcaagttaacaaggaatgcctgtgccaataaaagttttctccaacttgaagtctactctgatgggatctcagatcctttgtcactgcctatagacttgtagctgctgtctctctttgtccctgcagagaatcacgtcctggaactgcatgttcttgcgactcttgggacttcatcttaacttctcgctgccccagccatgttttcaaccatggcatccctcccccaattagttccctgtcatcctcgtcaaccttctctgtaagtgcctggtaagcttgcccttgcttaagaactcaaaacatagctgtgctctatttttttgttgttgttgtgactgacagagtgagattccgtctcccaggctggagtgcagtggcgccttctcagctcactgcaacctgcagcctcctagattcaagcgattctcctgcttcagccttccgagtagctgggatgacaggcactcaccaatatgcctgggtaatttttgtatttttaagtacatacaggatttcaccatgttggccaggctagtttcaaactcccggcctcaggtggtctgcctgcctcagcctcccaaagtgttgggattacaggcgtgagccactgggccctgcctgtattttttatcagccacaaatccagcaacaagctgaggattcagctcataaaacaggcttggtgtcttggtgatctcacataaccaagatgctaccccgtggggaaccacatccccctggatgccctccagccttggtttgggctggagtcagggcctgtatacagtattttgaatttgtatgccactggtttgcattgctggtcaggaactctagtgctttgcatagccctggtttagaaacatgttatagcagttcttggtatagagcaaactagaagaaccagcaatcattccactgtcctgccaaggtacacctcagtactccccttcccaactgaagtggtatgaggctagctctttccaaaagcattcaagtttggcttctgatgtgactcagaatttaggaaccagatgctagatcaaataagctctgaaaatctgaggaacattgtaggaaaggtttgttaagcatctcttaagtgccatgatgagcataacagccggccgtcgtggctcacgcctgtaatcccagcactttgggaggccaaggtgggaggatgacaaggtcaggagttcaagaccagcc

SEQ ID NO: 1279 - DNA, 6000 bp, Homo sapiens
agcggatcacctgaggtcaggagttcgagaccagtctgaccaacatgatgaaaccccgtctctactaaaaataaaaaactttgccaggcgtggtggcgggcgcctgtaatcccagctactcgggaggctgaggctagagaatcgcatgaacccgggaggcagaggttgcggtgagctgagatgatgccacttcccacgtgaggatggggtagttaagttgcacgacactgccttctgcacaatggggatgatatgagaaatgatgagaggatcctgggcagaggttgaggcaggagagcagggcaagaaacactatctggactgaataaacttatttaaaaatgagtttataatttgtggataaattcatcttaaaaaatccattacataagcctagaaagaagcgtacaatatcgcaagtcaggccaggtgtggtggatcatgcctgtaatcccagcactttgggaggccaaggcaggcagatcatttgaagccaggagtttaagaccagcctggccaacatggtgaaaccctgtctttactaaaaatacaaaaattagccgggtgtggtggtgcatgcctgtaatcccagctactcaggaggctgaggcacgagaatcgattgaactcaggaggcagaggttgcagtgggcagagatctcgccactgcactccagcctggatgacacagtgaaattctgtccactcccaccctcccgtcccacccaaaaaaaaaatcaaaaggtgcattgagcaacagaatttccttttgttttatgaaattaccaaggacacctgtctgcagccttcttcggcatgtcttgtgctcatttccttgttaggggagtgtggcccagccaaagtggcctttgcagggattggggagggagttgtgggatcagagcttgtaatgaagaccttcctttatccagagttatgtttaccgaggacctgaagctgcctgcaagcttcgatgcacgggaacaatggccacagtgtcccaccatcaaagagatcagagaccagggctcctgtggctcctgctgggtaaggccctgctggctggcggggaagcgctggagagaaagtgggagcaacactggagagtcttgggggattcggggtggggacaactctgacaaggcaagttatagaaactttctgagtcccagtttccatcagtacaaaaatcacaatccctctggccatgaatgatggcgaggattaggtggagtggcgggcagagcatccagcagattgcaagtccacgtgtacaggtggcgaagcagctccctttccctgacatgctggcccgtccgcaaataccaggagctctcactgctactctgcttcaagaaagcatccctttagtgtcagtgagctgtcttaattttgtcatttaattgtggtaaaatacacgtaacagaaatgtaataatcttagcaatcttcttttgttttctttttctttcttttttttttttttttttttttggagatggagtcttgctctgtcacccaggctggagtgcagtggtgggatattggctcactgcaacctctgcctcctgggttcaagcaattctcctgcctcagtctccccagtagctaagactacaggcatgtgccaccacgcccagctaatttttgtatttttagtagagatggggttttgccatgttggacagcctggtctcaaacgcctcacctgttgatctgccttcctcggcctcgcaaaatgctgggattacaggcgtgagccaccgtgcccagcaactattttcaagtgtacagttctgtagcattaagtacattcacagtgttgctcagccaccaccaccatctgtcccccgaactctttttcagctcgcaagacagaaactctgtccccattaacaccaatattgtagcccctggtaagccccactctactttctgtctctatgaatttgactcctagggacctcatacaagtggatcacaacagtatttattttctgggtgagctgtgttttttgttaagaaaaaaacacagccaggtacggtagctcacgcctgtaatctcaacactttgggaggctgaggcaggcggatcacctgaggtcaggagtttgagaccaacctggccaacatggtgaaaccctgtctctactaaaaagacaaaacttagctgggcctggtggcaggcacctataatcccagctactatagaggctgaggcaggagaattgcttgaacccaggaggcgtaggttgcagtgagctgagattgcgccactgcattccagcctgggcaacaaaagtgaaactccgcctccaggaaaaaaaaaaaaaaccacacacacacatacaaactaatactacacattttgcagatttcagaaatgaacccagtttccaggcagaggttcacgggggtgcttctcttgctttaaaagctgagttgggcaaatcgttgaggcaggagagtggggcaagtggctcatcacgcctctaatcccagcactttgggaggccaaggtgggcaaatcacttgaacccgggagttcaagaccagtctggccaacgtagcaagaccccatttctaccaaagaaaataaaagctgagtttgagccccaggagcgtcccctggtgttgagagatcagttgcctacaaggtctgaggtgcccctgtggccctttgaggggactgctgcagagggcccagcccggacatggcagcctcacccggtggggctcgttcctgcaggccttcggggctgtggaagccatctctgaccggatctgcatccacaccaatgcgcacgtcagcgtggaggtgtcggcggaggacctgctcacatgctgtggcagcatgtgtggggacgggtgagtcaggctgtgcttccacagcgggtttagtgctgagagaccctgggccccagcttctcagtggaggggactttgaggacttcctgggactgctgcgagtcagaagtgtttcggggagactccgagagtctggcaggcagggcctggcaaggctgctgcttcctgggaggtgcctgaaccaaggctggcccggcagagctgtctgaggggtggcatcccagcaaaacagtcagtttcagaaaatgtggtggaatgtctggcccctggtctggtttgtgtcatcgcatgttcctttttcctgcttggggaaccagtttggggcatttccttatgtgtagttagcggggatggctccaccttaacaacaaggtggtggcacagaactttctgctccagctgcctgcagcctcgccttggttccgcagtagcggtgttcactggcggctgcagatccgaaatgcctgagggcttaaaaaaatgcatgggcttctcccctaactagttaaatgggaatcactggcgattctcatttcagagaactggtggtgtttttaagtaccttagggaagtttagcgtctgctcagttgagaatcagtgttctacccggaagggcactcgtagcctggtctggtatggacatgaacaggagagcctcctgtcttctcccggatctttgtgggcaggggtggggctggcggttattccctgcaagctgtgcttatctagggagcgtcccttggagggtttggggtctgggaggtctgctcgcaccacttgctgcagctgggggtgggtccacgagtggcctcgggcacttgggtagcacacagtggtctggagagctggtggtgcttctctcagaggttttcattagaggctgtcttttcagctgtaatggtggctatcctgctgaagcttggaacttctggacaagaaaaggcctggtttctggtggcctctatgaatcccatgtaggtaagtgtgtccccttggccactttctggccagatggattgtttgagcaattaaccatcatggctttatttgcctttataaactgggggttgagacagaggggctgctgagaggtgctagccaggtgcacaggcctctggcaggacctgcctggcgtccatgctgcaggcacgaggcttgccttgccccaggtcttctccgtgggggctgtaggttgactccgctttctcccgcgtcccatcagggtgcagaccgtactccatccctccctgtgagcaccacgtcaacggctcccggcccccatgcacgggggagggagatacccccaagtgtagcaagatctgtgagcctggctacagcccgacctacaaacaggacaagcactacggtaaggggcctggggcctggccacggcgcacgtggaggctggggagctgctgcatccctcctcacgctgcagcgaagaggtcagggctgaggagccttggggtcccggaactctaggatagaggagggggagtgatgccctcttgccaggagaagcagcacactctccactttctgcctgttccaccctgaactcagcctcagcccttccaaactggaagggaccaaagccctccttttacaagggagtggcgtgtcctggagtcttgaggtatcctggcctcttccggggcctcgtgctcattgctccgttctcccatttctgagcttccagccccagccctgtccttagttcttcaggggagccttccttgagctcccctggcagggcaagtccccttagatgcagtcttcccctggaggccaccagaaatcagtgactggctgaccgtggcgtgccacgaggcacggtcactgccctccccaaccccgagctcggttcattttccaggatacaattcctacagcgtctccaatagcgagaaggacatcatggccgagatctacaaaaacggccccgtggagggagctttctctgtgtattcggacttcctgctctacaagtcaggtgcgtgctgatggctgatggcaatagagggtgggggtcgggaggggagcctgggtgccaggatggttcatgttgaccaatagggctggattgggcaggcaggtgaggggctggggaagagggctgtgtggggccttccatataggctcactcctctgtggaccagcctggcacctgactgtctttgtccaggtgttgtgccaacacacacaattccagaggcctctcccagagcctctgggctagttccttcccatccattagcgtccagctcatacatgttctctgtgggaacgcccccctccctggtggctggccacgcctgccctcgccttcctggctttgcattgctttaccagcatgtttctgttataatggcaggccgttcgtgtttgcactggctgacacattttcttcatctttctctttgcaaaggcctagatcgtgcctcacaccagtggatgaacacacagggaggaccttgccctgggtagtgccatagggactccaaccaaggaatctggacagtccccatccccaagtcctgtcttagaaatcccttgctccagatgaacagtctttgctgactgcatctatcccattaatattttgctagattggaaacttgtaaaacaacagtttgacaaaggaagatgattctggcaagaaaaagtttctgtgaagatggcacttcttagcatagtcctcgcccttattattaaaagatgcatttccactttgacagtgatttccccacccgagagcctggttgggcagccctgagccccttagccagtatctttcccatcagctagcattagctgccaccagtcctcccttctcctccctcacctcttcagggtgtacctggagcagctattaaaactctttaagccgtgtaacgcttttgacaaacccttacttacatggaatcccagtataaagaacagatgaatcagtcatctagcattaaatgttttatcaattagaatgtattagaaattctatttttaaagccaacaagcacattttgtaggaatctatttcaatatttactcaacaactttgagtgtgttgggccttcaaaaatatatttaattccccagtattgtgggaccccccctggagcctcctggtgg

SEQ ID NO: 1280 - DNA, 6000 bp, Homo sapiens
gaagcctcatctccgcagccggaagcagagcccttggctgactggaaaaaccagagaggccccgggagtgggtggatggccagcccagccccacctctcagcctcaacctccaccagcccacaccgagcttgtttgtctgtgtcctgtcgaaactaggactcctggattgtaacttttcttacatttccctgtcccctgggtcctccacttagggtgtaatcacacagacaggctcttaactgtttcatatcactcacttgggaaagtgtctcaagctgttctacaaatccatgcaaaggccgtttaaaaatagcagcgaaggccctggactcggtctcgtccagcacagccccttggctctctctctgggctctggccgcctggcccccggggacccacacgaggtcatggcgtgcttcgggcaggggggcggggatcccatagacacctcagctccttaagagttctccgcctgggccaggacgagcatgggggtccccactgatgcccgagacggtgcccctgtgtgtgtgagccctcgacccacataacagagaggtgtcctgatgccctctgtcctctccaggtggatctaggatccggcttccaacatgtggcagctctgggcctccctctgctgcctgctggtgttggccaatgcccggagcaggccctctttccatcccctgtcggatgagctggtcaactatgtcaacaaacggaataccacgtggcaggtaggctgtggggctgcgtcctatgtatgtcccctcccaggtcggtctgtgcacactgactccaggaatgggaagccagccctcactgtggcccacagaacattgtcctggactgttgaaaaatggccctgaccctgagtcatgtcggctctggaccacgcctccctcctttgtcccataccccacgtgtgtgcatgagtgtgtgtgcatgtgtatgaatatatggttgtgtgcacgtggaggtgtgtgggggagtaagtgagcttcggaagtgttcaaaaccagctagcccctgtgacgcccgccgtggcacagtggcagtttatcagtcccgcccctgattccctttgtctctgcccagccctgaccctcggactgagaaccaagaatgaggagtgagccatgttgagggctggagagggtctctgattgtcagcaaatgggagcagatcaggggagacacccactctgcccgtgtgtcactctgggctgttccccagtgccccccaacccttgggcccttgaattgggtagggtctctggttttccctgggttgggcttcgtgtgtgggcagcgtgcccatccaccgccatcccgggagacccttcagtcagtgggtgactctcttccaggccgggcacaacttctacaacgtggacatgagctacttgaagaggctatgtggtaccttcctgggtgggcccaagccaccccagaggtgagtgcctgctcctctgcaccgctgtaatgtgagtggcaggcgttggtttggggcagtgggaagtgggagagtgaaggcctctctggcgtccgcagggctcatgctgcccagggctgccgacaccgcttgaggtacagtacttgtttcttttcatttttatattactttctctttttattttattttttccttctcaagttattagtagagaagatgctggtgcttttttttggtttttgagagagtctcactctgtcacccaggctggagtgcagtggcacgatcttggctcactgcaaactctgtctcccgggttcaagcgattctcatgccacagcctcctgagtagctggggccacaggcttgcaccaccgtgcacggctaatatttgtatttttagtagagactgggtttcgccatactggccaggctcgtctcgaactcttggcctcagcaagtcatctgcccaactcggcatcccagagtgctgggattaccggcatgagccacccccagtgttttctattgtgcttctccaaggtgtctcagccgcagatgtgacagacaaggtctgggtccccactatgtgggcagactcaatcttgagtaatttaagggaaatctaagaaaagccagatgaggccaagtatggtggctcacgcctgtaatcccagcactttgggatgccaaggcaagcggatcacctgaggtcaggagttcgagaccagtctgaccaacatgatgaaaccccgtctctactaaaaataaaaaactttgccaggcgtggtggcgggcgcctgtaatcccagctactcgggaggctgaggctagagaatcgcatgaacccgggaggcagaggttgcggtgagctgagatgatgccacttcccacgtgaggatggggtagttaagttgcacgacactgccttctgcacaatggggatgatatgagaaatgatgagaggatcctgggcagaggttgaggcaggagagcagggcaagaaacactatctggactgaataaacttatttaaaaatgagtttataatttgtggataaattcatcttaaaaaatccattacataagcctagaaagaagcgtacaatatcgcaagtcaggccaggtgtggtggatcatgcctgtaatcccagcactttgggaggccaaggcaggcagatcatttgaagccaggagtttaagaccagcctggccaacatggtgaaaccctgtctttactaaaaatacaaaaattagccgggtgtggtggtgcatgcctgtaatcccagctactcaggaggctgaggcacgagaatcgattgaactcaggaggcagaggttgcagtgggcagagatctcgccactgcactccagcctggatgacacagtgaaattctgtccactcccaccctcccgtcccacccaaaaaaaaaatcaaaaggtgcattgagcaacagaatttccttttgttttatgaaattaccaaggacacctgtctgcagccttcttcggcatgtcttgtgctcatttccttgttaggggagtgtggcccagccaaagtggcctttgcagggattggggagggagttgtgggatcagagcttgtaatgaagaccttcctttatccagagttatgtttaccgaggacctgaagctgcctgcaagcttcgatgcacgggaacaatggccacagtgtcccaccatcaaagagatcagagaccagggctcctgtggctcctgctgggtaaggccctgctggctggcggggaagcgctggagagaaagtgggagcaacactggagagtcttgggggattcggggtggggacaactctgacaaggcaagttatagaaactttctgagtcccagtttccatcagtacaaaaatcacaatccctctggccatgaatgatggcgaggattaggtggagtggcgggcagagcatccagcagattgcaagtccacgtgtacaggtggcgaagcagctccctttccctgacatgctggcccgtccgcaaataccaggagctctcactgctactctgcttcaagaaagcatccctttagtgtcagtgagctgtcttaattttgtcatttaattgtggtaaaatacacgtaacagaaatgtaataatcttagcaatcttcttttgttttctttttctttcttttttttttttttttttttttggagatggagtcttgctctgtcacccaggctggagtgcagtggtgggatattggctcactgcaacctctgcctcctgggttcaagcaattctcctgcctcagtctccccagtagctaagactacaggcatgtgccaccacgcccagctaatttttgtatttttagtagagatggggttttgccatgttggacagcctggtctcaaacgcctcacctgttgatctgccttcctcggcctcgcaaaatgctgggattacaggcgtgagccaccgtgcccagcaactattttcaagtgtacagttctgtagcattaagtacattcacagtgttgctcagccaccaccaccatctgtcccccgaactctttttcagctcgcaagacagaaactctgtccccattaacaccaatattgtagcccctggtaagccccactctactttctgtctctatgaatttgactcctagggacctcatacaagtggatcacaacagtatttattttctgggtgagctgtgttttttgttaagaaaaaaacacagccaggtacggtagctcacgcctgtaatctcaacactttgggaggctgaggcaggcggatcacctgaggtcaggagtttgagaccaacctggccaacatggtgaaaccctgtctctactaaaaagacaaaacttagctgggcctggtggcaggcacctataatcccagctactatagaggctgaggcaggagaattgcttgaacccaggaggcgtaggttgcagtgagctgagattgcgccactgcattccagcctgggcaacaaaagtgaaactccgcctccaggaaaaaaaaaaaaaaccacacacacacatacaaactaatactacacattttgcagatttcagaaatgaacccagtttccaggcagaggttcacgggggtgcttctcttgctttaaaagctgagttgggcaaatcgttgaggcaggagagtggggcaagtggctcatcacgcctctaatcccagcactttgggaggccaaggtgggcaaatcacttgaacccgggagttcaagaccagtctggccaacgtagcaagaccccatttctaccaaagaaaataaaagctgagtttgagccccaggagcgtcccctggtgttgagagatcagttgcctacaaggtctgaggtgcccctgtggccctttgaggggactgctgcagagggcccagcccggacatggcagcctcacccggtggggctcgttcctgcaggccttcggggctgtggaagccatctctgaccggatctgcatccacaccaatgcgcacgtcagcgtggaggtgtcggcggaggacctgctcacatgctgtggcagcatgtgtggggacgggtgagtcaggctgtgcttccacagcgggtttagtgctgagagaccctgggccccagcttctcagtggaggggactttgaggacttcctgggactgctgcgagtcagaagtgtttcggggagactccgagagtctggcaggcagggcctggcaaggctgctgcttcctgggaggtgcctgaaccaaggctggcccggcagagctgtctgaggggtggcatcccagcaaaacagtcagtttcagaaaatgtggtggaatgtctggcccctggtctggtttgtgtcatcgcatgttcctttttcctgcttggggaaccagtttggggcatttccttatgtgtagttagcggggatggctccaccttaacaacaaggtggtggcacagaactttctgctccagctgcctgcagcctcgccttggttccgcagtagcggtgttcactggcggctgcagatccgaaatgcctgagggcttaaaaaaatgcatgggcttctcccctaactagttaaatgggaatcactggcgattctcatttcagagaactggtggtgtttttaagtaccttagggaagtttagcgtctgctcagttgagaatcagtgttctacccggaagggcactcgtagcctggtctggtatggacatgaacaggagagcctcctgtcttctcccggatctttgtgggcaggggtggggctggcggttattccctgcaagctgtgcttatctagggagcgtcccttggagggtttggggtctgggaggtctgctcgcaccacttgctgcagctgggggtgggtccacgagtggcctcgggcacttgggtagcacacagtggtctggagagctggtggtgcttctctcagaggttttcattagaggctgtcttttcagctgtaatggtggctatcctgctgaagcttggaacttctggacaagaaaaggcctggtttctggtggcctctatgaatcccatgtag

SEQ ID NO: 1281 - DNA, 6000 bp, Homo sapiens
tgccaccacacctgggtaatttttgtatttttagtggagacggggtttcaccatgttggccaggctggtctcaaactcctgacctcaggcgatccacctgcctcagcctcccaaagtgctgagattacaagcttgagccaccatgccggttgaacttatttttatctgtgttggccatttgtagtttttctattatgctggttccatttttctgactttgaagagccttttgtggaaacgaagcctaaagtatatgtgagtactgctttgtttcgtcagtttttgttttaaagagacttttcagtgtaatgcaagcattttcccttgaaggctgtgtttcctgtcaatcctaagctttcctccagcattacctttttaaaaaactttattttctatattgatggggtctcacaatgttgtccaggctggtgttgaacacctggcctcaagtgatccacttgccttggcctcccaaagtactgggattataggcatcagccaccgcacccagcctgtttttcaaagggcattgatttttttcataaaactttttaaattaagatctgtgggcctggtgcggtgcctcacgcctgtcatcgcagcactttgggaggctgagtcaggtggatcacgaggtcaggcgttcgagaccagcctggccaaaatggtgaaaccctgtctttactaaaaatatgaaaattagctgggcatgatggcacatgcctgtaatcccgctgctcgggaagctgaggtaggagaatagcttgaacccaggaggcagaggttgcagtgagccgagatcatgccattgcactccagcctgggggacagagtaagactccgtctcaaaaaaacaaaacaattctgtgttgcatgtggtactttttgtgtgtgaggagtccagtgtgaagattcagacttcaggcagccacttgtacaagcactgtcctgtttcctctctggcctcacctaggtaacgctgattcctccacggaggatgtgcttctgagtggtccgttgggtgctgtgctgatgagcatcacccagcattttacgacacatgtgctgccccagagggctgggctcccgtcagagctcttttccactggctgggtgcggtggctcacacctgtaatcccagcactttgggaggctgaggccagtggatcacctgaggtcaggagttcgagaccagcctggctaacatggtaaaaccccatctctactaaaaatacagaaattaggtgcgtgtggtggcgcacacctgtaatcccagctacttgggaggctaagaacctgggaggtggaggctgcagtgagccaagattgtgccactgtaccccagactgggtgacatggcccacagaccaagaccctgtctcaaaaaaaaaaaaaaagcttttttccagagccatcttgctgtcctcatatatttattctcctagatgaattgttgcttaagcaacaatgaagtttaaattgttcttcagatagaacccctaggtgccaggcagtttgttaagcactgacaccgcagtcctgtgactttcatgacgacctgtgacctgtgggaggtagaacacctcacccacccgtgggagcccctggagtgactgacaggaacccctgcctcacccagctccccgcgccgcggctctccccagccctggatgcaggcgcccaggagacatgtattgcttttgttgagctgctcacttaggagggtgactcagagttcaagctggaaagcactggcttgtgactcatgagccagtgcaagatcaaacggctggggcatcgaggtgagagttttccttctcagaagcctcatctccgcagccggaagcagagcccttggctgactggaaaaaccagagaggccccgggagtgggtggatggccagcccagccccacctctcagcctcaacctccaccagcccacaccgagcttgtttgtctgtgtcctgtcgaaactaggactcctggattgtaacttttcttacatttccctgtcccctgggtcctccacttagggtgtaatcacacagacaggctcttaactgtttcatatcactcacttgggaaagtgtctcaagctgttctacaaatccatgcaaaggccgtttaaaaatagcagcgaaggccctggactcggtctcgtccagcacagccccttggctctctctctgggctctggccgcctggcccccggggacccacacgaggtcatggcgtgcttcgggcaggggggcggggatcccatagacacctcagctccttaagagttctccgcctgggccaggacgagcatgggggtccccactgatgcccgagacggtgcccctgtgtgtgtgagccctcgacccacataacagagaggtgtcctgatgccctctgtcctctccaggtggatctaggatccggcttccaacatgtggcagctctgggcctccctctgctgcctgctggtgttggccaatgcccggagcaggccctctttccatcccctgtcggatgagctggtcaactatgtcaacaaacggaataccacgtggcaggtaggctgtggggctgcgtcctatgtatgtcccctcccaggtcggtctgtgcacactgactccaggaatgggaagccagccctcactgtggcccacagaacattgtcctggactgttgaaaaatggccctgaccctgagtcatgtcggctctggaccacgcctccctcctttgtcccataccccacgtgtgtgcatgagtgtgtgtgcatgtgtatgaatatatggttgtgtgcacgtggaggtgtgtgggggagtaagtgagcttcggaagtgttcaaaaccagctagcccctgtgacgcccgccgtggcacagtggcagtttatcagtcccgcccctgattccctttgtctctgcccagccctgaccctcggactgagaaccaagaatgaggagtgagccatgttgagggctggagagggtctctgattgtcagcaaatgggagcagatcaggggagacacccactctgcccgtgtgtcactctgggctgttccccagtgccccccaacccttgggcccttgaattgggtagggtctctggttttccctgggttgggcttcgtgtgtgggcagcgtgcccatccaccgccatcccgggagacccttcagtcagtgggtgactctcttccaggccgggcacaacttctacaacgtggacatgagctacttgaagaggctatgtggtaccttcctgggtgggcccaagccaccccagaggtgagtgcctgctcctctgcaccgctgtaatgtgagtggcaggcgttggtttggggcagtgggaagtgggagagtgaaggcctctctggcgtccgcagggctcatgctgcccagggctgccgacaccgcttgaggtacagtacttgtttcttttcatttttatattactttctctttttattttattttttccttctcaagttattagtagagaagatgctggtgcttttttttggtttttgagagagtctcactctgtcacccaggctggagtgcagtggcacgatcttggctcactgcaaactctgtctcccgggttcaagcgattctcatgccacagcctcctgagtagctggggccacaggcttgcaccaccgtgcacggctaatatttgtatttttagtagagactgggtttcgccatactggccaggctcgtctcgaactcttggcctcagcaagtcatctgcccaactcggcatcccagagtgctgggattaccggcatgagccacccccagtgttttctattgtgcttctccaaggtgtctcagccgcagatgtgacagacaaggtctgggtccccactatgtgggcagactcaatcttgagtaatttaagggaaatctaagaaaagccagatgaggccaagtatggtggctcacgcctgtaatcccagcactttgggatgccaaggcaagcggatcacctgaggtcaggagttcgagaccagtctgaccaacatgatgaaaccccgtctctactaaaaataaaaaactttgccaggcgtggtggcgggcgcctgtaatcccagctactcgggaggctgaggctagagaatcgcatgaacccgggaggcagaggttgcggtgagctgagatgatgccacttcccacgtgaggatggggtagttaagttgcacgacactgccttctgcacaatggggatgatatgagaaatgatgagaggatcctgggcagaggttgaggcaggagagcagggcaagaaacactatctggactgaataaacttatttaaaaatgagtttataatttgtggataaattcatcttaaaaaatccattacataagcctagaaagaagcgtacaatatcgcaagtcaggccaggtgtggtggatcatgcctgtaatcccagcactttgggaggccaaggcaggcagatcatttgaagccaggagtttaagaccagcctggccaacatggtgaaaccctgtctttactaaaaatacaaaaattagccgggtgtggtggtgcatgcctgtaatcccagctactcaggaggctgaggcacgagaatcgattgaactcaggaggcagaggttgcagtgggcagagatctcgccactgcactccagcctggatgacacagtgaaattctgtccactcccaccctcccgtcccacccaaaaaaaaaatcaaaaggtgcattgagcaacagaatttccttttgttttatgaaattaccaaggacacctgtctgcagccttcttcggcatgtcttgtgctcatttccttgttaggggagtgtggcccagccaaagtggcctttgcagggattggggagggagttgtgggatcagagcttgtaatgaagaccttcctttatccagagttatgtttaccgaggacctgaagctgcctgcaagcttcgatgcacgggaacaatggccacagtgtcccaccatcaaagagatcagagaccagggctcctgtggctcctgctgggtaaggccctgctggctggcggggaagcgctggagagaaagtgggagcaacactggagagtcttgggggattcggggtggggacaactctgacaaggcaagttatagaaactttctgagtcccagtttccatcagtacaaaaatcacaatccctctggccatgaatgatggcgaggattaggtggagtggcgggcagagcatccagcagattgcaagtccacgtgtacaggtggcgaagcagctccctttccctgacatgctggcccgtccgcaaataccaggagctctcactgctactctgcttcaagaaagcatccctttagtgtcagtgagctgtcttaattttgtcatttaattgtggtaaaatacacgtaacagaaatgtaataatcttagcaatcttcttttgttttctttttctttcttttttttttttttttttttttggagatggagtcttgctctgtcacccaggctggagtgcagtggtgggatattggctcactgcaacctctgcctcctgggttcaagcaattctcctgcctcagtctccccagtagctaagactacaggcatgtgccaccacgcccagctaatttttgtatttttagtagagatggggttttgccatgttggacagcctggtctcaaacgcctcacctgttgatctgccttcctcggcctcgcaaaatgctgggattacaggcgtgagccaccgtgcccagcaactattttcaagtgtacagttctgtagcattaagtacattcacagtgttgctcagccaccaccaccatctgtcccccgaactctttttcagctcgcaagacagaaactctgtccccattaacaccaatattgtagcccctggtaagccccactctactttctgtctctatgaatttgactcctagggacctcatacaagtggatcacaacagtatttattttctgggtgagctgtgttttttgttaagaaa

SEQ ID NO: 1282 - DNA, 6000 bp, Homo sapiens
gccactgcactccagcctgggcaacagagtgagatcctgtcttaaaacaaacaaaaaaaacaaacttgttttcatttagactcttcctggcgttggggacctattggaataggtttagtgtgaactgagagctagaagtgttagaggagagagggagggaacagagcccgctggagcgagtgcccttcctaccttatcactgcatgccaggcatgtgccggcgctttggtcctcctcatttcattcttgactgccacctgagacacgatggttactagctccattttataggtggtgaaactgaggcttggggaaggtcagaccccaagggtgccatttagtcagtggcagagccagatccaaatgcaggtctcctgactccaagtgcagggctcattttatcgtccggttgcagcacgctggcggccccttgagccccaacctggataccataggggaggagcagagaagccaggaacaccacagccctgggccaaggtgcggggctgaaagaacttcccagcgctcagcctgggactagtggaatgggctgggccctggggctggcagcggtggccccggggagcctgggaatgagtagggagcacagggaggtgtgggagggcctgggaaccatgaaaaggagggcgggtgcagggaagtcgcctgctagtgaagtggcgagggggccctgtgggactccagggaatggccacggcaggttgtcctccaggagttgagagccactggacatggcagctgcctgtgttctcagccaccacagtaaccaaagaaatcttggttttaaaattcaagttgccatggaaacgctcccatcctcgacttggcttattatttaaaataacatctctacagcacaaagcccccgggtacatccaaggacactgctgtctgcccacgagacatgctaacctcacagtgtggaggctgtgtgggtcactgacatgcatggccacgtgagacgctgcctacccacgagtcacggaaaaggggaagattattaagaaagtcactaggggccaggtccagtggctcatgcctgtaatcctagcactttgggaagctgaggcagttagatcccttgaagccaggagttcaagaccagcctggccaacataacgaaacacggactatactacaaaaattagccaaacgtggtagcacaggcctgtaatcccagctactcaggaggctgaggcacaagaatcacttgaacctgggaggtagaggtttcagtgagccaagattgcgccactgtactccagcatgtgccacagagcgagactcccatctcaaagtcactagggaggaagcctcattggtgggaaggaagaccaaattggaaatgctctgaggaatcattaaaacaaatgtccttttatcagtttggtggctcagggcctttagtaatactgccaactatttttcctagaagaaacaaaactgaaataataggaacatactcacttttttttttttcttaaaagtaagggtatgttgtgaaaaaaagtctccccaccgtagtgaccgactgccgtgcatcttccttggcattttgcatgtagtggcaggagtgttcctacatgtgtagattgctgagagggtcagatgcttatggtcctcagtcacccacagcttgctttttccccacttaacattgggacttggggcatttttactctgttaatacaatagaattcacttcaactagttggttttttacttttattttattattattatttttagatgaagtctcaatctgtcgtccaggctggagtgcagcctctgcctcctgggttcaagtgattctactgcctcagcctcccaagtagctgggattacaggcatgcgccaccacgcctggctaattttttgtatttagtagatacagggtttcaccaccttagtcaggctggtctctaactcctgacctcaggtgatccaaccgcctcggctacaggcatgcgccaccgtgccccaccaactaattgcttttttaatggttgcttcatattctatttaaccacttaccgtaatttaacagttactctgttattggatacttgattcatttccaggacatgcagatttagaaactggtgggcgttgctggttgatgtctcggtggttgtgcccacccaccccaggcactcattatcatgccttccgtttccccacttcctaagccctgcaagaagtgccaaactgtccagcccttgccaatctgatacatgctgaatacctccttgattttatctgcacctccctgaggttgaacttattttactttattttattttatttttgaggcagagtctcactgtcacccaggcaggaatgcagtggtgaaatcttggctcactgcaatctccacctcctgggttcaagtgagttgaagcaattctcctgtctcagcctcccaagtagctgcgattacaggcacctgccaccacacctgggtaatttttgtatttttagtggagacggggtttcaccatgttggccaggctggtctcaaactcctgacctcaggcgatccacctgcctcagcctcccaaagtgctgagattacaagcttgagccaccatgccggttgaacttatttttatctgtgttggccatttgtagtttttctattatgctggttccatttttctgactttgaagagccttttgtggaaacgaagcctaaagtatatgtgagtactgctttgtttcgtcagtttttgttttaaagagacttttcagtgtaatgcaagcattttcccttgaaggctgtgtttcctgtcaatcctaagctttcctccagcattacctttttaaaaaactttattttctatattgatggggtctcacaatgttgtccaggctggtgttgaacacctggcctcaagtgatccacttgccttggcctcccaaagtactgggattataggcatcagccaccgcacccagcctgtttttcaaagggcattgatttttttcataaaactttttaaattaagatctgtgggcctggtgcggtgcctcacgcctgtcatcgcagcactttgggaggctgagtcaggtggatcacgaggtcaggcgttcgagaccagcctggccaaaatggtgaaaccctgtctttactaaaaatatgaaaattagctgggcatgatggcacatgcctgtaatcccgctgctcgggaagctgaggtaggagaatagcttgaacccaggaggcagaggttgcagtgagccgagatcatgccattgcactccagcctgggggacagagtaagactccgtctcaaaaaaacaaaacaattctgtgttgcatgtggtactttttgtgtgtgaggagtccagtgtgaagattcagacttcaggcagccacttgtacaagcactgtcctgtttcctctctggcctcacctaggtaacgctgattcctccacggaggatgtgcttctgagtggtccgttgggtgctgtgctgatgagcatcacccagcattttacgacacatgtgctgccccagagggctgggctcccgtcagagctcttttccactggctgggtgcggtggctcacacctgtaatcccagcactttgggaggctgaggccagtggatcacctgaggtcaggagttcgagaccagcctggctaacatggtaaaaccccatctctactaaaaatacagaaattaggtgcgtgtggtggcgcacacctgtaatcccagctacttgggaggctaagaacctgggaggtggaggctgcagtgagccaagattgtgccactgtaccccagactgggtgacatggcccacagaccaagaccctgtctcaaaaaaaaaaaaaaagcttttttccagagccatcttgctgtcctcatatatttattctcctagatgaattgttgcttaagcaacaatgaagtttaaattgttcttcagatagaacccctaggtgccaggcagtttgttaagcactgacaccgcagtcctgtgactttcatgacgacctgtgacctgtgggaggtagaacacctcacccacccgtgggagcccctggagtgactgacaggaacccctgcctcacccagctccccgcgccgcggctctccccagccctggatgcaggcgcccaggagacatgtattgcttttgttgagctgctcacttaggagggtgactcagagttcaagctggaaagcactggcttgtgactcatgagccagtgcaagatcaaacggctggggcatcgaggtgagagttttccttctcagaagcctcatctccgcagccggaagcagagcccttggctgactggaaaaaccagagaggccccgggagtgggtggatggccagcccagccccacctctcagcctcaacctccaccagcccacaccgagcttgtttgtctgtgtcctgtcgaaactaggactcctggattgtaacttttcttacatttccctgtcccctgggtcctccacttagggtgtaatcacacagacaggctcttaactgtttcatatcactcacttgggaaagtgtctcaagctgttctacaaatccatgcaaaggccgtttaaaaatagcagcgaaggccctggactcggtctcgtccagcacagccccttggctctctctctgggctctggccgcctggcccccggggacccacacgaggtcatggcgtgcttcgggcaggggggcggggatcccatagacacctcagctccttaagagttctccgcctgggccaggacgagcatgggggtccccactgatgcccgagacggtgcccctgtgtgtgtgagccctcgacccacataacagagaggtgtcctgatgccctctgtcctctccaggtggatctaggatccggcttccaacatgtggcagctctgggcctccctctgctgcctgctggtgttggccaatgcccggagcaggccctctttccatcccctgtcggatgagctggtcaactatgtcaacaaacggaataccacgtggcaggtaggctgtggggctgcgtcctatgtatgtcccctcccaggtcggtctgtgcacactgactccaggaatgggaagccagccctcactgtggcccacagaacattgtcctggactgttgaaaaatggccctgaccctgagtcatgtcggctctggaccacgcctccctcctttgtcccataccccacgtgtgtgcatgagtgtgtgtgcatgtgtatgaatatatggttgtgtgcacgtggaggtgtgtgggggagtaagtgagcttcggaagtgttcaaaaccagctagcccctgtgacgcccgccgtggcacagtggcagtttatcagtcccgcccctgattccctttgtctctgcccagccctgaccctcggactgagaaccaagaatgaggagtgagccatgttgagggctggagagggtctctgattgtcagcaaatgggagcagatcaggggagacacccactctgcccgtgtgtcactctgggctgttccccagtgccccccaacccttgggcccttgaattgggtagggtctctggttttccctgggttgggcttcgtgtgtgggcagcgtgcccatccaccgccatcccgggagacccttcagtcagtgggtgactctcttccaggccgggcacaacttctacaacgtggacatgagctacttgaagaggctatgtggtaccttcctgggtgggcccaagccaccccagaggtgagtgcctgctcctctgcaccgctgtaatgtgagtggcaggcgttggtttggggcagtgggaagtgggagagtgaaggcctctctggcgtccgcagggctcatgctgcccagggctgccgacaccgcttgaggtacagtacttgtttcttttcatttttatattactttctctttttattttattttttccttctcaagttattagtagagaagatgctggtgcttttttttggtttttgagagagtctcac

SEQ ID NO: 1283 - DNA, 6000 bp, Homo sapiens
gagcccaggaatttgagtccaacctggacaacatggcaagacccagtatctgtaaaaataaaataaaaaacaacagccaggcatggttgtatgcgtctgtgatcccaggtagtccagaggctgaggtgggaggattgcttgagcccgggaggtgaaggttgccgtgagccaagatcctgccactgcactccagcctgggtgacagagcgagaccctgtctcaaactttttttttaattaaataaatgaaaaataaaaataaataaaactacaagggcaactgaaaccccaagtgagataatacatttgctcttcatggaagaggacaagtgagtaaaccctgctcttctgtggtggggaggccatagttagaattgaaggggccccaccagaaacagaaatggtgggaagtggtggcctctggaggcaaagctttgggggctgtggacatctgctgagaccctggctgcagacatggcttcccttccgagggagttcatgtgaaagtcgaggcccccaccggtattagaggagcagccatctcttttgctcgcagttaaacaagtgctctcgcagtaggataagccacaaaggagacactgtaggagaataaagaggaatccttctggaagccaatagaaaaaaaaaaaaaacaatgtggtcagccctcataaggctagaaccagaaacttagttctctgaagccaaggcactgtaatttccctccctctgatgacagtcacaccacagaaagggagctgtcgggaggaagaagaaggagcccagaggcacggctcatacctccctgctggaaggaggggtaaagggcacgaaagtcctttgagaagagaggaaggagaaatataaatgaataagacagcaccctacaccaaccaacttagagtttagataggaatggagacatatttctgaaaatactggaaacaatcacagccaaataagaaatccagttcatttcaacactgaatagttgggcactgtagcgtattcaaggataatttttaaaaattaaaaagttaaatcaggctgggcgaggtggctcacacctgtaatcctagcactttgagaggcggagacagcaggatcatttgagctcaagagcttgagatcagcctgggcaacatgggaaaacaccgtctctacaaaaaatacaaaattaggctgggccctgtggctcacgcctgtaatcccagcactttggggggccgaggcaggtggatcacgaggtcaggagttcgagaccagcctggccaacatggtgaaaccctgtctctactaaaaatacaaaaattaggggagtgtggtggcgggtgcctgtaaccccagctactcaggaggctgaggcagaattgcttgaactcgggaggcggaggttgcagtgaggcgatatcgcaccactgcactccagcctgggcgacagagcgagactctgtctcggcaaaaaaaaaaaattcatattagcccccagagaaaccccacaccctttagctgtcacctacctaacctcccatgtggatttcacggaatcatacaatactgagtcctttggacctggctgattttacttagtaaacgttttcaaggtttatcgatgttgtagcatgtgtgactacttcattcctttttacgactgaataaaactccatttggtggatttatgacagtttgtttattcgtgcaatggtttttaatggatggacatttgagttgttttcaccttttggttactgtaaataatgctgctataaacatctggtgtaagtttatacatacgttattaacttttgttttagagttggggtctcactatgttccccaggctggtcttgaactcctaggcttaagtaatccacccacctctgcctcccaaagtgctgggattacaggcgtgagcccactgtgcccggcggatttttgtgaggacgtatgttttcacctctttcaggtgttaacttaggcctcttttacggatgttcaacaagcaaacagcttttacacacgtgagtcaaggcctctctgtaagttctgagagctgttccccaggccctgaaccctgacccccaaatctagcaggttaagccaaaattctcctcaacttcaaggcctacttcattcattatgcatccactcaactcacatttctctatcctctgctatgggccagacaccctgcaatgagctgggatgaagcaggggaacaccgcaggtaaaaatgcttgcctgggtggggcttaagatccagtgagggcaggaaggaacatatacaagtaaatatgctgtatgttcctttctccatgaagctttcctggatgttccaggaagggacgaattctactctggtagtaatatatttcttttcttgtcttttgaggagtcttgcccatgttggagtgcaatggcgtgatctcggctcactacaacctctgactccctggttcaagggatcctcctgcctcagcgctcgagtagctgggattacaggcccgcaatgccacacccagctaatttttgtatttttagtagagacggggtttcaccatgttggccaggctggtcttgaacttccaacgtcgtgatccgcctgccttggcctcccaaagtgctgggattacaggcgtgagccactgcgcctggcctatttctttttttcttttcttttcttttgagatggaatcttgcccgggttggagtgcaatggcgtgattttggctcaccgcaacctccacctcccgggctcaagcgattctcctgcctcagcctctcaagtagctgggattacaggcgcgtgaaccaccacgcccagctaatttttgtatttttagtagagactgggtttcaccatttgggccaggctggtctggaactcccgacctcaggtgatctgcctgcctcagcctcccaaagtgctaggattacagtggtgaaccaccgcgcctagcctgtttcttttgtttcaaaagtgatttttacctctcaaaagtgatttctataatgacactgatggaaaattccatcaaatagccataacgcatgtcaagcactctgctctgcataccttctgtcacactctaaggatgagagaggggagagttatcctggttctggctgtgtcctccccattttggccatcttatgagctccttatagaggtctgaaatgatttggagtccagagtccatggctgtcaggatatgactagggtgagcaggcagttgggaccaccttgacctccagcctcctggtcctcagttcctcgggtatcccactctgctgggggcttagtgaccatgtttgggctccagagattattttttccttccactcctatccttagtttgttactaaccaggcgggagtacaggcatgtctctgaagacaggctcagggctgtgtgacagctgacgaccaggctgcagggaaccaggtcccatgcagtcctactgcctttttttttttttttttttttttttttgaggcggagtctcgcttttcgcccaggctggagtgcagtggcacgatctcagctcacgggttcacgccattctcctgcctccgcctcccgagtagctgggactacaggcgcccgccaccacgcccggctaattttttgtatttttactagagacggggtttcaccgtgttagccaggataatcttgatctcctgacctcgtgatccgcccgcctcggcctcccaaagtgctgggattacaggcgtgagccactgcacccggctactgccttcttactgtcgccacagcctggataaaatacgattcttctgagccttttttttttttttaatacagagtttcactcttgttgcctaggctggagtgcaatagtgcgatctctggtcaccgcaacctccgcctcccgggttcaagcgattctcctgcttcagtctcccgagtagctgggattactgacacgcgccaccacgcccggctagttttgtatttttagtagagacggggtttctccatgttggtcaggatggtctcgaactcccgacctcaggtgactcaccggcctcggcctcccaaaatgctgggattacaggcgtgagccaccgaacccagcccctctgagcctcttgaatacaactggggtcatgcctgctttgcaggtttgtcttaaggattaaagctgtttggggagtgtctggaggagggtgagtcttgagccaacccctgcatctcccttccagggcctcccggtaataaaccccaagtaaatgtgcactttgtccgtcctctcggagcaggtctccgggtactcctgtgccaaaccgatttccgcccccaaggtccttctcctcttagaaatcctgacgcagctcctaggttccttcgcagtgacagccactcttttctatttgtacgtagctgtagtgttttgtgggtacgttctctgaacaacaaagtggcccttctaaaggctgttctgtggggtccacagcctcgccacccccagcctctgcagcggcttctgaatgaatgaaataagcgacggcgccctctccaccaccccacccccgccaactcggcaggcagggatcccaggcgcgggttctggcggaggcggtcccgcgaggcggggggacttttctaggcggggtgggggccttgggaccacctttaggggctttttccccatcccctggccccaattcgcagcgtttcgccacccagggcccgcagggctccaagcccttcttccccagcccgcgcgctcaggcccccgcccgcccccggcggtggccccggaccccgagcggaagggggcggggggtgtgcggggccgggaagcggggagcgcgggcggcggaaggtggcgggagggggtgggggctgggaagcaccgtgcgcgggcggcgggagggcccgggcggggctgcgcggtggtcacgtggggcggggccgggagggtacttagggccggggctggcccaggctacggcggctgcagggctccggcaaccgctccggcaacgccaaccgctccgctgcgcgcaggctgggctgcaggctctcggctgcagcgctgggtgagtgctggggacccggggccaccgcagcgtaagtgaccttggcggggacggtgctacccggccgccgagacgggttcctctgcgccctcagtcgggcccaggcgcggccccgcggcgtccctgggggccggcggggagccgggaccctcgggactgtccctgacgggcgggctggggtgggagtccgcgcgctccgaagcgtcggcgagaaaagcagaaaacagctccgcccgccagccctctgccctccgctcccctccccgggctgtgcgccggaccccggccctcggagcggggacgcggccaggaccgccgagggaggcgcctgcgaggaagagctcggccgggtccggagactgctgcctgggaccgcgctcccagcgcctgggcctcggtgtctccgggccaaactgccgacataatcgcatctgccggcatctattttcggtttatttccccctcattgcgaaggatttgcctggccaactttctgcgcaagatcccacgcaattcctgggaccccagaagacaggtcctgttgaagaacaggaatctggcactgggtgggctggggaggaagccgcacggtgttaaatccataaacaggaagagaaaccagacagcgaaaccaagaggcgaatgggcgattggatgccggtggggagaaggccgggggcgcaccctgctcctggactccagtaaagggaggccgggcagagtccctggggcgccacctccccctcggttagtagccctggaggccggggggagttggcctctggggagcagtgggtgctgggtgtggggcgttgcaggcaggctggggtgggcgacccaggtggaagtgaattgcacttggcttcctggtgggcctctgtcacccccttcccaggcgctgagaaagccagcaggctggcaaagaaaagga

SEQ ID NO: 1284 - DNA, 6000 bp, Homo sapiens
ccgcttccctcgccttcccgctccttctgaggatgtgggaatccgcccgcgccccagccccctccgtggctgcggacccctctcccacccagtgacctcctggcccacttccttgcccagaggggcctgggttggcattcggctcccgcgtgccccgcagctcgtccccgcccccctagcctgtttcccgtaccgttcattccgccaggacgccccgtcgccagagggcctggcggaggtgacagtgagggggtgctaatgctgccccttcgtccctttctttcacttcagttctttcattttaaacttttcataaaatcttcactattgctcacttacaacaaaagcccaaatcggttatagcggtgatttttatcactctcccggtgagctgcaggagagacttcacctggcatcctgatgccgcaggggcccccagagagcaggttggatcccaggctttcctctctgtaccctctcccctctccctgaagctggatacagtcctactcccgcttggggagcagcggaagagcctgtggctccctacttctgactcgggagatcgtgggctgatcctaggtgggaagcgcaggcgcaggccgtctaagggattgatggatgtggcctgccagggctttgcctaccacacagctcagagcacgggttccctgtcgctaacaaccgttgcgaagggaatcccatccacacatctcccagacagctggggccatatccgggctgcccgtggctgtccagtgaccgcccttcctcactgctccgggacacttctccctggggcagtgctgccagccttcaggaatgctgggggtgttgggggtggcctgcccagcctgacgctgactctccatgcagatggggctggcgagggcctggcacggggctgcatagtgcctggagtcaccagcacctacagacggatccccgacgctgcccacgggtgctcatcctgggagagaggtgacaagttcagaggtgtcggcagggaggcactctttctcaaactggcctcccgggactcaggagtggagatggcagttggggacagccccctggccgccttaccgggcctttctcaggactccctggactttgaatcctcagggagttctgagccccccgcccaggtaggccgactcctggccagccagaagctgggggaggtgttggagcggtcccgccggctcccaacagctcccaccagcttgtcaggacaacaccgctccctgcggctggcaagcaagcctgagcgtgaagtgccccttggagcagggcaacaggagtccatggaggcagacacagacctagaggcaggcctggaagaagaggcggtgagtgctcactctcaggctgggtttaagagtgggatggacagcctagctcctctggttctccctggagctctctctgggtggggcactccctgcccctaattgatgggttgtgtcataggttctttctgcaccccagttccatttgtgcacggccacctctgcagaggaggtgggcagctacgggggcccttcctggcactatgccccgctgggcagtggggaagccggctgcgtgtgttcctcctcggggcccactctgctcccatctgctggctgagcccagcctggctgcttagggtagggcaggagccctactggctgaaatctcccctatctcacaatgtcccacaggtggggggcctggggcctggagcctgggcctgcctccccgggcagggtcttcgctatctggaacacctgtgcctggtgctggagcagatggcaaggctccagcagctctacctgcagctgcggatccagaggcccccaggggtgagtgagattcgagtgggggagggagaggacagatgggaccctgggaaccatggctgccctcagagcagcttcagccctctagccaggccctgatcacctgtctctcctgtgcataggatcccggcgaggaggagtcgacccgagcccctttaccgtccccgttacacaccccaggcaatcgggggcaggggccatgggagctgctaagccagacagagcacacaggtgaggggccatcgtgtctccctttgtcctgcctgcctggggtcccaccagcaggtcctctgagccgaagcttgatggggtgtcttctggccctggccaacctgactgtctttctgaaggagcaaaggctgcttcacccccaaaggtggaggtgcccagtgccaaccctcccaggctgccagaaaccccagtggagccaacgtaccacttgccatcctcccagggacacaaggtaggggacaggtatatgtggggcaggtggtgggctggggtggggggaggggaggtgggggatgcatgggcaccctgggggccagcaactctggggaaatgacaggattgattcctgtttggagcaggcgacttgtcctggctgtggcgacagctgtctctgggagcttggtcgggggtctgagtgtggggagggctctgggtgacccctcatcctctgctcagcgggatatctcccactgggacaaggtcaaggtcctgctcaaccggatctgccggagaagccaccaccaccctgagccccctgcccctcctgatggctctgaccccaggtgagccccgtgcccagcccaggttagggcacggagaggagactgataagccaggatgctgagattgtcatgccagttgtcattattgtccccgcaaaacttgagaggcagtctgggaggggctgctagaagaaacagtagttaaaacaccccatttacagataaggaggcagggttctgggtggggttgggggtagttgcttttccaaagccgcacggtgagtcagtgacagctaggaccagaatgtgggaaatctgcctaccctagctcagcaacccctcaccctcaatgctgacatttaggccaccttccaggttcgtggggagagcaaggtggagcacaaaggatttcacagtgggtgaaggccatcatgcttcggggcttgtattgaatcgttctccaggaggaagaaataccaagtcatttaacagccccgggctgcgcccacacccagctacccaccagcagataaaccacgttctctcaactctagggccattgttagttttatttcccccttctagcctaatgtcttcttttcattccacaggatcgagtccagggacctccctgaaaggcctcagtgccgcccccaccggaagacctttatgccatcattagtggttaagaagcaacgagcaaaaaacctttctgtaggctgagacctctcggtgcacctggtgaccctgggtggaggggacttgctgtgaagtcttcctcgccctctgccctcttgctgcttctccacattgccaggaaaagctgctgacgcctgccctcctctcttgagtcgagggctgaatctttctcctctaagcagtctggtcaggaaccttggtttcttgagaggcccccaagatgccgcagctccagggctcttcctcctcaccagaaatccctgggcttccacaatgtgaactcactcattgtcaggtgtccgtggagtgtttttggcatggtgacctgtctgggcccagcatgttgcagatgtgtatttatgcgcaatggtatgcatatctctgtgtgactgtcagtgttgcaagctggctggatccaaccatctcttctgaaataatgcatccaaagggttgatattctgggggaggtcactgcagaaggatggaactgacctttattccccagtgggcagttactgagctttcctcctcagagccatgctggcagccctgggacagagaacggtgtggctttggctgcctctgcatggaatcttgccccggactcctgaagactgcacaaggaatgaggaagatcagggacaacctgggaactgaataactttcaaagccagtgctcagcttctctgctccgtactagcgtttacaggtcttaattcaaaccagatgcctgtactagtttttagaccccaagtcaacctttctgagccacagcttcccgctgggaataatgatgcctgccctatctacctcacagacttgttatgaggataaagtgagattaaactgcctcaaagtgctttgtaaacctcaggtgaataggaaaggggaaagtaaggctggagtgatgatggggaggtcggaggataagggggggctgggattgctaatggggactaaaatggccagtctcctggcaagattttgagcaggtcatttcattgaggcctcttagatttcatatttgagaattagggcactgattcctgactggctaggcatggtggtcactggcttgagtcagaccaggaatgtctcttagaaatggtcactgataggcatccttctcctccagtcaggaggggctggtttccttatctgttgcagtctcgactgccagagggaggcgagcgtggtaggcagtcgggggtcccttgtgtttggggggcccagctcccgcttcctttgagcccggaaccaatgatccgaagccttctttcctgatgggattctttagcgaggacactaccgaggcgcgacttcctgacgcgcatccgatccgggaaggcgcacttccgctccccagttgccgcgggatggcaagccggcgtgggggaagggagaggtcggcggagacgagggagggaccatatccgggagagcggcagcttccgaccagtggtcgcgcttccggagaggcgcttccggtggcggcggcagcagcggctgtggtggttccgggtgtctttgtccccccggtgtcgctgccctggcccgcaggtgggttggggggccccctgccgcccctctgccccttcgcccctccgcccctccgctggccgaggggctgcgagggccgggcggcgaagatgcgtggggcgcggaaggggccgagcccctctttggactgcaagtcccgtctccctggcaacggcctcggccttgggggcgggcgggaggaggagaaaccgcgcgcctcagtcctcccttggtggcctcgccgcggctctgctgggagacccggcgctggcggctgctgaggccggagcggagggcccgggagcgtgggagcaggagggtggcgcgcagccggtttcgcgtttggtcggccagggagctgccttcccaccagccggtcgaggaaacaacgggtcgggcttccggggagagggcccacacagtctcctcgccggcaccggcctcctccatttttccgggccttgcgtggagggttttggcggatgtttttgaacgaaggaatgtcatcggggctctctcgagcccctcaccccgccagctactctgggggtggcgtggcatagtgagaggagcgctaagttgttgggaggcctgggtgtgagtagcagttttgtcactacctggttatgtggccccgggcaagtctcttgatctctctgagcatcagtttccttgtctgtaaaacagcatgacagtatcatgcaccactaggttattgtcagggcaaactggaacaatgtaatttcttgtttcatttctttcttctctatattctctccatccattgctttcattcattcttattacccacctccctgttttccgaaatatccttacttaagattctccacttttccgggtatagatggaaatttcccttataagctgttaatttctttctttttggattgaagccttttccccacgactctgaaagaggacagcgttcccaatgtcccagtttaagcgccagcggatcaacccgcttccagggggacgcaacttctcaggtgatcactgttctccctacctggcctcatcctgggaagtatgtgctctggagttagtttggggtttccctggtggagagcaatttgctgctgatgttcctctggaaagcaggagatgcccacagtgattgccagtgaagctctgtggaggagctggctggagctgtagccttt

SEQ ID NO: 1285 - DNA, 6000 bp, Homo sapiens
ctgatagagaaagcctgaaattaaccgtaaagcagaaagtccacggcagtcacagagtttcacccaggctacaccgtctcagaaggcacctgctgtgattttgtaatgaagcctttaataaactcacacactgtgaaagggagaaggtccctagaaactgaggaccaggaagatgcacaggacaagaggagtgggtaaacacaaaatatataccagcgactggatatatttatatacttatgaatatggtgtctacaatggagaatgggacacagggtttcaagcagtggaaaccccatggcaaacaatcccaaagcttccccctacttagaattcacaatgggccgggcgtggtggcccacacctgtaatcccagcgctttgggaggctgaggtgggaagatgacttgagcccaggagttcgagaccagcctgggcaacatggtaaaaccctttctctgacccccacaaaaataaataaatatttacttattttttgtagagataggctcccaaagcactgggatttataggcataagccatcgcacccagccttacaaaaaacgttttaaaaaattactccagcatggtggtgcacacctgcagtcccagctactgcggaggccgaggcaggaggatggcttgtgccagagagatcaaggctgcaatgagccgtgatcacaccaccacactccagcctgggtgacggagcaagcccttgtctcaaaaaaaaaaaaaaaagaaaaaaaaagggttaagggttacataacatttcccatttgtcaaaactgtcaagatttgtgcatttcaatctacataagttccacgttaaaattttttaccttaacaaaatcaagtgggagcagtgaatagatggaggtagagatgaaaaagaatggtagctgatacttgaagaagctgggtaatgggtataataaggttcctcacacctttctgtttaccttgcatatagtgaaattctccattataacaagtttaaaatgaagacagaactagaacgagtcttaaacaaatcattctggagcttaacttttagaggtataagcaaaacactcagggagagtgagactgaggaaggaacatgtgaactggagagaagacgggacagcatgctcctagtggtccccaatgctacagatgacacagcatcaccaggataccctaaaggcccaaatcagccatgcttgctccacacatggctgagaaagctacctgtgtgtccaaggcacgggggcctgaactcccaggcagagtgcaatatacaccttctaacagcatactgatgagtatggtgtctataaagaaacgttttaaacaacgagaacagatactgcagtgttctagttgttttgacatgttactattgagagtttccattcctatcatctcaacttagggactagaaacagaagagtatttaagaagtatctcaacatgacattttgaaagatgaactgtatcaactccctgcttgcttaaccactgtataaaattccaatatttttatacacatttcagttgtgtctacatacttcacagaaaagggactaggatctagctgcaggcaaagaatgttagtggtaagcatagccaccttccaagcagttgacctgggttcacttcctggccaacacaaaaaaataataataaaataaagagaatgttagtgtcaacaagtggccaaaaaaagggacatcatcctcttaccttcggccctgatccaaccgtccatgagggccccgggcaggaaatctgttcaggtggctcaggtgaagtgtgtgggatgtttggaagagactcagagctgcagaaaggaaatgactggtgactcaaaaaccctaaaaaccggccgggtgcaatagctcacacctgtaatcccagcactttgagaggacagtgcagatggatcacttgaggtcaggagttcaagactagcctggcgaacatggtgaaaccccgtctccactaaaaatacaaaaaatcagccgggcatggtggtgggtgcctgtagtcccagctactcaggaggctgaggcaggagaatggtgtgaacccaggaggcggagcttgcagtgagccgagatcgcgccactgtactctagcctgggtgacagagcaagactttctctcaaaaaaaattagccggtcatggtggcgggcgcctgtaatcccagctacgggggaagctgaggcaggagaattgcttgaacccaggaggcagaggttgcaatgagccgagatcgtgtcattgcactccagcctgggcaacagagcgagactccatcaaaaaaaaaaaaaaaaaaaaccctaaacacctatccagattgcccacctttcttccagtacatagaagtacccacctctatgctaagagcagcaacctgaaagtccattgatctaaactaccccataatgccacacccaacaacagtgccactcgtactcacgcttctgaggaaagagtgggggaatccggtgaggctggaagatcaactgaggctgagctcccaggatcccttgcttctggcccagggctgctacatgcagaagaggaggtgctggggacttcagtaggggctgcagaacaggagccaggaaattcaggggaccccatggttgaggcactcactaccttggaaagatgcagtcccacccccctgacaaaagtcagggttttgcccagctgtcagggcacaggggcttccatcccttccctttccaatgcacatgctaaggagatatgaatacctggttggagagcgtttgcaccttgacagcattccagggcactgcctggcctgggttgtatgcagccttcaccagcaccttctcacccagctggggcagacggcccttcaccacactgtcagcacacaagccagaaggccccatcagaagagggaccctggccaggccaccctgactgcccctatgaggcctttcccatcaagatttcccacaccttgcacaaaaacagcaaagcaatggctttgaggcgggtgggggcaataccagcatggtgacagaactgaatccaataagcatttccgttaggggaccaacctcaagcctaccttagctgaaaaaagacctcttcatccacaaccccaaagtagtcatgcaagctggtaacaataccagtgaagacccgctgtttctccccaccctgtaagagaaggagacagctgaaaagtaaaagggaggaaactggacaaaatcacactctgccatgaaggtctcatctcaacccacgccccagctcagcgtactgcatcaagagttcgcacagagtgaagtacaggtgtggtgggcatactccatcattaggggttggggcatgtttgagctggttcttgacccacaagcttcttctgggatttccagttcattaattccaagacgtaagctaaagatttccctggagcgagaaatgaagatgccccagtctgaaggctatctgggcaaccccatactagcccactaccaggagagggatcaggaatgataaacactattatgtaagagaaaaagagcaccaggcctccatgcattcagtcccaagggctgaaacttactacaagggatgccgaacctacctgaaggtgcctggcattctgggacagttctgtggccacaggaggagtgagcaaaccaggaggagggcccagaagagatgttgaagctgtgcctatggggaaagagaagcaatctccaggaaccgcccctaccaccttaagcacgagtcaaccaaaggatgtggtaaatccaaaggctacagctccagccagctcctccacagagcttcactggcaatcactgtgggcatctcctgctttccagaggaacatcagcagcaaattgctctccaccagggaaaccccaaactaactccagagcacatacttcccaggatgaggccaggtagggagaacagtgatcacctgagaagttgcgtccccctggaagcgggttgatccgctggcgcttaaactgggacattgggaacgctgtcctctttcagagtcgtggggaaaaggcttcaatccaaaaagaaagaaattaacagcttataagggaaatttccatctatacccggaaaagtggagaatcttaagtaaggatatttcggaaaacagggaggtgggtaataagaatgaatgaaagcaatggatggagagaatatagagaagaaagaaatgaaacaagaaattacattgttccagtttgccctgacaataacctagtggtgcatgatactgtcatgctgttttacagacaaggaaactgatgctcagagagatcaagagacttgcccggggccacataaccaggtagtgacaaaactgctactcacacccaggcctcccaacaacttagcgctcctctcactatgccacgccacccccagagtagctggcggggtgaggggctcgagagagccccgatgacattccttcgttcaaaaacatccgccaaaaccctccacgcaaggcccggaaaaatggaggaggccggtgccggcgaggagactgtgtgggccctctccccggaagcccgacccgttgtttcctcgaccggctggtgggaaggcagctccctggccgaccaaacgcgaaaccggctgcgcgccaccctcctgctcccacgctcccgggccctccgctccggcctcagcagccgccagcgccgggtctcccagcagagccgcggcgaggccaccaagggaggactgaggcgcgcggtttctcctcctcccgcccgcccccaaggccgaggccgttgccagggagacgggacttgcagtccaaagaggggctcggccccttccgcgccccacgcatcttcgccgcccggccctcgcagcccctcggccagcggaggggcggaggggcgaaggggcagaggggcggcagggggccccccaacccacctgcgggccagggcagcgacaccggggggacaaagacacccggaaccaccacagccgctgctgccgccgccaccggaagcgcctctccggaagcgcgaccactggtcggaagctgccgctctcccggatatggtccctccctcgtctccgccgacctctcccttcccccacgccggcttgccatcccgcggcaactggggagcggaagtgcgccttcccggatcggatgcgcgtcaggaagtcgcgcctcggtagtgtcctcgctaaagaatcccatcaggaaagaaggcttcggatcattggttccgggctcaaaggaagcgggagctgggccccccaaacacaagggacccccgactgcctaccacgctcgcctccctctggcagtcgagactgcaacagataaggaaaccagcccctcctgactggaggagaaggatgcctatcagtgaccatttctaagagacattcctggtctgactcaagccagtgaccaccatgcctagccagtcaggaatcagtgccctaattctcaaatatgaaatctaagaggcctcaatgaaatgacctgctcaaaatcttgccaggagactggccattttagtccccattagcaatcccagcccccccttatcctccgacctccccatcatcactccagccttactttcccctttcctattcacctgaggtttacaaagcactttgaggcagtttaatctcactttatcctcataacaagtctgtgaggtagatagggcaggcatcattattcccagcgggaagctgtggctcagaaaggttgacttggggtctaaaaactagtacaggcatctggtttgaattaagacctgtaaacgctagtacggagcagagaagctgagcactggctttgaaagttattcagttcccaggttgtccctgatcttcctcattccttgtgcagtcttcaggagtccggggcaagattccatgcagaggcagccaaagccacaccgttctctgtcccagggctgccagcatggctctgaggaggaaagctcagtaac

SEQ ID NO: 1286 - DNA, 6000 bp, Homo sapiens
tgaacaactgcattgcatctcatcttttataaagatataccatactttaaccattatctaaatggcaatggttaactactactgagatggttgtttctaatactttgttattacaattagggcttcagtgaacattctggagaataatttgacaataggtattaacagccttaaaagtgtagatttcctttaattaattaagggtaattctctttcaaaaatatcatctatggaaatacatagtggtacagagaaagttatgtacacaggcattaagaggctacatattaatcttttgagtaacacataaaaaagcaaatgtgtcttcctcaatagatgaacaacacgtctgtttcccatcacccgatttgttcctgatttacagcctcagaatttcttagtgttctaactctaccaatcctcacaaagtccctttttacttggaaaggaaacaaggctagataagaggtttgtgctgtccaagcaacacaaagtagaaaacaaccacagagtgaattctcctcctaatgatcaagcttgaaaactaaaagctggaagctttctccattatctaaaagactttacaaactaagagctgttccttatgccaatttgtacataacatacaatgacatgagatattttctggtttgggtttttgggaatgactaagagattcagagaaacttctgtgaatgcttctccgttctctaacataatagactgtgaagggtggtccaataattgtgattatactcattgccgtatgttgtataatctttacagttttataatcactagttcaatcctcttgcaagaagaagaagagaggagctttgggacaaggggaggagagaatgaagagtatttctcctcatctttccccctaacttttcaaggcccacatgtaactcttttgaaatttcattatatttacattctttcctcaaagcttttcattcattattgaaaggaatccagaccaggccaacctgatgctgaaatccagaccaggccaacaagagttactggcattcttcttaaataaaaaaataaataaataaatttttgaaaagttggtctttttgcagcagtatgtatttacatacaagttacgtaggtattcaaaacattattatgaggcagtgacaatccatgaaggccttaagagcactcttcataacaagaaagcaaggacattgtgcttgaagatgtttctatttaaaaaaaagagtttgtgaccagcttgggcaacaaagcaaaactccatctctacaaaaaataagttagccggtgaccagcctgggtgacaaagtgaaactcgaactctacaagaaataaaataattagctggatgtgggggtgcacacctgcagtcctagctacttgggaggctgaggcaggaggatcacttgagcccaggaggtctaagctgccatgagctatgactgtaccactgcactccagtttgggtgacaaagcaagaccctgtctcaacaaaacaaaaaacaaaaaagaacaagaaaatttgaaaagaaaaaaaaggctatacttctcaacaacaagaattatactacgatttacactactactttgattttccttattcggccctattgaatcttattcaaacattcttaaggaagttgatagttttcttaacaataaaacaaactggacaacatccttttgacttggaaggagtttgggtatttgccctgtaatttttaatgaaagtgaacagtctctccacagcggtaaagttaaaaaaaaatcacaaaaatacttcactattcaaatacttcagtaatttgctattgaaaccctgctttgacccctgaaccaaagataaaatcccaaacgcaagataatctgtacatttcttctcctgtttttcagttgtgcaactttacccaacaaagtccttcgacttatcagcaatttggatagtactagatgcctgaataagttgttttgcccattgcccaaaaatcacttcaaggaattcaatgaggcttcttgttttgttcagtacagtgttgtgtaatgagctaaaaaaacgaacagagtgagaggcaagaagggagtaattaaatatggcaatatctaaaagcttttcagaaagctcaccctatcccacacaaaatactttctatctagcagatgtcccaaagcaacattttgatgtcccatgcaggctgagtgtacttccacctctgtaagagctgatgtcagccaagcaggaaccgactggccaaagacatcaaactcctcataggtctgtcagacaccaagataaacaatgacatatggctcagcccccgccctcgcccctttttttttttgagacagagtcttgctctgtcacccaggctggagtgcagtggcgtgatctcggctcactgcaacctctgcctcccggattcaagcgattctcctgcctcagccgcctgaatagctgggattacaggcgcccaacaccaagccaggctaatttttgtattttcagtagagagggggttgttctctcaccatgttggccaggctggtctcgaactcctgacctcaagtgatccactcgctttggcctcccaaagtgctaggatgacaggtgtgagccatcgtgccctgcctggctcagccctttttgttgttgttgttaaagggtcaaaggaagatgaaaatccctttgctttcagtgaaatcacgtacacctaccaagtatcttcactcataagaaaactgtacaattaagaaacaatactaaaaagaaacagaaaggttggccacctttgtcaattaggtagaataacacactgacaaaataagacacacacaccagcaggaggttctgcaccactgaaaagaagccggtgcgatggctcaagcctgtaatcccagcactttgggaggcccaggcgggcggatgacgtgaggtcaggagtttgagaccagcctggccaacatggtgagagaccaacaaccccctctctactgaaaatacaaaaattagcctagcttggtgtcgggcgcctgtaatcccagctacatggcgaaacttcgtctctactaaaaatacaaaaattagctgggcgggtggcaggcacctgtagtcccagctactcgggaggctgaggcagaagaatcgcttgaacctgggaggcggaggttgtagacagagcgagactctacctcaaaaaaaaaaaaaaaaaaaaaaaaatgtcctcaaaagagcagtagacaggctgaacatgagaacctctgctttgctcccagccggttgtgaacttggacaaggccatttactctagacctgtttctctacaggcaaacaacaggaggcagttagctagctctgaagtttcttcccattctaaaatctaagacagtatgctaaacatgggcaaataacttaaaattgcataggaatatgtgatacaagtaacgtttaaagactcatacattcatcctaatttactgtgggaaataatataaccatcttacattctggaatatatgacacttaaaggttttgggaattaacccatcaaaacctggagcagcagcatccatcttaaaatctccaaactccatcgctacctggtgagggctgaaactctcttccctaaaataatcttcaggccacactggaagcacctccctcttacgaaagatactgcatgacctttaagcatccaagtggttttgaaaagacttcatctggccatatgctcactgctcccattacctctttcccaagagttgaattaaagaaaggttaggcaagaacccttccaagaaggctcccggttctcacgactaggaacaatctgaggacaagatgtctgggcagcggaatgttatgaaaagaccctggcctgggttgtctatcagcctcgtccgttaactttcaactgcccgagtgcgtttttaattccgtttctttaaatgcatggccccagactccctgacgtgtgcaatcttgggtggttcaggaggctgctctcagctttactgggcgcacaacccatcgctttaaaaaaaaaaaaatcacttgggcaacttcgagaaatctaataaaaaaataaaaaaggaaaaaggagaagcaaggcacagcctctcaccccacacgtgactgaagccaaccctagacgagcaaatgaattttcctgacaaacgtgtggcaacaaaggaatgctcgctggggggctcccgcgcccgccagacgctgcccgcccgcgagccccgcacacctgatccccgacacgtcccgcggcagccgcccgccccgccccgctcccgcgcgtccatcccccggcgtccccgccgcacgtccccatcccggcccacgtcccctccgcggcccgctccgcccacccggcctccccgccccccaggcccgcccccgccccgccccgcccggctccgctgctggggaccaccccccgcaccagggggatccgcgctacccgcgccgctcccggaccgcgagcccaaacggccccgggcccaagaccccaggaggcaacagagaggcccggagcaaggcaggcgcccctcctcttgacaggggacgggagctgtcagtcacctggacatcccatgcctgagccaatgagctgccttctcctcccgcctcccgcgccgcgccggtggcggcggccggggctgctcctcctcccccatccccttcacagagcctcggccccgcactcactgttgaggccggccggcgggggcagagactgctcattttcctcgcagttgttgttgttgttgtgcaggggcggcggcggctcgactaggtgggacgacattgtcggacagctggcaggactgcggcagcagcaggaccgtctccggcactcaggcagcaacacaacaagccgagtccgccgcccccttttctgcgcctgcgccgtccctcccctgcccctgacgtcagggcccgcccaggccacgtgatgacaacacaacaagcgaccggacggggcaggggcgctcccctgcgggccccggacgtggagacgctcgagtcaggctgacgcgcgcgccgggaacgaactcttgcgtgtgacttgggatgaccggatgggatgagtgatgccagtggcagtgggagagaggatgaggagaaacggaatgaggaagtgcgctcctgtgttcgcgcccgtgcctcctctcacacaggctccacagtgcttcacccagccctgcgcacgcatctgttttctacctcttaggactcacttctgcaataggtgtcttggggacacaaaggaatccccaaacccaggtgcctccacgtgtaaactccaaataaagctgctgaaacatcaacactccatacgggaaacaagggaaggccgcccccaaatttaattgttacagaatttttaaaatgtcgattacaaacacaccatcattctgaaaaaaagagaaagaagaaaggggaagaaagaaaaaagaaaaattcaggaaaacagagagaagaaagtactcacccaaatcccatcgactaatcgatttctgggacatgacgtgggaagccgtttatcctgtacgtggatgacattaaactatgttcctgagcacacctcctacttcacatctccatgtcttcgtccagtctccttggtctgatttatgagtgacatatgtttctcgcagtctctaacttgtcttttaatttgtttttttcactctgtagaagcttaaggttttcatgtaatcagatttatcattcttacatggcttggggagacagtcacaccaagattactaatctataattcccttataactttttctaattttcttataggcttaactttacatttagagctctaatccatctgaaatttattttccatatgctgtaaattatttaacttcaattcttcccaattttgtagcccattgacctaataatattaattttaagccatcctttctacactgatttgaaattgcacctttgtcactctctgaatgaccaca

SEQ ID NO: 1287 - DNA, 6000 bp, Homo sapiens
ttctaattattttcaataaaatgagtatagtaagctgggcaaagtggctcatgcctgtaatcccagcagtttgggaggctgaagcagggggatcccataagaccaggagttcaggacttgcctgagcaacacaggaaaactctgtctctacaaaaaacacaaaaaaatagctggacatgattgcaggcacctgtagttccacctactgggaaagctgaggtgggatgatcacttgagcccgggaggctgaggctgcagtgagctgtgattgtaccactgcactccagcctgggtgatagcatgagaccttgtctcaaaaaaataaaaataaaatagcacatgattaataaaaaacttttttttgaaagtttaaaaccttttgaaaggagcacctaaaaggaaaatagaacaaagtgggatctcgtagtcctgactgggaaaacaattctataaatatgtcaataatcccctcaatttcttttttatcatttggcattagaaaccttttattgagacaaacggtgggctgaaaataatacagggtgaaggaaggttgaggaaaccagtatgaaggcatctcaaatgatgaactaaatacattccaaaggtactatttacacttaaggcaattttaaaagtgaggtcttaaccaaaaagcctttacatggcattaaaaaaaaaaagcgggggtcatttaaatcttttggattgactaaaagagctaaattatgtacccaaaatctgtacagcaggggcctgttttcagcaggtaagcctattatatgcaagaaagaacctcttactcttgttacaattgtcctgttttgctttgttttacaggaatatataacccccatccccacagagttagtccataaggcctcagtgtctgcatagaaatgtggacctacctctactagagaactatttacactgcactgtaaatacacgtctgtgtccacccccacaactaagctgtcaatgccttgagtgaaggggtagttacaactcagtcattttgtatctacagtgacaattaataggcactcaatacttttttttgcatgaatgataaatgatattacactaccaccactatttacattaacatttcccatcattagctgtccccaaaataaaaacaccaaattgctgccacattttcagcagttttcataatatagtgcttctggactttttaatgtaaacaaacatgcttgatttaccaattttcagagtaatgacacaaacttagcattcttcttggaatggaaaactttctgggaagttacttcattctttttctcttttcaaaaggcatctcgcagcgccaactgtttttctcagaaggaacgcttattttctgaccagacattctggctataccacatcatcataaagttcttctgttttttcttctctttactttttgaactggaaaatggattcactttggttttcttcctcacaaattcttttcggtctgtctttccagccattgcagttgctagtcttgtctctttgtcagattttggctttttatgaaggcgttcaatgtccggaagagaaagtaattcacccctcggctcttcatcactgtcgatttcaatatatttcctcttctgggatttcccggggacagcgtcaagttcttttctcatttgcgccatgcggattttctggaagtcttcctaacttaaaactcgactggtgctgacggctgcagttttggctttctgctcctccatgggcatggtgttcagcttcttggaaatttcttgctgttcttcattggaagagtgttgcacatcaacccattcgccatcggcatcctcctcctcactgagactggtactttcccatccatcttcatcattttcagcactctcctctttctcaacttccagaacttctgctcctggaatgtaacctttagcatctaattctccatattcttgtactcttgcttctatggaggcttctgtaggcttaccccagaatttcttctgcagcatctgaggattcagtgttcggaagagccgaatcaaagttctagcagacatcattacattattatccttgtgtgttttatactgagccaggtcttggagaagcttttcagtcatggccagaggacactgagctgttgtctcttttacagcattgattcctattgtcatggcttctccagagttcttgtcgttaacaaaattgttggccacagtcataagcaatgattgaataatcgctgggtgtactaggtgatgagatgcttgtgcagcaaacagaaggttctttgttacttctctttggtggggctgcagaaaccttcgcaaaaagtgatagaaattgaagaggaagagcttatgaattcccaccaatctgagatgaggttcatgagcatcatcttcacttccaacctctccttacagcactcaagctgctttagtagtttttctgcaaaatcttggggatcatgaatcaagtgaacggctaaaaagttaaacacctctggttttttcttcttcttttgtttcttgagcactttcattgccttttccaactttttcttgttttgggaactttgttccctgtagcatactgtgctagcaggtctcttgctgttggtccgtcatcctcagattcggagtcactggcctgtttttcatcttcatcttttccaagaaagaatgtcaaagcagcaactaatatcttggtgacctaagagaaacatgcagttgtgataacattgacagttttggtatcattccagatgttccttctgtagagttcaatcataacatctaaagacatcttggctgcagttgcattgctatctctcaacatggtatacatgaaattttacaatactacatccactttattcttgtgttttgcatttatattcttgatatcagtcacgatatatgtgtatgaagtcttttgcagaagcttatcatggcaacagagaagttcaaagaagagttctagcaggcttgatggattgatgagattcttatttctcagcaagatcaaagctttgcaaaatgtcattcgaagatctggatccaatacagtatgattacaggacagaagatctttcaccacttgaggaaaattacttagataccctgggtagcagtaactaatctataacaaagcaaaggctcttctgaagtttctctctttctctcctattattcagatgcacatatttaggacgttctgtgccataaacaccaccagctctgctagttctttaccgggtttatatggttgcaatttgaaaatctccacattggatgtgtagtgattatactgctgtagaaactcctagatggagggtggtgggtctcgcttcatcagattctgtaactgcagtcaggttgctgggcagcttgttgttgtttctgctggacattctggctgaagactggcttcgcggcgagcagttttaataaaactcagatggccagcagccgccaatccctaccagctgcggcttgaactcctgcttccgggtatgaccggaaacagcactcaatctattaatagagttcatttctgaccaaaatcttaaaagaatttgcaaagggatttgacaaatcaatccttaaaaaaaaccttttagcatggactttttcaaatatattaaaaaattagaggaatactttaatgtattacatagcttcaataattaccaacacaaggtcaatcttggacaagtccatttttaagttcatctgaagagtaactagccattaacatctgaaaaagacaaaggaagagaaactttaatagttatctaacagaggtattgcagatagccctgaaacagactcacatttttgtggtcattcagagagtgacaaaggtgcaatttcaaatcagtgtagaaaggatggcttaaaattaatattattaggtcaatgggctacaaaattgggaagaattgaagttaaataatttacagcatatggaaaataaatttcagatggattagagctctaaatgtaaagttaagcctataagaaaattagaaaaagttataagggaattatagattagtaatcttggtgtgactgtctccccaagccatgtaagaatgataaatctgattacatgaaaaccttaagcttctacagagtgaaaaaaacaaattaaaagacaagttagagactgcgagaaacatatgtcactcataaatcagaccaaggagactggacgaagacatggagatgtgaagtaggaggtgtgctcaggaacatagtttaatgtcatccacgtacaggataaacggcttcccacgtcatgtcccagaaatcgattagtcgatgggatttgggtgagtactttcttctctctgttttcctgaatttttcttttttctttcttcccctttcttctttctctttttttcagaatgatggtgtgtttgtaatcgacattttaaaaattctgtaacaattaaatttgggggcggccttcccttgtttcccgtatggagtgttgatgtttcagcagctttatttggagtttacacgtggaggcacctgggtttggggattcctttgtgtccccaagacacctattgcagaagtgagtcctaagaggtagaaaacagatgcgtgcgcagggctgggtgaagcactgtggagcctgtgtgagaggaggcacgggcgcgaacacaggagcgcacttcctcattccgtttctcctcatcctctctcccactgccactggcatcactcatcccatccggtcatcccaagtcacacgcaagagttcgttcccggcgcgcgcgtcagcctgactcgagcgtctccacgtccggggcccgcaggggagcgcccctgccccgtccggtcgcttgttgtgttgtcatcacgtggcctgggcgggccctgacgtcaggggcaggggagggacggcgcaggcgcagaaaagggggcggcggactcggcttgttgtgttgctgcctgagtgccggagacggtcctgctgctgccgcagtcctgccagctgtccgacaatgtcgtcccacctagtcgagccgccgccgcccctgcacaacaacaacaacaactgcgaggaaaatgagcagtctctgcccccgccggccggcctcaacagtgagtgcggggccgaggctctgtgaaggggatgggggaggaggagcagccccggccgccgccaccggcgcggcgcgggaggcgggaggagaaggcagctcattggctcaggcatgggatgtccaggtgactgacagctcccgtcccctgtcaagaggaggggcgcctgccttgctccgggcctctctgttgcctcctggggtcttgggcccggggccgtttgggctcgcggtccgggagcggcgcgggtagcgcggatccccctggtgcggggggtggtccccagcagcggagccgggcggggcggggcgggggcgggcctggggggcggggaggccgggtgggcggagcgggccgcggaggggacgtgggccgggatggggacgtgcggcggggacgccgggggatggacgcgcgggagcggggcggggcgggcggctgccgcgggacgtgtcggggatcaggtgtgcggggctcgcgggcgggcagcgtctggcgggcgcgggagccccccagcgagcattcctttgttgccacacgtttgtcaggaaaattcatttgctcgtctagggttggcttcagtcacgtgtggggtgagaggctgtgccttgcttctcctttttccttttttatttttttattagatttctcgaagttgcccaagtgatttttttttttttaaagcgatgggttgtgcgcccagtaaagctgagagcagcctcctgaaccacccaagattgcacacgtcagggagtctggggccatgcatttaaagaaacggaattaaaaacgcactcgggcagttgaaagttaacggacgaggctgatagacaacccaggccagggtcttttcataacattccgctgc

SEQ ID NO: 1288 - DNA, 6000 bp, Homo sapiens
aaccccctctctactgaaaatacaaaaattagcctggcttggtgttgggcgcctgtaatcccagctattcaggcggctgaggcaggagaatcgcttgaatccgggaggcagaggttgcagtgagccgagatcacgccactgcactccagcctgggtgacagagcaagactctgtctcaaaaaaaaaaaggggcgagggcgggggctgagccatatgtcattgtttatcttggtgtctgacagacctatgaggagtttgatgtctttggccagtcggttcctgcttggctgacatcagctcttacagaggtggaagtacactcagcctgcatgggacatcaaaatgttgctttgggacatctgctagatagaaagtattttgtgtgggatagggtgagctttctgaaaagcttttagatattgccatatttaattactcccttcttgcctctcactctgttcgtttttttagctcattacacaacactgtactgaacaaaacaagaagcctcattgaattccttgaagtgatttttgggcaatgggcaaaacaacttattcaggcatctagtactatccaaattgctgataagtcgaaggactttgttgggtaaagttgcacaactgaaaaacaggagaagaaatgtacagattatcttgcgtttgggattttatctttggttcaggggtcaaagcagggtttcaatagcaaattactgaagtatttgaatagtgaagtatttttgtgatttttttttaactttaccgctgtggagagactgttcactttcattaaaaattacagggcaaatacccaaactccttccaagtcaaaaggatgttgtccagtttgttttattgttaagaaaactatcaacttccttaagaatgtttgaataagattcaatagggccgaataaggaaaatcaaagtagtagtgtaaatcgtagtataattcttgttgttgagaagtatagccttttttttcttttcaaattttcttgttcttttttgttttttgttttgttgagacagggtcttgctttgtcacccaaactggagtgcagtggtacagtcatagctcatggcagcttagacctcctgggctcaagtgatcctcctgcctcagcctcccaagtagctaggactgcaggtgtgcacccccacatccagctaattattttatttcttgtagagttcgagtttcactttgtcacccaggctggtcaccggctaacttattttttgtagagatggagttttgctttgttgcccaagctggtcacaaactcttttttttaaatagaaacatcttcaagcacaatgtccttgctttcttgttatgaagagtgctcttaaggccttcatggattgtcactgcctcataataatgttttgaatacctacgtaacttgtatgtaaatacatactgctgcaaaaagaccaacttttcaaaaatttatttatttatttttttatttaagaagaatgccagtaactcttgttggcctggtctggatttcagcatcaggttggcctggtctggattcctttcaataatgaatgaaaagctttgaggaaagaatgtaaatataatgaaatttcaaaagagttacatgtgggccttgaaaagttagggggaaagatgaggagaaatactcttcattctctcctccccttgtcccaaagctcctctcttcttcttcttgcaagaggattgaactagtgattataaaactgtaaagattatacaacatacggcaatgagtataatcacaattattggaccacccttcacagtctattatgttagagaacggagaagcattcacagaagtttctctgaatctcttagtcattcccaaaaacccaaaccagaaaatatctcatgtcattgtatgttatgtacaaattggcataaggaacagctcttagtttgtaaagtcttttagataatggagaaagcttccagcttttagttttcaagcttgatcattaggaggagaattcactctgtggttgttttctactttgtgttgcttggacagcacaaacctcttatctagccttgtttcctttccaagtaaaaagggactttgtgaggattggtagagttagaacactaagaaattctgaggctgtaaatcaggaacaaatcgggtgatgggaaacagacgtgttgttcatctattgaggaagacacatttgcttttttatgtgttactcaaaagattaatatgtagcctcttaatgcctgtgtacataactttctctgtaccactatgtatttccatagatgatatttttgaaagagaattacccttaattaattaaaggaaatctacacttttaaggctgttaatacctattgtcaaattattctccagaatgttcactgaagccctaattgtaataacaaagtattagaaacaaccatctcagtagtagttaaccattgccatttagataatggttaaagtatggtatatctttataaaagatgagatgcaatgcagttgttcaaaagaatgaatgtcagtatatattgatagggaagacatctgaaaaacgacttacagaatatgtcagtatgtgtgtatggtacagttccatttctttataaaaacaaaagcaaaaacagacctatatttcattgacaaaaactctgcaagtctccatgtgaaactgtcaaaagtggctcctttgggagtaggaacgggaggttgggagagatgttaatttttaattttatgtactgatgtttacgttttctaggaacacatttttccagtaaggaatggtttttctatgatatagaatataattgtagtagctaaaactttcttagggacctttcttattgttctgcgtgctatattcatttaatcctcctaacaaagtcttcgaggtagatacagttattatctctattttatagatgagaaaactgaggcacaaagaggttaagtaccctgtgcgagggtaacagctataactgagagtgggagcctggcttcagtctcagcccctgaccacactataccagtgtatcccaagtacaaattgtccgccttaagtagaaatgctttcagttatgattcagggtgtggaggccacagcagagatcacttttactaagcttttctaggtatgtctctttcaggttccaaaagtatatattggattatgattgcttatgtgtttttaatgaagaaaataggatccagacattgatttgaaagtccttcaaaaaagtaaaaaccaggttgggagcagtggctcatacctgtaagcccagcactttgggaggctgaggtgggaggattgctgaagcccaggagtttgagaccaacctgggcaatgtagggagaccctgtctctactaaataaataaataaataaataaataaataaataagtcgggcatggtggcatgtgccctgtagtcccagcttcttgggaggctgaggtgggaggattgcttgggcccaggaatcaaggccgcagtgagctgtgattgtgccactgtactacagcctgggtgacaatgcaagactgtctcaaaagaaaaacaaaagtaaggaccagaaaacctgatattgtttgttacacccttttttctcttcgattgcctacttcaagtgaatattaattgtattttagggaagactgacttccacagagacctatctggaactcctggttccttacctctgcttctgtcagagcagctctgggttttggtttgttactattgtacacattaggcttctatacaagaagaactggtcccattggtttaaaaataagtttgaaaatcctagaaacagtgagagtcagaaaaaaaaactgtttttatatacatattctctcccccaccccctttctctccagttgaaatatgttgcagagctctaaatttagggatgcttttggcgtatttcttatacactccagaggcactcgagataaattatcttcaatgttagatctctcttagctttgctagttgtatttgttaatccattttgagttctctagcctgtgtccattttatgtgtgtatagaatgaggccatggagatgttgtacaactgtgtcgtttggcagcagagtcctaaggaattggtggtgactatgggatggtggtagccactggggctgcctcaaatggaaaggaaagggttctaagtatttataaaagaaaattctagtgtataactgagcatcttctatttaccagcacttgatactactaaatcgtcacagcaccccggtgttattattatctctgtttacaaatgaggaagctgaagctcaggtcacacaggtagacaggaagtgatggggtcagattcccagctaggtctgccttggagctttccttcttgtgagggtgatgttcagttcactctggaactggtgtagccatcgccacatttagagtgcattttagagtttgagccagttttgatgattttacttcaacttactgatggaactccttgttcatccctggaactctctaacacttctgctgggagtttagagggatggccacaccaagctgcttgggtacattttctaaaacaaaatttattgtaagaaatggaaattatgaacaaaatataccactatctctttttgctgtgaagttaagtttattggctactgttaacaatttatttacttacttacttactattcttttgtagagacagggtcttgccatgttccccaggctggtgtcaaactcctggattcaagcaatcctggtgcctcagcctcccaaagtgctgggattacatgtgtgagccactgtacctggcctcaactcttgttaaaattaaagcaccttaatacgtttagcaaactcatcagaccaataaatattttcaagatgtatgcagaattaccagtggcacatcccctttttctgtggctccaccccttcaactttttgtccaagaaaacttttcgtgtttgcctgtagctgatgtgcagttgtttctgctcccaaatcaacagggtttaatgaaaaccctagaaagtagaaacccgtgggagagaaaagaaaaaagacaagttcacaaggtatgtttagtgtataaaaaaggagaaggactagaaagcctgagatacaaaggaaatgaagaaactaatcagtgagatagagataaagcttttttctgaatttttagcattattacctgatttagttaaccagctgcattaattttatgctcctgatttgtgcacaaattgaaatttttgctattggatttaggttccctctctaggagtttctcagttgtttgcactaagtaggatatagttgctaacttacttagatgaccttttatgaaatttgtaggtgatatatttatttcatttctggagcagatacagctgagcagcttaggtagactatgaagaaagtgtgtgtgtatatatacaccaactaaaatgttaaaggtaaatagcctaaaagtagcaatttttttttgaaaagcaacctgagttttcagtagagtgttattataaaccaagctttacccagagagaaattgactgaaaaacacgttttctgagatgttttagagtttgagctgtttctcagttgatggcatgagctatttcaggaacagaactatatagatctttagacttttattacttcttatttattttcttcagaatacttttacatttggtttgaggagagtcagaattcttatctggattcaccatgttcacatctgtgtgcacatgacagatttcagttctgctgtggttaacttatctgacttgtccaacaggttcctgggtggagctacccatgaacagcagcaatggcaatgataatggcaatgggaaaaatggggggctggaacacgtaccatcctcatcctccatccacaatggagacatggagaagattcttttggatgcacaacatgaatcaggacagagtagttccagaggcagttctcactgtgaca

SEQ ID NO: 1289 - DNA, 6000 bp, Homo sapiens
gtcgcgccactgcactccagcctgggtgacagagcgagactccgtctcaaaaagaaaactgaataaataatactgaataaataaatatcatttttaggactttttcattccttttggttctattaaaaggggagctattggaaatgttaattgttcttggcctgaaactttaggttataataagcaatttttaaaagtcacattttttattttatttgatatgacacatgttaaattctgactcaacttattatagattattcccaaaaacttttggctaacatagtttcgaaaccttggaaaatgtttgtatagcaatttgtcctaaaaatataatctccttccagagagtaaaccctggtgcttaacagtagggcctctctatacagtattcctgggtttgaatactggccctgctatgtactggttgtggaaccttaggcaagttatttaatctatgtctcagtctcctcatctgtaaaatgggattttaataattatttttatagggttatttgttgcaaggtgaaagttaatgcatgtggctgggtgcagtgtctcacacctgtaatcccagcactttgggaggctgaggcagggaagatcccttgagcccgggagttcaagaccaggctgggcaacatagtgaaacactgtctctttaaagaaatacaaaaattagctgggcgtggtggcacacacctgtagtcccagctacttgggaggttgaggtgggagaattaattgagcccaggagttcgaggctgcagtaagctgtgattgcactctggcctgggtgacacaggagaccctgtctccagaaaaaaaaaaaaaatgcatgtaacatgcttggaataatatttgcccctttaagtgctcaataaatactattatttatttcctcatcacatctctcacttatttttgttttacttctcatcattttatttttagcatatccttttatttccttttatttttttaattatgaaatttttttttttcttttttttgttgagatggaatctcactctatcacccaggctggagtgtagtggctggatctcggctccacctcccaggctcaagcaacctccacctcccaggctcaagcgattcttctgcctcagcctctcaagtagctgggattacaggtgcccgccaccatgcccggctaatttttttttgttttgttttgttttgttttttgaggcggagtctcgctctttcccccaggcaggagtgtagtggcgcgatctctgctcactgcaagctccgcctcctgggttcacgccattctcctgcctcagcctcccgagtagctgggactacaggtgcccgccatcacgcccagctaatttttttgtatttttagtagacacagggtttcactgtgttagccaggatggtctcgatctcctgaccttgtgatccgctcacctcggcctcccaaagtgctgggattacaggcgtgagccaccgcacccagcgtgtaagttttgtgtttttttttagtaaagacggggttttaccatgttggccaggctggtctccagcttctgacctcaagtgatccgcctgcctcagcctcccaaagtgctgggattataggcatgagccactgcacccggcctaattacgaaaattttaagtgcatacaagagagaataatataatggacctccatgtaagtattgcccagatttaactcttatcgaggtttttcatacttcccttagcattacatcccaaagtacagtcttatgcagttcctgtgctgtgcttagatatcccaacagtgaagctcactcaggttgttctgaagatattacatactctgatcttacattatttttcagcattttttagaaaagcaacatgtttgttatctaaaatttctgagacacaaccttatgagtttggtatcttttctgtctagatttttctttgtattaggaggaattggtcttcctttttttcttaaagtttgaattcttctttacagtcagaagaagaagttgtagaaggagagaaggaagtcgaggctttgaagaaaagtgcggactgggtatcagactggtccagtagacccgaaaacattccacccaagtgagttctcacatgtttcttgtcagtggacacagttgatctgcgcacgcttacaggcaatgggcctggtaatccccacgatattttcagcaaatgacatctgcctctgaatttctttctcagggagttccacttcagacaccctaaacgttctgtgtctttaagcatgaggaaaagtggagccatgaagaaagggggtattttctccgcagaatttctgaaggtgttcattccatctctcttcctttctcatgttttggctttggggctagggtaagtaccggtcaactcctgaagttttttccattcattttatcctcttattttcagattgaagaaatgtatgtgaaagcagtttttattgctttactttcaatgttttagtgcaaataaggtgaacttaaaaaagtgggtgcacaattgttctacaaataagcatttttaataatagtagagtgtgttttcttatttgaaaataagatgtttggcctggtgtggtggctcatgccagtaatcccagcactttgggaggccaagatgggtggatgacctgaggccaggagttcaagaccagcctggccaacatggtgaaacccggtctctactaaaaatacaaaaattagctggccatggtggtacatgcctgtggtcccagctacttgggaggctgaggcaggagaatcgcttgaacatgggaggcggaaattgcagtgagccgagatcatgccactgcactccagcctgggggatagagtgagactccatctcggaaaaaaaaaaaaaaaaaagaagatgttcataataatcccctaaatgatcaaatgtaagcggactcctctgtgattgatttttctttttgggttttgttgtgtaatatttaatcttgagtaatttatgaactaaactaatctttagcatgtacattttgtggtcagtgcaaatacctttttttcatatgggaaaatacatgattacattgaatagttttttttaatgaaactggtaggttgattggtgctaattttttccttttttaactttgtagtattttcatttattttgctaaaatcaacctcatatttacgtgtaattcattagtttcttagccacatcttttaaataaattgctttttttccttgatttaaacaattgaggaattacacttctgaaagattttaggagttaaacagtagctgttaatttttttcaagacgtatgttgtgctctaagcatgcccagtgggtcattttcagtataagatatgcagaagatggggtcatcctttttcttccctttaaggagctcagcatattggagagagattcttagtcacgacctcagaaacttgcatacagctttccacacacccgtcttgtctctcttgggtgcttgatctgcttttgtgagggcaaggacagtaatcaacaaacagcaacctagaaggggtttgtgcagaaggggactgtgtgactgttgcgtgggggttgatgtggggcaggtgtaggagtttaatacattgctgcctatacagcagttcattgcccttaagcgattggtgtctataccttgccgtctctctttcagtcatcttcagattgtttgtcttggctgtaagtataactattgctatagatgaatgtaaaaagagtgtttaaaaagttcgttgctttaattgcactggaggtgaagctagttacatactttccttaacttcccttctgcttttgctgttgaagaggccaaatactttcttggcatgaaaaagtattataaggcccctaatccttaggagttattagtaagagctgtctttaaagcactggcagcttttaaggttttttttttcttttgtcctacatagagcaccagaataatttcacatattactatatttttgtgtctgaaatgtcagtagaaccttctgtccaccaaagaggaacatcttgaaggagttgggctgctttatttactctgtggagggatctgttctctctggctttactttgtctaatcactacccctttgctgtcgagccccgatatttaatgagtaaacaaactcatataaaaccagtttggccgggctggtgactggttttaagaaagtcagtgatgatttcacggtgtttggggagcggtacccacaaacctttagagccttttacaaagactgaagagttttaagtagagttcaacctgtggacaagctggtatagaactgttgaaacaggtgaaacatgatgcttctgcttcctttcagcatctatattggaaagcgactgagcacaccctctgccagcacctactgagggaaaggaaaagcccctggaaatgcgtgtgacctgtgaagtggtgtattgtcacagtagcttatttgaacttgagaccattgtaagcatgacccaacctaccaccctgtttttacatatccaattccagtaactctcaaattcaatattttattcaaactctgttgaggcattttactaaccttataccctttttggcctgaagacattttagaatttcctaacagagtttactgttgtttagaaatttgcaagggcttcttttccgcaaatgccaccagcagattataattttgtcagcaatgctattatctctaattagtgccaccagactagacctgtatcattcatggtataaattttactcttgcaacataactaccatctctctcttaaaacgagatcaggttagcaaatgatgtaaaagaagctttattgtctagttgttttttttcccccaagacaaaggcaagtttccctaagtttgagttgatagttattaaaaagaaaacaaaacaaaaaaaaaaggcaaggcacaacaaaaaaatatcctgggcaataaaaaaaatattttaaaccagctttggagccacttttttgtctaagcctcctaatagcgtcttttaatttataggaggcaaactgtataaatgataggtatgaaatagaataagaagtaaaatacatcagcagattttcatactagtatgttgtaatgctgtcttttctatggtgtagaatctttctttctgataaggaacgtctcaggcttagaaatatatgaaattgctttttgagatttttgcgtgtgtgtttgatattttttacgataattagctgcatgtgaatttttcatgaccttctttacattttttattttttatttctttatttttttttctctaagaagaggctttggaatgagttccaatttgtgatgttaatacaggcttcttgttttaggaagcatcacctatactctgaagcctttaaactctgaagagaattgtttcagagttattccaagcacttgtgcaacttggaaaaacagacttgggttgtgggaacagttgacagcgttctgaaaagatgccatttgtttccttctgatctctcactgaataatgtttactgtacagtcttcccaaggtgattcctgcgactgcaggcactggtcattttctcatgtagctgtcttttcagttatggtaaactcttaaagttcagaacactcaacagattccttcagtgatatacttgttcgttcatttctaaaatgtgaagctttaggaccaaattgttagaaagcatcaggatgaccagttatctcgagtagattttcttggatttcagaacatctagcatgactctgaaggataccacatgttttatatataaataattactgtttatgatatagacattgatattgactatttagagaaccgttgttaattttaaaactagcaatctataaagtgcaccaggtcaacttgaataaaaacactatgacagacaggtttgccagtttgcagaaactaactcttttctcacatcaacatttgtaaaattgatgtgttat

SEQ ID NO: 1290 - DNA, 6000 bp, Homo sapiens
cacttttgtctacaaatctcaatcctgctgattccacaaatcctacatcaagcaatatcattttatgagtctttccacaaccaccccttcaggggattcttcaatttctgtcacaccggaagtcttcagagtatcaccctcagagccaggcaagagggaccccggctagggtttcaggctttagagagtccagctctgactccttttggccataggactaatgtgatatgcccacctggagcctgtgccctcctttctagaccatgccctgggactcagaatcccttgccccagatggccacacaatcactttcaggtccattctctctgggcagacaacatcacaaatgtgtgtaccccaaggcctgaggccaagaaggcagctttctggctgtaggggctgaggtgttcacacacatttgcatggcccctcaagacaaagaacaagggggaaagtgagaagaaaagaagcagccagtgatcagggccagctcttgcaacttaaccatgttgggtcattctgattaaaccacttagctcaagtgtagtgctcaagacacttagcacattctccagctgaatttaccagtgttcatggactacctgggttagaaatatatttcactataaagtagcatacaaaatgagcagaaagggagttaataagattaataatagagttagtgaatattatgagctgagtttttgagaaacgtaatttctttcaacactaataacaaccttgtgggggttcattgtctccctttaaaaattaggaaaccaaggctttgccatggtcgcataggagggtcagaatagcatctttatgaccccagagcatactcctctccactccacctacccatgtgtacaactcagacactttctgggatgtccacgtcaactattctttaaagagtaaccaacagatggatagttttctgtttgtgaatcaatggtaggtgactgaaaaattggttctgagaggtcgttttgcaaggattgatggtcacaggctgagaagcagatttgaaagacctacctgctagcagcatgaagagctgctcttccttatcttagtattaactagttaattattggaggtgggtgcaggggtggattatgtgtattcttaattgttgtagagtggggactgggagttacaaagacttttgcaattttcgaccttgcagagctgagcaattttcagttgctttgcttgctgatagcactgcttcccttatctaccatggaacacatcttaatgaagaatttgcattcacagcatcaggttaatgaatacaaaacaaaacagtgtatatccctctgatggatgggatttcggaagcacagacattatacacatatttgatgataaagtactagaagtgcagggaattgaggtcaagcttcctcctaaggggactgaatcccagagagagcaggtgacttagtaatgagaagtggagctgtctgttcaaccaggatgctcctcctatggcacgaaattcagttttaaaaatatattaaattcaaatcaaatgtgttaggtgtgagttctatccctacaggtatgaggcagaggtggaggactttgtatacaatagagaaataaatacatatattaggtcttccatgacataggatttactgaccctctcatgggcattcctctgaggcattttgagatttattgctataaaagagcctcccaaacattatctcacttagaaaaggtaatcatattaatatgattttgttcacaggagagaatttaagtgccactgcttaaagttatctccttgttcctaggtttaaggagacctagtaaataagaacattccactttgtctgcatcaataaagatgaaagatgacttaggaggtgggaattggagtgggaaacatttttctatgttcccgatattctgaaacacatgtgactttattcaatcacaaggtaaacagattatgtaatttaccagaaaaaaagtaataagactggtggtgctaggttttcatactccagctattaatgaattaaagagagtaacactcctgaaaggataccattttctcaagaaaactggaaaagattgtgtggcatttaaaaaataccaaactctgtggccataatgctcttaaaattcatctgtctaaagaaattagaagtgaatcatattaaataaggtttagatatgtccactttatcttcctgaaaatataatttcattacaatcagatttgtcatattttatctgattttacttgctatttaaaacaccttataatttacttgcatatttagaattacaatattcttaatatacttcttgatcttaacaaaacctaggccaaatgttaatcaaatcaagctgttcaaagttactttatagcacattcctatgaacacaccatacacacagcaatatctagcaagggtgtcaatttttcgttatttttaaaagctcatttaaagaagttatttactacaaatgactctacacacacacacgcgcgcgcgcgcgcgcacacacacacacacacacacacaaacctttttaaagaaacgctagaacccaaccccctctaggccagaggaaaacattacagctgtatacgcacttgtgcctgttgccgtagagtaatacggtagcagcaggagattacggtactagctgggctactgcctgagttacgtcagcgagagctgcaaagttccttgctattcttttctggtgtcggggagctgaatattaaaagggtgattgtggagttaccggttatctgcatttttttttcttttcttattttgactctttttaaaaaatgcaggtaaagtgacagcggttcaggagcttaaagacatcagtggtggaggggtgagtcagcgggtgcaaaaggacaaggatttggtgcctcggagacacggtcccctctccgcctccagagaagagcaggcaggcagctcccgggaccgaagccgggtccacatcccccgcgcgcgagctggtggctcagcagcggcgcttcaggtgagtgcgccggggccggcgtcccgcagggccgagtgggtgagggcagacctcccccgccgtctggtgagacggaacccccacttttcccagcgcctcccgctttttccaccaggttttataccggcccctctaccccacccccgattcccttacatcttctgcgaagttgccttctactgaacaagtgtctttttaaccctgtgtttatcaccctcgaggtaggaggaaaagggtttctgcagtggcacgtttttaataccacctgtgaggtctccaacttgcgattttaacaagagtctttgcccgaggtcccacctcagggcccaaccccagaaggcaaggtgggcacttcctcacgccgcgctgtcctgccgagtccctgcggtaggttcgcagttgtggaaacccaggtttcttacgcagatggtggcccccagcccagaaaatcgaaggcggcccctgcccgctggcatgccggcttaatgtttacgcctgcaaaatccgcagtgactgtcacttgcaaagctccctctgcagagggacgtcctccccaccccgtcccccgccagtcccgctacggctggcagctggagcccctcgggtggccaacagtgaggcttggaaaggcgtcgtggacagacctgggtcgctttctgtcttcgggtccctcccggcttcgctcgggacctggctctcaagccagcttggctggtggacagaccggtgcgctctgcacacccgagtgcgaattccaccggcgtgagagtgagcgtgctcgtggtcctggccctgaggtccctgggtcgcagctgttccctctcccaggccgccccctccaggtgactgcgaggcaacctgttctaacggaaaccgagtacatcctccagaattccccggctaggatccgtgcgacacactcgccagccgcagtcgcccctccggggcttcgaggattttaatttcgtggtacctgcgctcgaaatccagacttcgagcgctggagcctggggttttggggatttgtttttttgtttgtttttcgcttcggatcctgaactcgggcagaggtgactcagtagagtgcgctaggcaggttcccagtggtgggggcgcgagatgagctccgaagtcgcctccaccgctgccgggcgaagcagcttctggaccgcagaaccaacccggctcccaactggtgtcccccaacccgtcaagctcagcacagcctctttccctggggcgcctagctcaaagccgcctttctctttgcgctctttcaggtggacgcggtcaaacgatgccccgcagcctcctgggtctcagcacatattccacacctacgtcccctgacctgtgctcctagaagctggagagagcaggagccttcggtggggcagctcaaaatgtaggtaactgcgggccaggagcagcgcccaacctgtagcgctgcgctacccaaccatcggtccctgcctttgagcgtcgacggctgatcttttggtttgagggagagactggcgctggagttttgaattccgaatcatgtgcagaatgctgaatcttcccccagccaggacgaataagacagcgcggaaaagcagattctcgtaattctggaattgcatgttgcaaggagtctcctggatcttcgcacccagcttcgggtagggagggagtccgggtcccgggctaggccagcccggcaggtggagagggtccccggcagccccgcgcgcccctggccatgtctttaatgccctgccccttcatgtggccttctgagggttcccagggctggccagggttgtttcccacccgcgcgcgcgctctcacccccagccaaacccacctggcagggctccctccagccgagaccttttgattcccggctcccgcgctcccgcctccgcgccagcccgggaggtggccctggacagccggacctcgcccggccccggctgggaccatggtgtttctctcgggaaatgcttccgacagctccaactgcacccaaccgccggcaccggtgaacatttccaaggccattctgctcggggtgatcttggggggcctcattcttttcggggtgctgggtaacatcctagtgatcctctccgtagcctgtcaccgacacctgcactcagtcacgcactactacatcgtcaacctggcggtggccgacctcctgctcacctccacggtgctgcccttctccgccatcttcgaggtcctaggctactgggccttcggcagggtcttctgcaacatctgggcggcagtggatgtgctgtgctgcaccgcgtccatcatgggcctctgcatcatctccatcgaccgctacatcggcgtgagctacccgctgcgctacccaaccatcgtcacccagaggaggggtctcatggctctgctctgcgtctgggcactctccctggtcatatccattggacccctgttcggctggaggcagccggcccccgaggacgagaccatctgccagatcaacgaggagccgggctacgtgctcttctcagcgctgggctccttctacctgcctctggccatcatcctggtcatgtactgccgcgtctacgtggtggccaagagggagagccggggcctcaagtctggcctcaagaccgacaagtcggactcggagcaagtgacgctccgcatccatcggaaaaacgccccggcaggaggcagcgggatggccagcgccaagaccaagacgcacttctcagtgaggctcctcaagttctcccgggagaagaaagcggccaaaacgctgggcatcgtggtcggctgcttcgtcctctgctggctgccttttttcttagtcatgcccattggtaagtcttgaacacccctcactttagcatctgggggtcttcaccctcctcggcttctgttaccccagactcccagtccgggatggaagaggaaggattagcatttcaaacagcaca

SEQ ID NO: 1291 - DNA, 6000 bp, Homo sapiens
aaaggattagaacacaatgcttctttggagagctgtgacttgatactgcatcaatacctttctgagaattgtttttcattttcttgcctctttaacttattaagccttaggagaattagttgaaaagccaagtctttggggtagatactaacattaagtcttctactctgtcatttgcaatcataaattccagaacacagctcctaattccattgtgtattgttttctaagggaatgatagacagattctttatttttttaaacctctaagcctaccacacttgccgagttcctcactagtcactaagaaagtcctgccaatcaatgcatgggtttatgtccattgctcagctcttctccaatcagactcattcccccagcatccctgacacaccactctaaaatgcggctgctgatggttcaccttcctcacttttgtctacaaatctcaatcctgctgattccacaaatcctacatcaagcaatatcattttatgagtctttccacaaccaccccttcaggggattcttcaatttctgtcacaccggaagtcttcagagtatcaccctcagagccaggcaagagggaccccggctagggtttcaggctttagagagtccagctctgactccttttggccataggactaatgtgatatgcccacctggagcctgtgccctcctttctagaccatgccctgggactcagaatcccttgccccagatggccacacaatcactttcaggtccattctctctgggcagacaacatcacaaatgtgtgtaccccaaggcctgaggccaagaaggcagctttctggctgtaggggctgaggtgttcacacacatttgcatggcccctcaagacaaagaacaagggggaaagtgagaagaaaagaagcagccagtgatcagggccagctcttgcaacttaaccatgttgggtcattctgattaaaccacttagctcaagtgtagtgctcaagacacttagcacattctccagctgaatttaccagtgttcatggactacctgggttagaaatatatttcactataaagtagcatacaaaatgagcagaaagggagttaataagattaataatagagttagtgaatattatgagctgagtttttgagaaacgtaatttctttcaacactaataacaaccttgtgggggttcattgtctccctttaaaaattaggaaaccaaggctttgccatggtcgcataggagggtcagaatagcatctttatgaccccagagcatactcctctccactccacctacccatgtgtacaactcagacactttctgggatgtccacgtcaactattctttaaagagtaaccaacagatggatagttttctgtttgtgaatcaatggtaggtgactgaaaaattggttctgagaggtcgttttgcaaggattgatggtcacaggctgagaagcagatttgaaagacctacctgctagcagcatgaagagctgctcttccttatcttagtattaactagttaattattggaggtgggtgcaggggtggattatgtgtattcttaattgttgtagagtggggactgggagttacaaagacttttgcaattttcgaccttgcagagctgagcaattttcagttgctttgcttgctgatagcactgcttcccttatctaccatggaacacatcttaatgaagaatttgcattcacagcatcaggttaatgaatacaaaacaaaacagtgtatatccctctgatggatgggatttcggaagcacagacattatacacatatttgatgataaagtactagaagtgcagggaattgaggtcaagcttcctcctaaggggactgaatcccagagagagcaggtgacttagtaatgagaagtggagctgtctgttcaaccaggatgctcctcctatggcacgaaattcagttttaaaaatatattaaattcaaatcaaatgtgttaggtgtgagttctatccctacaggtatgaggcagaggtggaggactttgtatacaatagagaaataaatacatatattaggtcttccatgacataggatttactgaccctctcatgggcattcctctgaggcattttgagatttattgctataaaagagcctcccaaacattatctcacttagaaaaggtaatcatattaatatgattttgttcacaggagagaatttaagtgccactgcttaaagttatctccttgttcctaggtttaaggagacctagtaaataagaacattccactttgtctgcatcaataaagatgaaagatgacttaggaggtgggaattggagtgggaaacatttttctatgttcccgatattctgaaacacatgtgactttattcaatcacaaggtaaacagattatgtaatttaccagaaaaaaagtaataagactggtggtgctaggttttcatactccagctattaatgaattaaagagagtaacactcctgaaaggataccattttctcaagaaaactggaaaagattgtgtggcatttaaaaaataccaaactctgtggccataatgctcttaaaattcatctgtctaaagaaattagaagtgaatcatattaaataaggtttagatatgtccactttatcttcctgaaaatataatttcattacaatcagatttgtcatattttatctgattttacttgctatttaaaacaccttataatttacttgcatatttagaattacaatattcttaatatacttcttgatcttaacaaaacctaggccaaatgttaatcaaatcaagctgttcaaagttactttatagcacattcctatgaacacaccatacacacagcaatatctagcaagggtgtcaatttttcgttatttttaaaagctcatttaaagaagttatttactacaaatgactctacacacacacacgcgcgcgcgcgcgcgcacacacacacacacacacacacaaacctttttaaagaaacgctagaacccaaccccctctaggccagaggaaaacattacagctgtatacgcacttgtgcctgttgccgtagagtaatacggtagcagcaggagattacggtactagctgggctactgcctgagttacgtcagcgagagctgcaaagttccttgctattcttttctggtgtcggggagctgaatattaaaagggtgattgtggagttaccggttatctgcatttttttttcttttcttattttgactctttttaaaaaatgcaggtaaagtgacagcggttcaggagcttaaagacatcagtggtggaggggtgagtcagcgggtgcaaaaggacaaggatttggtgcctcggagacacggtcccctctccgcctccagagaagagcaggcaggcagctcccgggaccgaagccgggtccacatcccccgcgcgcgagctggtggctcagcagcggcgcttcaggtgagtgcgccggggccggcgtcccgcagggccgagtgggtgagggcagacctcccccgccgtctggtgagacggaacccccacttttcccagcgcctcccgctttttccaccaggttttataccggcccctctaccccacccccgattcccttacatcttctgcgaagttgccttctactgaacaagtgtctttttaaccctgtgtttatcaccctcgaggtaggaggaaaagggtttctgcagtggcacgtttttaataccacctgtgaggtctccaacttgcgattttaacaagagtctttgcccgaggtcccacctcagggcccaaccccagaaggcaaggtgggcacttcctcacgccgcgctgtcctgccgagtccctgcggtaggttcgcagttgtggaaacccaggtttcttacgcagatggtggcccccagcccagaaaatcgaaggcggcccctgcccgctggcatgccggcttaatgtttacgcctgcaaaatccgcagtgactgtcacttgcaaagctccctctgcagagggacgtcctccccaccccgtcccccgccagtcccgctacggctggcagctggagcccctcgggtggccaacagtgaggcttggaaaggcgtcgtggacagacctgggtcgctttctgtcttcgggtccctcccggcttcgctcgggacctggctctcaagccagcttggctggtggacagaccggtgcgctctgcacacccgagtgcgaattccaccggcgtgagagtgagcgtgctcgtggtcctggccctgaggtccctgggtcgcagctgttccctctcccaggccgccccctccaggtgactgcgaggcaacctgttctaacggaaaccgagtacatcctccagaattccccggctaggatccgtgcgacacactcgccagccgcagtcgcccctccggggcttcgaggattttaatttcgtggtacctgcgctcgaaatccagacttcgagcgctggagcctggggttttggggatttgtttttttgtttgtttttcgcttcggatcctgaactcgggcagaggtgactcagtagagtgcgctaggcaggttcccagtggtgggggcgcgagatgagctccgaagtcgcctccaccgctgccgggcgaagcagcttctggaccgcagaaccaacccggctcccaactggtgtcccccaacccgtcaagctcagcacagcctctttccctggggcgcctagctcaaagccgcctttctctttgcgctctttcaggtggacgcggtcaaacgatgccccgcagcctcctgggtctcagcacatattccacacctacgtcccctgacctgtgctcctagaagctggagagagcaggagccttcggtggggcagctcaaaatgtaggtaactgcgggccaggagcagcgcccaacctgtagcgctgcgctacccaaccatcggtccctgcctttgagcgtcgacggctgatcttttggtttgagggagagactggcgctggagttttgaattccgaatcatgtgcagaatgctgaatcttcccccagccaggacgaataagacagcgcggaaaagcagattctcgtaattctggaattgcatgttgcaaggagtctcctggatcttcgcacccagcttcgggtagggagggagtccgggtcccgggctaggccagcccggcaggtggagagggtccccggcagccccgcgcgcccctggccatgtctttaatgccctgccccttcatgtggccttctgagggttcccagggctggccagggttgtttcccacccgcgcgcgcgctctcacccccagccaaacccacctggcagggctccctccagccgagaccttttgattcccggctcccgcgctcccgcctccgcgccagcccgggaggtggccctggacagccggacctcgcccggccccggctgggaccatggtgtttctctcgggaaatgcttccgacagctccaactgcacccaaccgccggcaccggtgaacatttccaaggccattctgctcggggtgatcttggggggcctcattcttttcggggtgctgggtaacatcctagtgatcctctccgtagcctgtcaccgacacctgcactcagtcacgcactactacatcgtcaacctggcggtggccgacctcctgctcacctccacggtgctgcccttctccgccatcttcgaggtcctaggctactgggccttcggcagggtcttctgcaacatctgggcggcagtggatgtgctgtgctgcaccgcgtccatcatgggcctctgcatcatctccatcgaccgctacatcggcgtgagctacccgctgcgctacccaaccatcgtcacccagaggaggggtctcatggctctgctctgcgtctgggcactctccctggtcatatccattggacccctgttcggctggaggcagccggcccccgaggacgagaccatctgccagatcaacgaggagccgggctacgtgctcttctcagcgctg

SEQ ID NO: 1292 - DNA, 6000 bp, Homo sapiens
atatacaccgtggaatacgatgcagacataaaaaagaattgaattcatgtcctttgcagggacgtggatgaagctggaagccatcatgctcagcaaactaacataggaacagaaaatcaaacaccgcatgttctcactcataagtgggagttgaacaatgagaatacatggacacagggaggggaacaacacacactggggcctgtcaggggatggggggcaaggggagggaaagcattaggacaaatacctaatgcatgtggggcttaaaacctagatgatggggttgatatgtgcagcaaaccaccacggcacatgtacacctatgcaacaaacctgcacattctgcacatgtatcccagaacttaaagtaaaataataaataaataagaggatttaccacagttcaagttatagatcagaattttttttaaagcctgaatatttaaatatttaatttgtcatgacatacagtgtcttagtctgttcaggctgctataacaaaataccttagactagataatttataaacaaaagaaatatattgctcgggaagttgcaaagtccaagatcaaggtgccagaagatttgatgctaggcaagcgcccattcttcatagatgtcgccttctgtgtgttctcacatggcagaagggcaaagaggctccctctattataacagcactaagtccattcctgaggatggaaccctcgtgacctaatcatcttacaaagaccccacctcttaataccatcacctcggaatttaggctacaacatatgaattttggggagaacacaaacattcagacaatagcatatacatataatagaatcactgtggagctcttataaaccatgttttggtataaatgtaataatagaatgagttcatgatataatataagtgaaaaagtaagatatataattataggtacagtatgattacactcttttatataatgtatacaatgtataatatgtgaaatatatatgtatgcataataaatacatgtacataaaatatttcctggtatgtacatgtgtatatatatttttccatgtatataatttatacacattaacaaaaaatgagaaaatatgacaaatatttaacaatagctatttctccagtggcaggattacagataatttttattttcatacatttctgtctgacttttccaaatgtgctattatgagcataaattttataattaaatacaagtcaataagcattttaaagtgcctataacagcccatcagcaagtgaagagatgagataaaaatgtgtctgcacttggtacacatattgactttcttttacttccatttccagatgatattgacaaagatattgaaaaaatttgattaatatgcctcagcttagatttgctatgcgagagcaaagtcttattgttttaaaggaattatttgctgatcagctataggctgacttgacctcatattcctaccatgatagtcccacagtgtagggatggggtggtatgactcccaagacttggagtatgttattttctcagggcaatgaagatttggaaaaatgatggcaaagacagaattactatctcatcaaagacatccctcagcagtatctgtgggctgtgcagtgttctcagttcgataaaggattagaacacaatgcttctttggagagctgtgacttgatactgcatcaatacctttctgagaattgtttttcattttcttgcctctttaacttattaagccttaggagaattagttgaaaagccaagtctttggggtagatactaacattaagtcttctactctgtcatttgcaatcataaattccagaacacagctcctaattccattgtgtattgttttctaagggaatgatagacagattctttatttttttaaacctctaagcctaccacacttgccgagttcctcactagtcactaagaaagtcctgccaatcaatgcatgggtttatgtccattgctcagctcttctccaatcagactcattcccccagcatccctgacacaccactctaaaatgcggctgctgatggttcaccttcctcacttttgtctacaaatctcaatcctgctgattccacaaatcctacatcaagcaatatcattttatgagtctttccacaaccaccccttcaggggattcttcaatttctgtcacaccggaagtcttcagagtatcaccctcagagccaggcaagagggaccccggctagggtttcaggctttagagagtccagctctgactccttttggccataggactaatgtgatatgcccacctggagcctgtgccctcctttctagaccatgccctgggactcagaatcccttgccccagatggccacacaatcactttcaggtccattctctctgggcagacaacatcacaaatgtgtgtaccccaaggcctgaggccaagaaggcagctttctggctgtaggggctgaggtgttcacacacatttgcatggcccctcaagacaaagaacaagggggaaagtgagaagaaaagaagcagccagtgatcagggccagctcttgcaacttaaccatgttgggtcattctgattaaaccacttagctcaagtgtagtgctcaagacacttagcacattctccagctgaatttaccagtgttcatggactacctgggttagaaatatatttcactataaagtagcatacaaaatgagcagaaagggagttaataagattaataatagagttagtgaatattatgagctgagtttttgagaaacgtaatttctttcaacactaataacaaccttgtgggggttcattgtctccctttaaaaattaggaaaccaaggctttgccatggtcgcataggagggtcagaatagcatctttatgaccccagagcatactcctctccactccacctacccatgtgtacaactcagacactttctgggatgtccacgtcaactattctttaaagagtaaccaacagatggatagttttctgtttgtgaatcaatggtaggtgactgaaaaattggttctgagaggtcgttttgcaaggattgatggtcacaggctgagaagcagatttgaaagacctacctgctagcagcatgaagagctgctcttccttatcttagtattaactagttaattattggaggtgggtgcaggggtggattatgtgtattcttaattgttgtagagtggggactgggagttacaaagacttttgcaattttcgaccttgcagagctgagcaattttcagttgctttgcttgctgatagcactgcttcccttatctaccatggaacacatcttaatgaagaatttgcattcacagcatcaggttaatgaatacaaaacaaaacagtgtatatccctctgatggatgggatttcggaagcacagacattatacacatatttgatgataaagtactagaagtgcagggaattgaggtcaagcttcctcctaaggggactgaatcccagagagagcaggtgacttagtaatgagaagtggagctgtctgttcaaccaggatgctcctcctatggcacgaaattcagttttaaaaatatattaaattcaaatcaaatgtgttaggtgtgagttctatccctacaggtatgaggcagaggtggaggactttgtatacaatagagaaataaatacatatattaggtcttccatgacataggatttactgaccctctcatgggcattcctctgaggcattttgagatttattgctataaaagagcctcccaaacattatctcacttagaaaaggtaatcatattaatatgattttgttcacaggagagaatttaagtgccactgcttaaagttatctccttgttcctaggtttaaggagacctagtaaataagaacattccactttgtctgcatcaataaagatgaaagatgacttaggaggtgggaattggagtgggaaacatttttctatgttcccgatattctgaaacacatgtgactttattcaatcacaaggtaaacagattatgtaatttaccagaaaaaaagtaataagactggtggtgctaggttttcatactccagctattaatgaattaaagagagtaacactcctgaaaggataccattttctcaagaaaactggaaaagattgtgtggcatttaaaaaataccaaactctgtggccataatgctcttaaaattcatctgtctaaagaaattagaagtgaatcatattaaataaggtttagatatgtccactttatcttcctgaaaatataatttcattacaatcagatttgtcatattttatctgattttacttgctatttaaaacaccttataatttacttgcatatttagaattacaatattcttaatatacttcttgatcttaacaaaacctaggccaaatgttaatcaaatcaagctgttcaaagttactttatagcacattcctatgaacacaccatacacacagcaatatctagcaagggtgtcaatttttcgttatttttaaaagctcatttaaagaagttatttactacaaatgactctacacacacacacgcgcgcgcgcgcgcgcacacacacacacacacacacacaaacctttttaaagaaacgctagaacccaaccccctctaggccagaggaaaacattacagctgtatacgcacttgtgcctgttgccgtagagtaatacggtagcagcaggagattacggtactagctgggctactgcctgagttacgtcagcgagagctgcaaagttccttgctattcttttctggtgtcggggagctgaatattaaaagggtgattgtggagttaccggttatctgcatttttttttcttttcttattttgactctttttaaaaaatgcaggtaaagtgacagcggttcaggagcttaaagacatcagtggtggaggggtgagtcagcgggtgcaaaaggacaaggatttggtgcctcggagacacggtcccctctccgcctccagagaagagcaggcaggcagctcccgggaccgaagccgggtccacatcccccgcgcgcgagctggtggctcagcagcggcgcttcaggtgagtgcgccggggccggcgtcccgcagggccgagtgggtgagggcagacctcccccgccgtctggtgagacggaacccccacttttcccagcgcctcccgctttttccaccaggttttataccggcccctctaccccacccccgattcccttacatcttctgcgaagttgccttctactgaacaagtgtctttttaaccctgtgtttatcaccctcgaggtaggaggaaaagggtttctgcagtggcacgtttttaataccacctgtgaggtctccaacttgcgattttaacaagagtctttgcccgaggtcccacctcagggcccaaccccagaaggcaaggtgggcacttcctcacgccgcgctgtcctgccgagtccctgcggtaggttcgcagttgtggaaacccaggtttcttacgcagatggtggcccccagcccagaaaatcgaaggcggcccctgcccgctggcatgccggcttaatgtttacgcctgcaaaatccgcagtgactgtcacttgcaaagctccctctgcagagggacgtcctccccaccccgtcccccgccagtcccgctacggctggcagctggagcccctcgggtggccaacagtgaggcttggaaaggcgtcgtggacagacctgggtcgctttctgtcttcgggtccctcccggcttcgctcgggacctggctctcaagccagcttggctggtggacagaccggtgcgctctgcacacccgagtgcgaattccaccggcgtgagagtgagcgtgctcgtggtcctggccctgaggtccctgggtcgcagctgttccctctcccaggccgccccctccaggtgactgcgaggcaacctgttctaacggaaaccgagtacatcctccaga

SEQ ID NO: 1293 - DNA, 6000 bp, Homo sapiens
ttaggttttctaaattcttaatctgcatcattgtatttttgccatccttttctcaaaaagcagccaaacttaaacgtttatcgcatcaattagtaatcttctggcagatccactgaaaatggtattttcaataatggtagttgcaccagaactcctgaaagctctcctacaagaatatctcctttcccatcctttatttccttctccaggaaaatgtatttttaacagctaattagttttcttttttaacagctgaacacttaataattgagtttcattatgaaacaattcttgctgtttgaaagaagaaaaccaagggaaagaaatggaaaggaaagaaacaaacatgagcagagaaaaataagagaacgagaagtcggatgaagatctttatgctacaaaagaggcaattgcagttgcaatgtggaccgtgcaattgcacatctcagatagaacaggctgaggaaatcctaaagtagtgagtttcacctttttttcctctcaaaacatgtattagaagcattctgtggcaacttaataatttgggctgaaataaagtaaatagcggtacacgcttgatctttcatgagcacaatgaaatcagccaaattaaataaattgttaaaatagaagtattactgcaaagtcatttgaccatcattttgaattcctatgtgatcatcctgattgttgtatgctcctaataaagattttttattgcagccttgtcccatatacttcataagcgcagtacttaaaactttgtaattaatctcttgctttctcttttactaaaatttactcatggtaataaaaatcaataaaacattgcaataattatacaatcacaaatcacagagaatttaatcacttataaccatttcaaccagtgagtaagagctaaatgagatggaacacaaataatgggcttactaggaatttttaacatagttccaccttcttccactaagaaggtattctgaaatcaaatgtgtacacgcaacatgactatagggattattttagagccactttatgtatacatgtatatttttaagtaaattgatcaaatataaatatttaagtcaataatcaattacaagcgttcatgctttgattataactggtaataaattatttcttatacatgacactactaaactgaacatgccagcatgccaccctttgaaaccactaaaattgttatttttaggttcaaaggcttatctcaatatatggcagacattgtagttaagcatttagcatacattgtctgatttaatgctgtgggcatcttccatttaaatgaggaaaggtgatatgaattgcccaaggaaacccaatttgtaagtaatggaggtaggatttgaccctagatctatctgattgccaaggtttgaacctctgtgctgcacttgtactgataccagtattcccaaagaagggacaagtttcttaaagtgacgggtctctaagagaatctgatacgaaacatttacctagtgatatggttaggctttgtgttcccacccaaatcttatcttgaattgtaatccccaggcgttgagggagagacctggtgggacgtgactgaatcatgggggcagtctcccccctgctgttcttgtgataatgagtaaattctcaggatatctggtggttttataagcttctggcgtttcccctgcttgcacttctctttcctgccaccatgtgaagaaggtctgcttcccctttgccttctgccatgattgtaagtttcctgaggcttccccagccatgtggaactgagtcaattaaacctctttcctttctaaattacccagtcttgggtagtattggtgcaaaagtaactgtggtttttgccaatcaaagtaatggcaaaaactgtaattactgttgcaccaacataatatctttatagcagtgtgaaaatgaactaatacacctagaaaatttagaaattatagaaagtgaaatttaataaaattaaaatttcttaaagtgacctgtctctaagagaatgtgacatgacatgtttatctagaaaatttagacagcatagaaagtgaaatttaataaaataaaaaataactttagagggatcatcattcagagataaaagtattaagatgttgttaatatcctttcattttcctcttttaatgcttactgaattaaaagaatagaactcctatctgcttctatacaagaaatcggtcaagacagtggtgctttttctctgagcctcatcaggtcccttcaagtgtcagttagtctctaagcttttgtcatagttttggatttgcaaagggaattctgtaaatgtatttaagagaaaggcctagagagagttaaatttttatacacaagaaaacaagaaaaaatttctgtttctgtgttattgaaaaaaaaggatcagacaagaaaggtgatttttaaaaagagaaagaaaagagggtcaaattatgtggtggagtagccaaagacttctaagaacaagaatgtttgattttcaattttaagtcatttttactttgagatgcagttctcacaatctcgtacacctgttacaaaagggcttatctgagtggctttgtgtgcatcgcaaggaaagggactcagttccatttggagtcaatgacaaggccaatgagaaattgcaacaaaacgtggagcagaaaattagcattttctaagagacagaccgtcagagccaaaagtgaccatcaagtatatcttacctggaaattcacagaaatgttagggaaggcattagacttcaacagaatacggaatggaatggacatttgagctaatcttttctggattttaaaaggcagagtaactgctgagtgtcatggaaagaataaacttattgagtatctgataccattttagtcatgtacattgtttccaagttttactactttatgtaagtctacaactataatgagatgccacaacttgctcatcagaatgggtaagacgaaaaagaatgatgatattaggtgctggatatcccaatcaccctgatttaagcattatacattgaatacatgtatcaaaatgtcacatgtacccccaaaacctgtgtaattatatcaatttatgagatgttttaaaagactgaaaatactaagtgttttttcaaggatgtagagcaataaaatttccttacatcattattgagagtgtaaatgaaaactccaactctggaaattgttagggtcagaaagtttaccccacagcccatcattttcattcctgaatatataacaaagggaaaatagtgcatacaaacatcaaaaagctaagttgtccattcagaaattccttcttggcatgtatgttttccaattctgagaaaaattagttgagaaagaggggaaaaagtattctaattttcttgcaaaaattaaagcttcacaattaacatagagacattagttgttggaaggaatatattgagtgaagtaggaagcaagaacagaaacagacaagaatggtagtcaaaggttaaggtcaatgtctcctgggccagtgcaggagcatgtaggtaggaaatggtcatgatctcatcaattagcagtgcttgtacttgtggccatgttcaagtctgtgttcatggcccagtctgcattcttgcaaataaaataaacattagcacatgtagattcatataatactttataaatcctgggaggatgtcccaagaaacaaaaaattttgagagcaaaagaaatcctaaattgtcaatattgacatgtgattctgtgtggcgctgttaacctttcaaggagatctaaacgttatttgaatactactgaataatgtttgctggcacttttcagtgtttgagtattggctataggcttcagttctaagtaaacattttaccaaaagagagacaaagagaagaagatgtgactgttatgaaatactccaacatggaatcagaaactgatctaaatctgaactagcaaagatgatagcactttcaataataaaatgaaaatcacagcaggcagaaaaaatattttcctcattttaaaaaaataagcttatatgaagcaacatgcaccccaacagccaaactaaagatgcttttgcttgcaatcaatgattcagccagtgtcatgatgaaaatgaaagaaattgcccacatctttgatatttctcataaaacaaagataaagattacctgatagaaaaatgaagactgaatgtttaaaatctttattttaaaaatagctttagaataattgtgatattatctttcaacctttaaaatgattattaagcattaattttgtgttaataatcccttcttttaatgttttctggtgtcaagttctttacattgtattgaaatacataatcttgtcataatatcttggtaggtaataataattaaccgtgcatgtattaaatacttttttaaaccaaaaaaaaagcatctggaactttcagtataaccctgttataaaacaagtgattgaatctttactatgtccattcattattagtttaaaatacaaataaaatgtaatgaaaaacacaacttatgatttcagaaattctgatttcttatttgcaagttccaaaattactaaagttaaggaatttggaagcactacaaaaagtcatataaaagaacagctctagctctattcataataaataaggctagaacaaccccttattaatatttcccctaaatgatagctctaattataaataaagcacatgtccttgtcagaaggtttcagtgaaatgaaaccaatcagtgatagacaaatcagcttaaacagctccacttgccctaaaaagaatgttcattatggatggagctggaggccattactcttagcaaatttatgcaggaagagaaaacccaaataccacatgttctaacttgtggttagacacaaagaggggaacactggggcctacttaaaggtgaagggtgagaggagggagagaaaaaaaaaaagaaaacaagttaaaaaaaaaaagaaaaaagaatgttcttgtataaaagccaatccagaaaaaggtcaaaatactttctcatttatcctttgcaagctgcacagtaactacttagtgtagagcttcttaccacttccagtttcagttgtcttggttctggaattgttgtttcatatgcacaatacaactctgcaatttttaaatttgatctgattttatttttgacacaggaagtgaaaagacaaccaacaaaaggggagaaaatatgtaacaatcatatttctaataagggactattatctacagtatataaagagctcttactgatcaataataaagataagtaacctcatttaaaaaccagcaaaggatttgggtagatatttctttgagatatgcaaatatttgataagcacatgaaaaaatgttcaacatagttagtcatcagggaaatacaaataaaagccacaatgagataccactacatacacactatagtagctatcattaacgagacagacagtaacaaatgttggcaagaaagtggagaaactggaatcttcatacattgctcttcagaatgtaaaatggtggaaccagtttggaaaacagtctgctagttccttaaagggtgaagcatagattttccatataatccaggattttactcctaggtacagacccaacagaattataatcatatgtccacacaaaaacatacacaagaatgttcatagcagcattatccatagtagccagaaagtgaaaacagcccaaatgtccatcaactaataaattaataagcaaaatgaggtacaaaatgaggtacagttggcactctgtatcctagagttccatatctgagaatctgaccactattcaaaaatattcaaagaataactctccagggtggtggtgtatgtctgtagtcccagctactcaggagactgaggagtgaggatcgcttgagcccaggagtttggttgagttcagcccaagcaacac

SEQ ID NO: 1294 - DNA, 6000 bp, Homo sapiens
tataaattggtgacagattggttctagtcaccaagatttctctttcctggtctctggctaagtcttagtcacccttacccacccccccaccatatgcaaagaataaaacaatttcagagcatctaagttggtcagaacttggagcaattagttccatcttttcttttatagtggaggaaaagcaagttagaaaagtgaaataatatgccccaggtcctgcccctgggtagtggtagagcttggactagaactaagtcctttctggatttccagaatgattgaagagccttattggtttaatgttaacctttgtattgtagtttaaaagatacaatttctactcttccttcttgtttttgatttgtggccccattcagaatatgagaaaaaaaaaagacccaacaaaataaggaagatcaggtaagaacagaatgaaacacatagacagcaacacatatcgattcacaacacaactgggacacagagataagagaacacagtgaaagagaatgagacgacgtaagagtctctgcgttggggggaggggagagggctatctggagtgtagcgttgttagccccatcttgtggcttttttggatattgcctctaaggttaatttttgaaccactaaccaaccatagctggagacccaacaacttgttgggtgaatagatctaggataattgctttcaaactttcttgcacctcagaatcacctagcatgcaagtgaaaatgaagattcctgggcctcactttccacaagagagatgagtagattaaagtgggcccaggaaactgcttttagaaaactccccaggtaattgcaggagaaccatgaaccacatttaagaaacactgaaggcaattagagttagtggtattcatcccttgtcattgtgaggaaaggactatgctgaggaaaagtgtggaaagaaattattaagaactttaaaggtctgagattttaccctacttgcaagctaatgtgtgggccaagggaaaacgtctcctttgccccttgaagtttcactgcaaatcactgacaaaaaggttaagaagaggaaagggatagaagtttatttatttttttgagacagggtctggctctgtcacctgggctggagtgcactggcacaatctcgactcactgccacctcccggattcaagcgattctcccacctcagcctccagagtagctgggactgttaatggtggagggtgtccaggttattggcatcttgaacaaagaattggaaaaaacgcacaaactaagcagggaaggcatgaagggttttatggaaaatgaaagtaaactccacagtgtgggaaccggcctgagataggggctcaaaggccccattacagaacttttgggggtttaaataccctctggaggactccattggttacctggggtacgccctatgtaaatggagaggatgaagtaaagttacaaagttatttacttggcctacgccctatggggaggatatttgctgtcgcagctgaagtgtgaattggccttatgttccctgcctccagaccctattttcctgcctcaggctataggcgcacaccaccacacgcgcccgttgtattttttgtagagacggggttttgctatgttgcccaggctggttttgaacttgtgagctcaaggccttcttcgacctcccaaagtgctggggttacaggtgtgagccaccactggcacctggcccgatccgccatgcctggcctgatcatagttttatgtgacatgggagccttcagaatgaagacctaaagatagactggaaatggctcattttcatgcttaggttcagcaaagtatgagtagctgtgtagaaatatgattgaacaaaagggtatgagctaatgttaataaactgagtggggaacctaggcctgtctgtctagatttttcttggcctctacgaacatgcatttcttccttccaggtatgttacaggtagttagacaggcatgagcagggcaggagaggactctaccctccccaatcccctcaagcaagaatgccaggtgatggtttcacagttatcacactgcctttctaaaatggataatttggcagatgggccagagagagggagagagacaattccctgatggtccacagctgtcactaaagtgttacttgatgttaattgatattaaagcaggtgccaggcataggcaatttcccaaacagataaaaacacttgagattggtaatcagcttccaataaaatttcagaaattgggtgagtgagcttgggcatgcacattaagagacaaaatagtggagtatgaccttccgggggcattccactggaaaagggaagaaagcctcagatgggcatgtgtacaaattcctaagcacatggtgcatgctcacctcccaagcatagggagggcactgtgcattcgggcagctcacactgagggaagaatgaagggagagggcagcaagactccagaagtgggccagcatatgaagtcccaggatcagggttaaatgccacacttgtccctcaagttgcccgcttgggtctcttccaagtgtactttcttttctgtcccaaactttttaataaacttccactcttgctctgaaacttgcctcagttgctttttctgccttatgccctgtattagtccattttcacattgctataaagaactgccttagactgactgggtaatttataaaggaaagaggtttaattgactcacagttccgcatggctggcgaggcctcagaaaacttacaatcacagtggaaggtgaaggtgaagcaagacacctcctttgcaaggctgcaggaaggagaatgaacacaggaggaattaccaaacacttataaaaccatcagatctcgtgagaactcactcactatcaggagaacagcatggggggaaaaccacccctgtgattcaattacctccacctggtctctcccttgacacgtgggaattatggggattacaattcaagatgagatttggggtggggacacagccaaaccatatcatgcccctcagtctaattctttcttccaaggaggcaagaattgaggttgctgcagacccatacagattcactgctgttaactcagacaccttctacccctaacaggtatggggtaggaccctctctggaatcgggctcttatggcctacagtcaaacaaggtaggtcagataatttctttatggccagttattccacagaaaggcagagagaaagagtaatattttaaggtttcaagactggctttaggaaaaaggggttctggtttctatgacctgccttggggaaaaggaattctaatttctatggctatccttgggggactgagagataggagggcagagaaaaatttctgcttttgaggccattttggggtattgttttctgagtttcaacactaacaagtttgcatgccaaaatttcatgaatactgctaaaagatgaaactcctgggtcagagacaaaggataatactaacagcaataatagtagtcacagtattgtcattgggccagtttctgagccctaattcttgcaagactatgtgatgaaggctacagtaggttgcattacaggagaggggccccaagtttaggaaactcacatctcttataattgggaataagtctgccagatctttggagagacaagaattctgtcttccagggctattcaatgcagaaacatccttgaaaagatagttggaaaaaggcagtcagtgcctctgctctctcaagacatgcaggaacatgacacatgtgaattgtctcccaatagaaaaggaatgaaagtgcatcgtgtgaaaagtattctgcatctggaggctgtaaagtgatcaaactgaagcaggaatgaagatctgaaggaaccatccaggcctactgtacctggcaagaattgagcatgaactctagttatctcagctaaactttgcagaagtcctcaatttcactgttttaatgggcacttgcccattaaaacagtggttgtcatgagcactttccacatttatttcactttatcctcacacttcatggaaacagagctattacagccattgtactcatgagtaaatggactttgaaacatgatgacctgttcactttttcaaccacaggacaagaatcaggttttctcggagctcttctgccgccacccctctcttgtttctccttaccgcggcgggccagaagaagactggccaaaataagtaaacgactaatgcaagagtggcataggtcctcaaaaaggcgctgcaaacttaagtggtgattgcactcacggtgctttaagacccagccactacttcggaagcaggaagttggcatctctggtttctcccatccgcgggcctgaggttcccggggattggttaaggtagaggctccttttcccatttgcagccggaagtaggtttccagtaacacggaagccctactacgccgcctgggagacccttccgtgctaccccggccagggacccgcccggacctgaggaggcgggaactgcgggcagaaggcccaccccgctctcccaagatttcccgcgcacaccggaagtgggtggggctcctccgagcgccccctccctccccctcgccatcccccccgcacgattggccagcgccgctgtctctcagcgttccaggggaagggactgggcgattcccagcactcgggtcgcgggcgttggcagccgggcgggtgggaggggccggagcaaaagttccgggcgcccgagccggctgctcgtgccatggagcggagtcccgacgtgtcccccgggccttcccgctccttcaaggaggagttgctctgcgccgtctgctacgaccccttccgcgacgcagtcactctgcgctgcggccacaacttctgccgcgggtgcgtgagccgctgctgggaggtgcaggtgtcgcccacctgcccagtgtgcaaagaccgcgcgtcacccgccgacctgcgcaccaaccacaccctcaacaacctggtggagaagctgctgcgcgaggaggccgagggcgcgcgctggaccagctaccgcttctcgcgtgtctgccgcctgcaccgcggacagctcagcctcttctgcctcgaggacaaggagctgctgtgctgctcctgccaggccgacccccgacaccaggggcaccgcgtgcagccggtgaaggacactgcccacgactttcgggtaagagcagcgatttgcacgaggcggccgagccgggtctggaacccggaatcccttggctctgcggctcccgcccctcctgcctgccagagcccagtgtgcccgcgtctcgctcccagcatgcaggaccccacctctccgacccaggttctcagggctggctgcttcttcaaggtcggcccaggggcccgtgctgggagaagagaatgcgaacggaaagtgacagatgaggttacatgatgttcccaagacagcgacacttgcttctgaagggcccaggccatgcaccccttgtgccagccgggtgtggcccaggtccctttaagcggcacggatgtgggtgcagcccacgagccctgtagcttggcacactcaatttagaagtggaggaggagccacagacctggccaggggtgtggagtcttaagatttcccccaaaccagtcacctacttgccaagctgatcccgcggtttgtattatctgagtgagaggtctctgaccctggctggctggcctattctggtttataaagcagcatctccatatctagagttctagtgactatacataaacccaggagcaacttacagggcaaaactaacatggagaattctttgatataggaaggaaaaatgaatagaagataagggttagcctaactcagcattttccaaaacgtttaatcttagcccataggaagcaatgcattttcccttgtgacccagaacatatgtatcagttgaaacaaaagttttctgaacatgtccatgg

SEQ ID NO: 1295 - DNA, 6000 bp, Homo sapiens
ttttcttaacagcttacttgatatcaagacatgactttcatcgtcttgtcctgataaggaaagaagagaaatacacatagcaggtaaagaatgtgccggacccaaatgaaggccaatcccgtaacaagaaagctccagagctcttcagagaaatttgggcggattaagtagtcacttggaacagagtaatgggagaatcagaagtatcttggccaggagtagagattttgttccagcaaaataaaactttagaattaatattttaagtggaatgttattgattatagttttgtattcagtctgttcacttccttttgttttattgcttatatgtagcatgagcaagtgctatttataccaggtttgcatttgtatgcatgtaaataataacataatttaactctcactggctagactattttttcctttaagaagaatgcatacttgttcaagtttgagaaacgccagactaggatttctgaaggtccttccaagcactgttccttgctacagctctgctgtaaacatgatgccaggctcccaaatctcatcagtccttccatcatgcgccactgcacctacgataaaaatcccagctcctaagcagggccctctgtgtcctgtgggatctgtcctgcagttcctcatccccacgtgaaccatctctcagtcactgcacacccccacgctgtgccccgccgccacacccccgccacacacacacactgctcgccgcccctcaatcagctcctctcagcgaaatcacttccttggagactccttcccacaccccaccaaacaagagcagcctcccccttacaatctcccaccacatcctgtactgtccttcacaggaatgttgagctgaaactatgtaattattagtgagatgatacaaccatgcccacaaaggcaaggtctaggactgtccggtcctgtcctggacacagtactggcacacaaccagtaccttctgccagccctgacaatggtcaacagccactccaacccctaacacacagtcagctgcccgctgaagtctgagatgagagaaacctctctcaaagtccaggaccagtgtgtgaactgaacaaggctccaggtgatctttagagctacttgctctgtgactttggacaagtttcttaccctctctatgattctataattgtctataaaatggggataatagcacctaactgtagcaagctgaataattatttccccgaaaagatgtccccattctaatccccagaatcttgtatggcaaaagggactgtgcagatgattaaattaaggatcttgctgtggggaggttatcctggattacctgggtgggcccaatgtcatcacagggtccttatgagagggaggtagtagaactggtcaaagaagtcaaagtgacaacagatgcagaacggaatgacacacttcagagctggaagaaggggcctctgcaagctggagaaggcaaggaaataaattctccctggagcctccaaaaggaatgtagccctgcagacacctcgattttaggacttccaacctccagaaccataagagaacaaacttgtgctattttaaaccaccacatttattacgcagtaacaggaaacacaggacctgaaaatacgtttttgtgagcattaaatttgttgacgtgtgaacactgaaaagcatctagcacacagtgagcactgaaatgtgttagctgggatgattttgactttgctgttcctcacatagatagttggcaaagtaatctttctctaaaacacacatcccatcacaaactcccctgtttagaatctttcagagctccccacagcacaaaacggaaaaccccctcagtgaggcacacagcttcttacccagtcccttcttaccaagtggtggagggaatcttcccataccgctcccccacaaccacctaccttgaatcacacagaactacatcttgtctattgactgtctatgccccctgctcaaatgagaattccatgaagctaagaagaggccacagcacacaacagccatcagtacccatttgtctagtaaatgagtgatttgcaccctgcatcaggctgaccacacctggctctcattcttctcagatccatttgggactagactactcagcccctgacatcatcctgagtgtccactgacttgacaccatcattcttctgctaaaacccccagctgctgttcacagcaagggtgagccaccggcctcctggatcctcctgcacgtccctcctcattctaactacccttaaattccctcagtgcctagaaagtcaggctttcccacttctggacccttccaaatgctgctgcctctatctgaaataccctctttcacctggctaacacctcctcttccctcgggtctctgctggaagctccttgaggctggaaatggtctatcttgtctcctgcagtatccctgggaccttgcagtaccaggcatctgctggtgcatggctctctgctcttgaatcctggcttggccccagcctgggggctctgcctgggtgttctcagccctgaccccagcatctcctgatcagcacctcggccagccaaataggcatcagtcatgacctgaaccatgatccctcctttacctgggccccagacccctggctggccagcacttattccagctgtcccaaatcaggatctgtcacttctgccagtggaaacaggaaaagcattgacatggacccatgttaaacaaaaaagatgacaggagtaacagggttactcattgagacatgcgtactgacagcatccttacattccccttcaattaaactttgtcaaatgcatttggagcggaacagacttccgtatttaaaaaggtattgcaaaaaaagaaggcagggccacagagggggccagaaaccaggcacaggggactcgggcagctcctcctctccagtccatgcagcttcgggccagctacccagtgttctcccaattggggctctgactcatgcattagcaggtgatgaaataaattcaatgtttcacattctgggtaatttttaaaagtaacagaggccaggcggagtggctcacgcctgtaatcccagtagtttgggaggcagaggagggcagatcacttgaggccaggagttccagaccagcctggccaacatggtgaaaccctgcctctactagaaattaaaaaaaaaaaaaaattagccaggcgtgttggtacatgcctgtaatctcagctactcgggaggctgaggcaccagaatcgcttgaacccaggaggcggaggttgcagtgagctaagagcacgccactgcactctaacctgggcgatagaggtctcaaaaaaaaaaaaaaacaaagggaagtaacagaaaatatcagagtgccatggacatgttcagaaaacttttgtttcaactgatacatatgttctgggtcacaagggaaaatgcattgcttcctatgggctaagattaaacgttttggaaaatgctgagttaggctaacccttatcttctattcatttttccttcctatatcaaagaattctccatgttagttttgccctgtaagttgctcctgggtttatgtatagtcactagaactctagatatggagatgctgctttataaaccagaataggccagccagccagggtcagagacctctcactcagataatacaaaccgcgggatcagcttggcaagtaggtgactggtttgggggaaatcttaagactccacacccctggccaggtctgtggctcctcctccacttctaaattgagtgtgccaagctacagggctcgtgggctgcacccacatccgtgccgcttaaagggacctgggccacacccggctggcacaaggggtgcatggcctgggcccttcagaagcaagtgtcgctgtcttgggaacatcatgtaacctcatctgtcactttccgttcgcattctcttctcccagcacgggcccctgggccgaccttgaagaagcagccagccctgagaacctgggtcggagaggtggggtcctgcatgctgggagcgagacgcgggcacactgggctctggcaggcaggaggggcgggagccgcagagccaagggattccgggttccagacccggctcggccgcctcgtgcaaatcgctgctcttacccgaaagtcgtgggcagtgtccttcaccggctgcacgcggtgcccctggtgtcgggggtcggcctggcaggagcagcacagcagctccttgtcctcgaggcagaagaggctgagctgtccgcggtgcaggcggcagacacgcgagaagcggtagctggtccagcgcgcgccctcggcctcctcgcgcagcagcttctccaccaggttgttgagggtgtggttggtgcgcaggtcggcgggtgacgcgcggtctttgcacactgggcaggtgggcgacacctgcacctcccagcagcggctcacgcacccgcggcagaagttgtggccgcagcgcagagtgactgcgtcgcggaaggggtcgtagcagacggcgcagagcaactcctccttgaaggagcgggaaggcccgggggacacgtcgggactccgctccatggcacgagcagccggctcgggcgcccggaacttttgctccggcccctcccacccgcccggctgccaacgcccgcgacccgagtgctgggaatcgcccagtcccttcccctggaacgctgagagacagcggcgctggccaatcgtgcgggggggatggcgagggggagggagggggcgctcggaggagccccacccacttccggtgtgcgcgggaaatcttgggagagcggggtgggccttctgcccgcagttcccgcctcctcaggtccgggcgggtccctggccggggtagcacggaagggtctcccaggcggcgtagtagggcttccgtgttactggaaacctacttccggctgcaaatgggaaaaggagcctctaccttaaccaatccccgggaacctcaggcccgcggatgggagaaaccagagatgccaacttcctgcttccgaagtagtggctgggtcttaaagcaccgtgagtgcaatcaccacttaagtttgcagcgcctttttgaggacctatgccactcttgcattagtcgtttacttattttggccagtcttcttctggcccgccgcggtaaggagaaacaagagaggggtggcggcagaagagctccgagaaaacctgattcttgtcctgtggttgaaaaagtgaacaggtcatcatgtttcaaagtccatttactcatgagtacaatggctgtaatagctctgtttccatgaagtgtgaggataaagtgaaataaatgtggaaagtgctcatgacaaccactgttttaatgggcaagtgcccattaaaacagtgaaattgaggacttctgcaaagtttagctgagataactagagttcatgctcaattcttgccaggtacagtaggcctggatggttccttcagatcttcattcctgcttcagtttgatcactttacagcctccagatgcagaatacttttcacacgatgcactttcattccttttctattgggagacaattcacatgtgtcatgttcctgcatgtcttgagagagcagaggcactgactgcctttttccaactatcttttcaaggatgtttctgcattgaatagccctggaagacagaattcttgtctctccaaagatctggcagacttattcccaattataagagatgtgagtttcctaaacttggggcccctctcctgtaatgcaacctactgtagccttcatcacatagtcttgcaagaattagggctcagaaactggcccaatgacaatactgtgactactattattgctgttagtattatcctttgtctctgacccaggagtttcatcttttagcagtattcatgaaattttggcatgcaaacttgttagtgttgaaactcagaaaacaataccccaaaatggcctcaa

SEQ ID NO: 1296 - DNA, 6000 bp, Homo sapiens
aacacttttctttcttttgtcctttattaaaaaagatattgtgaaagatacaggtgagcaaccaaagggaagagatgcacagggtgaggtctgtgggaaggggcatggagcttcatgccttcccttaaagtgccaccctttgagaacctctgcaacttcagctctgaaccatgttcttttgggtttttaggaaggcttctttatgtaggcatgactgattacagtattggccatgggtgatcaactcaaccttcagcccctttccttccccaagttttagggatagcgctgaaagttcagccttctcatcatacctcagtttttctgatgaccagccctcatcctgaagctatctaagggatctaagatacctaagccaccaggcatctcattggcatacaaaaggctttttttttttttttttttttttttttttgagacagggtgttgctctgttgcccaagctaaattcatccactggtgcaatcatagctcattgcatcctcagtctcctgggctcaagcaatcctcttgcatcagcctcccaagcagctaaaactacaggtgcataccaccatgcccagctaatttttgtatttttttgtacagatgaagtcttgccacgttggccaggctggcctcgaactcttggcctcaagcaatcctcccacctcagcctctcaaagtgtttggattataggcatgagccaccatgcctggcctcaaaaaaacattcttaacactccagaaattccaagggttttagaagttgtgtgcacggtcagagaccaaatatatatttcttattatgtcatagtatcaccgatgcagttcaggctatggtaacagaaaggccaaaataaagtaacccaagcaacttaaatttctttctcatgtaaaagttaaactaggttcagactatgtccagggtaagcatggtggctggacggcattaggtacccggattcttaacatcatagactggatggctgctccaggtttcattgtcaggtggaggtggaaaagataaagtggaaaatattggaggatgtgctcattcccttgaggggcatgattctggagttgcgtgcataacttctactcttcaaccattgcggagaacttaatcacatggtcgcacctggtcacacatgcaagggagactgggaaatgtagccttcattttgggcaggctgtgaccatctgaaagtcagggattccaatattaaggaaagaaaagagaaagttcttttttaggttgagggcatgattttgagttctattcaagccatactcaacttattttggcctcaactgtggcccacttcgtaaacatagtgatgtctggttaaattagaggtagacatcccttggtgatgaagtacttttttcagtacttgtacccataagtttttctttgtccctttttttttttaaatggactatcactctgtcacccaggctggagtgcagtggcatgattatagctcactgtaacctctgcctcccaggttcaagcgattctcctgcctcagccccaccaaggagctgggactacaggcatacaccactatgcccagctagtttttgtatttatccattttttttgttagaatacttataaccatactgttcttttaaaataaaatttattctacataatagtaaatttacatgatgtaatttaaattccatcatttacaatggagagatgccagttacataatgtcgcagccctgccaatgatgggttttgctctttaccacctgggagcctgtgaataatttatttaccttatccaagcttccttttcctttctgcaaaccaggaataggactagcaacttcatagacggttgtgaagacaagctagacggcagatgaaagttcttggcacagagtgaacacttgataaactatatggcaggtatgtatgtactatctccccataaagcttactttaattgctatcatttctaaaaattatagctatagaatttttcatagcatttgtacacctatcacttaatttgggcttcacaataccctgggaaacaggtagaacagataatacttatttttctacttttctagattaggaaataaaagctcagaaagatggattcgcatgtccaaagtcacaacctcttccctcttgactggatccttcctgtgagcattgaaacctgctctactggctatcatcctaaatgacaaatcagtcctctttcaacccacgaccccctccaatatcccctggtctcaattgcccttggcagtcaagctttccaggactcatcagcgcgtgccgcctctgtgtcttcactttcagtttacttatcagcccaccccacttgacctttggctcttcattcatttgctcctggtaagagcttcacttgaagtcctctgctgtctctgactcttgccttagacaagtttatccattcttgtggtttcaaatgccatcccaaaagttaatcaccagctcaaccacctttgtgatctccagttagtgaaaagataagaaaagagaacctgaaccaggatgggtcaataggacaggaaagaaaacgaggaataggaaaaaagtttgtgggactcccaggacttagagattggagattgcatggctgcagggtaaggagggagagggagagtcaaaggtgacttctcttttgttgacattcacagggagggctggaacggggcttgtttgaagagcaatatgagccagggttatagacctgagtttggggtaagagtggaacatccaaatggaagagtccagcagctgaaaggacatttgttcaaaggcctttttcattacagttttctccttcttctgatccaggtatgcatccccccaacacccccacaattagggcctcccacatggcacttggtcagcttgagatacagaagtagaagggaaatatttttcttctctaactggggtagatcattattgcaacttatgccatatggagagcatcgccatggatagtgtcttttagggatttccatggaatttgagggctcctgaggcatttctgatgggtttttttaaaaggcagtaacaggcagaaatgcatgaccttgtcacctgagttgcttgtacatgacactggacagaacctagggagacctgatggcggagttggccaccccagagagtttctcaatgtctttttcatttaaaaagctatgggtttatgattctgtgaggtagatttgggagattctttttttaaagtgctgaagaattcaacaacctctgaaaactcacctttcccagaattggtcccagcaagataagattgtagttcatttatgtggccacacaggggcagcacacacaaactctccttttcttaaacaggtcttgattgtctttgcttttagttcccactgccacctcctagtacagactctcaacaactcacccaggtatctaacttttgtgccactcagccttcatcacttcatttccaagcgcaagaatacggaggggacacccactgtcagatgccctctgaccatgtccttgccatgtagtcaattacctgcctcctcatccccacaccttccctgctaacttcagtgtacctctgtctgacttgcctctccatccctggccaagttctcccacctgaccaccttctgacctgctgaccgctgtgtagtcaccaagattacctccaaaatgctgagtgctgggaacgtgacaaatctgtgaatagcacaaatgggaaggggtgggggggctccagctgtcaaggctggcagtgcccatcaatgggttgtgagccccatgctgggcaggtgggccctagctgcagagagtctgatcttcatcggacccagagtgacatccagccaatagctatgggtagtccactaattatactttgagaaacattgacttcctagctttgttaacttatctaagtctccagtttcttttcagaaatgggaaggagtcagtgcaatcttggaaactgagtgcttcctcagcacaactccagggggcgccattctcagaaagtacattgtgaatagcatcctctagaattgtgcaacagggcagctctgggaatcagattccaatcctgcacaggacacagaataaagaagcttgggacaggggctctggagaggacattgtaggatgaggatgatgctgcgtacactccacttttttcactttatgccaagtccaggtcacttcctcctcctactcaggagcaagtctggagttttcctagggatagggaagaagtgttgctaagtgcccttgagtgcctgctcacatatcaccggcctgaggaaagaggggaccagcctctgggcggggcccctggaaggggctgtccagcatctctaactattcttgtgctgtcctcagaccctacttagtcacagctcagggacctggtcttctgtgttcagggacctggaccggttctgccaaaatccctagtggtatttatgatttttcatgcctgcaaagggactggggccactttaggacatggagagattaggacacaagtgctcagtaccatgtagatataacatctcccactgcggggggtcttgggagaaccagcctgagaagttggtttcctccgcccgccctgcgcccccacccacctcacacacaccttttggcctccaaaaggctgcaggtggagtggacagaggatggaggggtgttaggaattggggagttaactgctcacaaggggcacataacatccgaggatcccatttgcggccgggggaatggcagagatcgccccccaggtctgcccggcgctcagggaattggtggcagcgtctatttcagagtttatggtaagaggctggagccggcacacacagacaacacaccccaccctttaaggaagtggggaggagagcagcaggggtgtggttaacaactcagaggaggagggagaatctaacctgtcagcccttttactcagccacagcctccggagccgttgcacacctacctgcccggccgacttacctgtacttgccgccgtcccggctcacctggcggtgcccgaggagtagtcgctggagtccgcgcctccctgggtgagtccctcccgcgagccagggctgagcgctgcgcccggcagaagttggaggcttgaccgggtggcaggggttggggacaattccgggatcctgggcacctgagctgggagttcccggagaaacggccagacccaggaaatcggagccgtgggtgctgtgcacatgcccggagctcgccagccttccgcggggaagaggggttctatttttggagtaaatttgacactatagggtgtttctccctctttgtcctctcaacatattcagacaggggaggctgggggaggctaggggtgacggtgtgagggcacagccaggctgctgcctctaaagctcaggttagggagccacggggtttcagctcctgcccccgctccccgctccctcccgggcccttccgcagccccaggggttatagtctcacccccagcccaccctgactctcctgcagccactccttgcacctgagaggtcatcttctgaatcaagccctggctggaggaaagcaagggtgttctggggcacaggggagctcgtgtgtatgtgtgtgtgtgtgtgtgtgtgtgtgtgtgtgtgtagttaacactggccattctggtatcttgagaagccgcctcctgagtgccactcaagggttaagttcagagctgcctctgcctgctgtcaggctgcgcgtgggcaccgctttgggtgggtgagcgtggagcggcatatgggtgatgttctgcaagccctgccacctgccctaagcctcgaccacatgacactggcatctccctataccccaaactgggagcaaaatccaagtccgctcatttaaggagccagcagaaggacaagagcagaaagttgtgcctagaggtggctttagccaggaggaactcggaag

SEQ ID NO: 1297 - DNA, 6000 bp, Homo sapiens
ttacacagttgtattcatgtgtcaaaattgtatagcttcaatttatgcattttaatgtatagaaattttacatttaaagaagaactgtaaaaaaataatagttgagtcacagctggggagtgggtggtgatattgatgaagcaagaaggcagaaggttggtaattgttgaggctgggtgatgcgtacatgggggtttattatactcttctgtttactttgtatatgtttgagatttttgataatcaacagcacaggagttctagccctgaggaaattagatattagccaagtaggtttcagctggagcaggagaggactgtaagttcaaaagcaccagtggtgggggctccaggagggacttgggagtgacgtgggggctctgagtaatgcattattccggatgacagtggacagagcagggcagaaggtcagggacaggagaaatgggtagagaggatgacaaaatggttaacttcacgggcttgcactcctcccccaaccagatgtccctctcactgtaggagtgccactgatcccagtcttcatcccctccagggcctcagttctgattcctgcactggttgttacaactgctcacaagtgcattctgtgcctctgtttccccatctatctcacagagcagtcgtcaccctctgtgacgggcattttctttcctaatggggaagggatttttcaggctgagggtcttctagtttcacaactccctggagtccagaagggctagcaagaggcagttagcccgagacagatgggtgcccaggcaagcaaataactgggcattccttcaaaccaggattatctaaatattagcatgacattttcctagtggagagagaaagaaatttatttacttctgagaaaaataatatgcctccttcttttcattccaattaaggaactgattacagttgattgactaaattagaaactgtcttgggaggcatgttaagaaaatgtaaaatctaaataatcaaatgcccctcctctttttggtttgacagcaacctattatgcattatttggtctttaggctgatgtaggcttgatggcacgcacattgcagacatatccaacagagatacgtcggtgccttcgggtttttaaatttatatcccagaggacactctgctctgtcaggagtgagctcaattcaccaacaatatgtggaactacatgagaaacctaagttaaaatggcaccaaagtccgggcgcggtggctcacgcctgtaatcccagcactttgggaggccgaggcaggcagatcacttgaggtcaggagtttgagaccagcctggccaacatgataaaaccccatctctactaaaaatacaaaaattatccaggcgtggtggtgcctacctgtagtcccagctactcaggaggatgaggcaggagaatggcttgaacctgggaggcggaggttgcagtgagccgagatcacatcactgcactccagcctgggtgacagagcgagactccatctcaagaaaaaaaaaatggcaccaaagtgatttcagaactaggcagggccttacagatggacttctaggcagctgcccggttggcccacctgttaatccatctctggctctaggccaggaagctgtggcatcaggctgggagacaggcagtctattaacctccggttaacaagaaagcaggaacaagagggcacgtggtttcttgccagcactcatttcttgtgtccttgctcatgtggggattgtggcacttaatccttccaagtgaatcttgtccttatcttttccagccccaccactccatgaatcagcttggcctagtagaaatcctcagtctagtgtcccaagattccaaatcccagttccattccgtgggttgtgggacatatattagtttctccatcagccacacgggatggtaacacctgcttccctgtgttgtgtggattcaatgaaatcatgtctgcaaagggcctagcagtgcctggtgcaggagctcagtgatgctggctaaattgcaaaccactcagaaggtctgctgttcacatagtggatgttccgtaattattaattggttagattgtaatgaggtgcagaagcaaatttttgttattctctgcctctttgcattttctccttcacttctgctctctcagttcctctgtctctgcctcatttcacccatttgtcaatttatcagatagagcccattgtgtacaaatcttcccctaaatgctagagaatcagagacaaatcgaacatgaagacagaatcccaccctagagaatcccacttttcaggtctgtgtgagaattatgggagcccaaaggtgggcacccctgagtcatgcctctctcttctcctctgcaggagatcatcacctccatcctgctgagcgggcggatcgggcccaacatccggttggctgagtgctatgggctgaggctgaagcacatgaagtccgatgagatccactggctgcacccacagatgacggtgggtgaggtgcaggacaagtatgagtgtctgcacgtggaagccgagtggaggtaggagtggattcctgggctctggaagtgggaaggagaggaatttagggtggggaggccctgggagtttctcccttagagcactcccctgcctcagaaacttctagcaaacctgagtggcattctaggcttagtcttcctccagtatccaatgcatgtattttccaggacctaacctgggcttcatagactatccccatcccagagccaacacctaaaggtaaccctaaacgggatgctgacagtgctaggggaaaagagagacagaagggtggggaggatggaaagcccaggtccagggctagcctgtgaacctaagagaaacagctgccatgagggagaaaggtggagagtcagggatagctcagaccaccacctgccagccacctccctgttgatggtctccagcccaaccgcagaggagggaaagagaaaaaccagccctgaatgagtggccacgagactcatgggcagcccttccctttgcactaggggatgggcttgcttctgcccttggggtcctactcctttcttcaggcaccagcttctctgtgtcaaccagagcctgaatgtcttgttgcaggtatgaccttcaaatccgctacttgccagaagacttcatggagagcctgaaggaggacaggaccacgctgctctatttttaccaacaggtaaaaagtactttatcttcttgccccgaggctcccattacacctcaaatgccaagcatgaaccgttctctcctagggagatggaaagacaaagcccagattatggagggcccaggctaggaagcttctcttgaagaaggtccttggtctatggtccgcggctccaaccctgcttttctctcagtatttaagcactggctaaactgccccatgtgctcccagctcctcttggacttttctggtggcccaggagacctggctagtgaaacagcaagagcaggtccaagatgaatcctgcagtgcttactacacagctctgcagactgttgtccactaatctagctctgccattcactaatctgatagcctgggggacctcatttacttgcatgaagctgtttcctctgctgtaaaattattatgggaatcataataataatacctactttatagggttgttgtagggaccagatgatatcattggctgctaaattgactctccaaagaaaaattcccttacacgtagcacttacctatttatttatttatttatttatttatttatttatttatttatttatttcaatgggttttttgggggaacaggtggtgttggttacatgaataatttctttaatggtgatttctgagatgttggtgcacccatcacccaagcagtgtgcactgtacccaatgtgtagtcttttatcactcaccccttcccactctttccccagagtctccaaagtcattcttatgcctttgcatcatcatggttagctcccccttatgagtgagaacatacaatgttggttttccattctggagttaattcacttagaataatggtctccaactccatccaggttgctgtaaatgccattatttcattcatttttatggcccttgccaatttctatggtgtaaataccacccccctcctcagcctatttcaagctactaataggatacctacttggcttacaaaacttctgaaaacttaataaccagctctcagcagctattttgagcatctcaaacttcctggacagaatgcgtatggagtgccaagcccagcaccaggtgcagagcaaagcgcagcatcagcaggagtggccattgctgttttctgtctgatattagttccttccaagatctccctcctggtttgccagagactgagctagacttttcttggcctgtgaatgacatttatcactacttaccaacagagctttggataaattactgacttcttgcaaaatctcagttttcttctatccaaaatggggggcaggggaggggaatctgaacttcctgcctgtggagcagggagagaatgcctgtaaaagcacctcgaaaacctcacaggctcggcctgtggaggcacaagcaccctttcccctcgtgctctccatccctgctccatgcttgtttgtggtggggtgggtggctgtcactcagggaggcagaatgaggcccttaatcttctgaggcctctgtgcagggaagtgggaggtgagggtgcaagcctgatgcttgacctttctccccaccagctccggaacgactacatgcagcgctacgccagcaaggtcagcgagggcatggccctgcagctgggctgcctggagctcaggtatgtggccctgaggcctctgctgggagggcgctgtgctgagctctgggcaggcccgacctttccccatgtccaagatgggaagcaggaatgagtgtgtgggagccaggaaggggagaggtggtgaccggcagcaggtgaggctctgaggggctgggtgttgggtcttcaggatggcaggggtagatgggccagccccctccctagtctcactctcctggcttccattgctgccactgctcttgcctgcaggctgctggcttcttccatctgtcaaccacctttgctgctgttcaagcgattcatcagatgtttcttgagcaccagactagaatctgggggacattcgagcctagagatgtctatctgtgttgcccattgctgtatccccatctccagtaggcacttgatcaatatgtgtgatattagtacatcatccagagaggccctcacacttccatgttggggaggtgacagatgtgtatacaattaatcataatacgaggcagaatgaggatggcaccaacttccatgtaggagccattcatcctgcctgagagcatcagcaagagggtatctgaattgccactggaaggaggagaaagatttcaatcagcagagaacaggggtcaggggagatacactccaggctcagggatcagtggaaggaaaagcatagactggagaatcgtgagcttggagggataagttggggctgatggtggaagacaccattgagacaatggcagtccaatgatatcattagaatgacattgttagaatgacataattagaatgacagtctaaaaaaataggccttattcttagctgccagggggtcattgccattcaggactgaggagggtgatatggctgacctgtgttctagccctgtcttgaccagggcagcaccattgagtttcaccatcccctgccttttcaccctctccttcccttctctctaccccttctctgtcttagagcagtggttttaacatctgcttgcaaatcataatcacctgggagcttaataaactggagacgtcctggccctacccttgggagatttgatttggcaggcctgggtgggaccttatcctaggcgtttttgaccagccccccaggtgacttgaatgc

SEQ ID NO: 1298 - DNA, 6000 bp, Homo sapiens
actccccccaccccccattttattgagatataattaacaaataaaaattgtgtatatttaaggtatatgacgtgatgttttgaaatgcacatacattgaaatgatgaccactttttatggtgggacggtgggaagacttaaaatctactttcttagcaaatttccagttatgatatggtgttattaactataagcaccacctgtatgttagacctccagaacatactcctcctacctgatgaacactttgaccctttatcatatcacacttcccatgtctccctctgcgaagtgggcacggcggggggctggagcattatgtaaactgcacatgaagtgtttggcgcagtgcttggcatgggataaacaccagtgaagtagcacttaggtgacacagtgtttcgctgcatttgtcaccagtgctataccttactcatttactcatcttcttattcctgtcgcctggcactgcattggaacaaagaaatacacatatctgtttaaactgaactctagaaagatttgtgtccaaaataacaatattttatattttgatgctgcaaagctgacacttctgggtttttttttttccttgccaagtttcttctgcacccagctcattctccaggggcacatggcagtggctgggcataactctgggtgtgccggctcccatggtctgcatttctaagcagtagggtgcagtcagcaaggagcctgtgatgggagcctgtgccagggcaaggctggggccatgctgctgcctgctggcaggagtgggggtcccagccttgacagcccctgaactgaacgggcctttctggccatccagctcattccagggtcctgaggccacctcttcctctcgcctcattctgcctcttgcacttctcttgcagaaatgtccaatcagggaagtaagtacgtcaataaggaaattcaaaatgctgtcaacggggtgaaacagataaagactctcatagaaaaaacaaacgaagagcgcaagacactgctcagcaacctagaagaagccaagaagaagaaagaggtcaggaggagccgctaccgcctccctgccttgaccatcccactggaggggagggagggggtcactgcgcggtgccctgctgggttgccatggtgacccgcagtcctcccaggctgtgtcagctgatgctgaggctgcaattaagaagcagggaaggttcatttgcttctgaaagcatcagggagtgagatcttggatctggttttgttatgagcctggcccagggcctaatgcccagattcatttcaatagatgtttctaagccctgatcacatgctagttccaagcaggctctggatggggtggcggcaggggcccagacaggcgtggcgtccaaccttcaggaagcttatctaataggggtgatatggttagggttaaggcaggcacacagcaccccacgtcttgctagagttctggactacttcataaagaaacatcttaagcccagtagtggatatagcaggtctagcctgtgcttaatgattcaacaaaactaaaacactataattcaatgaacaacttatttaagaaatcaagtctccttaagagtatcctacaaacctcctctcacggtcgccctacttcagatgctaagatgtagctacctgcaagcttcatgatccatcgtgcatgttaaaagcatttcaaaggctctgagaagttctgccgtaaagaaacctgtgtaactccatgaaacccagagttttccaaactgaccagggaattcatttttgtttttgtttttttttcctggccgctttgagcacagctccataggagccacttcagggattgctggcctggatgtggctctacctttttttcaagtttcatgccctttcttggccttagtatcagttctcaccattctatgagaatcctcaaatagctcctggggaaggggcatgacttgttctcacatttttgtggttatcactggagtttgacattcaacaattctggttttataataaagcacatcacatacatttggagaaaagagcctgctacttcttagttgaggagtaggtgagccagaaggcaaggaagtaggtagcaggggtggcgcttgtgtcttggctcagtgggaggtgggttgtccttgcccagcaggggacaggggatgatggagcaggacaaagacctcacctaactctggggtgtggataggctatttttttttttttgaagactaacacactcattcatagagactttaatatagaaaagtagaaaaggaaaagtttttccataatccttttgcccaaggacaagtcactgttaacatttgatctatttttcctattattttcttctatgcttttttgacagtggctatatttaaaattatgaatttttaacatataatattcaaaatggactataaacatcctttgtaatgatgtaccatctaccctttatatgaaccatagtttgtttaatctgtctcttttaagcatctgggttggttctgatttttttttttttgccataagctaatactgtttcaaatatttttaagtatctttttctttgtcaggggattcctttgagatagagtctttgttttgttttgttttgttttgttttgtttttttgagacagagtcttgctctgtcacccaggctggagtgcagtggtttgatcttggttcactacaacctccgcctcccaggttcaagcgattctcctgcctcagcatcccaagtagctgggagtgcaggtgtgcaccaccacaccagctaatttttgtatttttagtagagatggagtttcaccatgttagccaggctggtctcaaactcctgaccccaagtaatatgcctgcctcggcctcccaaagtgctgggattacaggtgtcagctgccgcacctggcctgagacagattcttacagaattattgggtcaagtggcaagggcccgttagagaattttgatagctggtgtggctttggtgctgaatgcctgccattccctttgcacgccaggaggcatggttgcaatagaaaggtaagattcagggagtctgcagcctgctttggaagatgaaatttaaacaccagaagcagagaataggaaatgaggcttcagtgagagggtagtcattgagtaggtgatcagagagagaggtggtgtccacatgggttccaggagttgggaagcttctaggagttagggaacagttggatcttgaaggatgagtggattctttaagccaggtgggaaggggattccaggtgggcgaatgaggggaagcttgaactggagcaagggtaggcacttgcatgctgggtggccagcctatgggaaggcctgccctggggcagagggcctggcacccagcagctctttgagtgcatgagcctgtggtctctgtgtggctcagccagccttgtgtcttcctgtaggatgccctaaatgagaccagggaatcagagacaaagctgaaggagctcccaggagtgtgcaatgagaccatgatggccctctgggaagagtgtaagccctgcctgaaacagacctgcatgaagttctacgcacgcgtctgcagaagtggctcaggcctggttggccgccaggtgaaaaggggacacatgagtggccaaggctctgagtggggaaggaggggagcctagtgaaatatgcttcattccgcatgccagatgcaattgattagcattggctggcttgcccagagtgccatgctccattggtaatgtctggcatgagtagagagagtggagtcatcaaaaggatgtaggccaggtatctgccttctcttagaaaactcatgcagcagtgcttagctggatgacataataaactgcttcgtgggatggcagagccctgtgtccacttatgtggaaggatttaagaatttttttttttttttgagacagggtctcactctgtcacccaggctggagtacagtgatgtgatcatgtttcactgcagcttcgacctcctgggttcaggtgatcctcccacctcagcctcccaagtagctgggactacaggcacgtaccaccacacccagctaatttttgtattttttttttgtaaacatggggtttggccatgttgcccaggctggtctcaaactcctaagctcaagtaatcctcctaccttggcctcccaaattgttgggattatagatgtgtgccactatgcccagccaatgtaagattttgtagtatattagtgttgctcctgtcctctgctgcagggcttttttgattgggactcagtgaattgctccaatccctgaagtcacatcagttggcccttagccgagcgggggtggatatcattggtggccaaagatgacagtgaatgaacctgaaatgttgggccttgtgacttttggggcctcccaggtgtctcaaaactgtcccccatggagggagataaaaggaaagagcatggacctgacagatggggtgctgggggctggtcccagctgggctgttggtcacttgctgtgtgactgttacagccatgggcagggcctggcctggctcaccagggggtgggaggccaggaggccgtggccttggtgagcttctcctaactgtgcccatgctggctgtcccagcttgaggagttcctgaaccagagctcgcccttctacttctggatgaatggtgaccgcatcgactccctgctggagaacgaccggcagcagacgcacatgctggatgtcatgcaggaccacttcagccgcgcgtccagcatcatagacgagctcttccaggacaggttcttcacccgggagccccaggatacctaccactacctgcccttcagcctgccccaccggaggcctcacttcttctttcccaagtcccgcatcgtccgcagcttgatgcccttctctccgtacgagcccctgaacttccacgccatgttccagcccttccttgagatgatacacgaggctcagcaggccatggacatccacttccatagcccggccttccagcacccgccaacagaattcatacgaggtgagaaggggtggaagctcatggccttttgagcaactcgttagatgctgagaaccatgccgagggctcagcgggtgtcatctcgatttttctccagcaatatcacaagggtgatattatccttatttaaagaggaaaaaaactgagctgggcatggtggctcatgcctgtgatgccagcactttgagaggccaaggcgggaggatcatttgaggccaggagtttgagaccagcctggccaagatagtgagaccctgtctctacaaaaataaaaacttaaaaaattagccgggtgtggtggtgcacacctgtagtctcagctactcgggaggctgaggcaagagagtcacctgagcctggaagttggaggctgcagtgagctatgattgcaccattgcattccagcctgggcaacagagtgagaccctgtctgtaaattaaaaaataaataaaaataacaataggaatcagtggagtccatctctgcatggctggatgactgactcttcttccctcgtgtgtccccagaaggcgacgatgaccggactgtgtgccgggagatccgccacaactccacgggctgcctgcggatgaaggaccagtgtgacaagtgccgggagatcttgtctgtgggtgagtcggggtccagaccacaagccgtcccccctgatcccttgtgtcctggggtcactggggcctcactggtgctgcctttatggagtcagacagataagcgtttggattccagctctgcagcctttgagctgtgtcccggggcaggtcctgagcctcatgcagcttcggttcctcatcttagaatgagatgatgatgcgaggctgtccctgaagtcggtgagatgtcgttagagatgcaaaagtgccctccacctggtcggccccatgttgaaaaaagcttgttgaaaaaagtcatccccctg

SEQ ID NO: 1299 - DNA, 6000 bp, Homo sapiens
taagtatcagaattgggattcgagccaaagcctcttgaccttccagaatttctggacctagttaaaaaaaatatgatttttattattattttttaaacggagaggttaggaatttaaaggaaagtacagatactatataaaaaaagatgcccatgaaaatgttaagttataataatagtggagcattgggcacaactgaaatggccaatcttgtgagaatggtaaaataaacttaggtccgtgagtaagtggagtattacatagccataaaagtatgcccttaaagaatatttgaagatggtgaatgtgaagaatcttgtataaactgcatggaagacagaaggaaatataccacagtgctaacctttgcctctgggtgatatgaattaccggtgattatttttcttattttccttttggtttagttttctccatttgaagaagcagataggagccggggctttgggattgaaaccctcaccatctgtgtgccctcttcactgtcttcccatcctccccacggctccctgttcacagtcattgattttctttctttcttttctctctttttttttttttttcctgagaccaagtctcactctgttgcccaggctggagtagagtagcgccatctcggctcactgcaacctccgccatccgggttcaagcagttctcatgcctcagcctctgagtagctgggactacaggcgcatgctgctacatccggctaatttttgtatttttagtagagacatggtttcaccaccttggccaggctggtctcgaactcctgatctcaagtaatccgcctgtcttggcctcccaaagtgctggggtgacaggtgtgaatcaatgcgccctgccaggtcattgattttcttaagcctccagccctgccctgcttggaaacgttttgggaagctgctcagttcaaagttcccaggagggtgtgcctggaggggagttgctcccaaagtctgcctgctccccccgccccccctgccccccaccccccgccatcttctcctcctcctcttcccctgagcagcccctttgtccacagaaccggccttttctggtagaaggagcaaggccaagtggtttaagccttcttagggagaatgaggctgtgtggtagtgctggggactcgagggccttggccttggcatggctcttccacccagggcagctggcagccaggctcccaggaggcagaggagatgaggggggaggtgagtccgagcaaaggaaaggaggtcggctgtgcagtcacggttctagaacattccttggatcagcagcatccatatcacctgcagactggctggaaaagcagtctcagaaccaacattataaccagccctgcagtgattcataagtactttaaaaagtggtcaatcatttcagcaaagcagagccacacagtccgggggaccacaggtggcctctgtgtgcttgtctcggttttcctgcccctctccagacatgttgattagacactgccaatgcccagcctcagacctcagtctaatttggaagtagtcagaatttactatgattacataagaccctcgtgtttacagaacacattcccctctctgaggtctggattagatccattttacagatgaagaaactgaggctcagatatttaagtgacttggaatcaaggaaagaatactggactaggggtcgggagggctgggctctcatcccagggttaccatgagcatgctgtggactctagggagtcccatgccctctctgggcttcagcctcaccgctagggtagagaggttgggtgagagaacgacctccttcccaggtctgagctggatggttcaccagggaccccaggctccctggagcagactctgtgcccgctgctgagtctggaattcctttcctgtatcttgcctttggctgccccattcttcatggcccagcaccctgtcttctggtcagaacctagttctgaatgggtttttccagaagttgttgctttcaggggcccctggcagagaggtgtttctggctggctttgtctctctggcatgacaaaggctctgttcctgctggaggcatttcagggctcagtgggcagctggggcagagcccgtgagaccacagccttcctggtgagcccggtctccgccccctaccccatctctggggaaggcgctgaccccatctcttctcccacgctgctccctggctctttgcgcctgattacttctcatgagaggcactccttgttaatgtgctactgagtgtccagatgggcctgctgggctgagcgggctttggatgtgaaccatttcaggaaggggaaccccatcgtcctgttggttctgtgatggcaaatgggtgagctcagataagcagttcttgggaggggcatggtgggggtggagtgcagggggaggggtttctgttttatgcaacagcctcagcttctgggaaagggtccattgtgtaagaccggggctatggcctgtgccccgtggctcagggcagccagcccagtggtggcaggaacactggcagggcagcctgctgtcggcttagaggggatgggcagtgtggagggcctggcagagcaagaggactcatccttccaaagggactttctctgggaagcctgctcctcgggccactgcgaaccctctctactctccgaagggaattgtccttcctggcttccactacttccacccctgaatgcacaggcagcccggcccaagtctcccactagggatgcagatggattcggtgtgaagggctggctgctgttgcctccggctcttgaaagtcaagttcaggtggtgctgagactccctgggggctgcagcgctgtggtgaatggggagcgtctgctggggtgaaggtttaggtgcacattgcagaggacgtggctggtctctgggatgcagtccctctgtggaggtggcatggggagggacggatgcatgacctaaggggggtattttcagtgtctgacatgatcgataccactctggacaaggaggccaggatgcagaaagcctgtgtgcctcgctgattgtcggggaggatgtggcttggacaagagcctggttcctccgatgccagggttcttgtttcttccactcaacattgctgtcctgcagtccctccctccctgcacctcctgccttcgctttcattcgaggtgtccatggcaagtctggtcatttccccccatttcctcaggaataaaagtgcagcagtgcctgctgtggggacagctgagggcagtgaggccctggggagctgctgcaggcagcaggtgggcgggacgccagcaggctgtctagctgttcccatgatggtctcctgttctctgcagaggcgtgcaaagactccagaattggaggcatgatgaagactctgctgctgtttgtggggctgctgctgacctgggagagtgggcaggtcctgggggaccagacggtctcagacaatgagctccagggtgagtagaccaagcatgatgttcctctggccacagggtgatgaggtcagagggcagggtagctaattctgctcagtgcctctctatcaggccccagtgttacagaccgtttttatcttgtgcactgggtctgggtgcctgtgtctgggcccactctgagcctcagctccgaggcccctggttcaggctctgcgtgcatcagactgccggcatttgcaggcatttcccaagcactttcggctgttgcatttcattcagctcttcccctcccaggccccttagcccagctcccaggcctcctccacgaagctgtgtctggaccaccggagctcttatccctctcccctttggagtgcccagagcttatccctcctgtgagctgacggtttctgcaggatcattgttaaaaacccagatcagacatgggtgtgagtctgtttcacctcttctcagctgggtgactttgggccactatcttgatctcatgacactccccccaccccccattttattgagatataattaacaaataaaaattgtgtatatttaaggtatatgacgtgatgttttgaaatgcacatacattgaaatgatgaccactttttatggtgggacggtgggaagacttaaaatctactttcttagcaaatttccagttatgatatggtgttattaactataagcaccacctgtatgttagacctccagaacatactcctcctacctgatgaacactttgaccctttatcatatcacacttcccatgtctccctctgcgaagtgggcacggcggggggctggagcattatgtaaactgcacatgaagtgtttggcgcagtgcttggcatgggataaacaccagtgaagtagcacttaggtgacacagtgtttcgctgcatttgtcaccagtgctataccttactcatttactcatcttcttattcctgtcgcctggcactgcattggaacaaagaaatacacatatctgtttaaactgaactctagaaagatttgtgtccaaaataacaatattttatattttgatgctgcaaagctgacacttctgggtttttttttttccttgccaagtttcttctgcacccagctcattctccaggggcacatggcagtggctgggcataactctgggtgtgccggctcccatggtctgcatttctaagcagtagggtgcagtcagcaaggagcctgtgatgggagcctgtgccagggcaaggctggggccatgctgctgcctgctggcaggagtgggggtcccagccttgacagcccctgaactgaacgggcctttctggccatccagctcattccagggtcctgaggccacctcttcctctcgcctcattctgcctcttgcacttctcttgcagaaatgtccaatcagggaagtaagtacgtcaataaggaaattcaaaatgctgtcaacggggtgaaacagataaagactctcatagaaaaaacaaacgaagagcgcaagacactgctcagcaacctagaagaagccaagaagaagaaagaggtcaggaggagccgctaccgcctccctgccttgaccatcccactggaggggagggagggggtcactgcgcggtgccctgctgggttgccatggtgacccgcagtcctcccaggctgtgtcagctgatgctgaggctgcaattaagaagcagggaaggttcatttgcttctgaaagcatcagggagtgagatcttggatctggttttgttatgagcctggcccagggcctaatgcccagattcatttcaatagatgtttctaagccctgatcacatgctagttccaagcaggctctggatggggtggcggcaggggcccagacaggcgtggcgtccaaccttcaggaagcttatctaataggggtgatatggttagggttaaggcaggcacacagcaccccacgtcttgctagagttctggactacttcataaagaaacatcttaagcccagtagtggatatagcaggtctagcctgtgcttaatgattcaacaaaactaaaacactataattcaatgaacaacttatttaagaaatcaagtctccttaagagtatcctacaaacctcctctcacggtcgccctacttcagatgctaagatgtagctacctgcaagcttcatgatccatcgtgcatgttaaaagcatttcaaaggctctgagaagttctgccgtaaagaaacctgtgtaactccatgaaacccagagttttccaaactgaccagggaattcatttttgtttttgtttttttttcctggccgctttgagcacagctccataggagccacttcagggattgctggcctggatgtggctctacctttttttcaagtttcatgccctttcttggccttagtatcagttctcaccattctatgagaatcctcaaatagctcctggggaaggggcatgacttgttctcacatttttgtggttatcactggagtttgacattcaacaattctggtt

SEQ ID NO: 1300 - DNA, 6000 bp, Homo sapiens
gaaggctcagggcaaaataaaaattcaggtccactggttcaaaaactatgaagaatttcaagaccgtcacagtagcccattaaaccaaacgtggatctgcaagggtcccacagccatgaagcccaccctgcttggttgggttccaaaaagatggggacagtgattgcttaagctctgtggatcaaggaccccggagaggccttctggctctccacatatctgctctgatcactcctaaacacaattctgtttcctccaggcctggcgggtcagtccagggacccccatcagtgtgatgtttccaggagtaggcgtttcaatacttcctgtgctctcttctccagcacaaggcccctctccatcccaccctcattatgtctgactctttactatttaaatgggtcaagagaagtggcgcttgtgtaatgtgaaggttaaggtcagtagggccagggaactgtgagattgtgtcttggactgggacagacagccgggctaaccgcgtgagaggggctcccagatgggcacgcgagttcaggctcttccctactggaagcgccgagcggccgcacctcagggtctctcctggagccagcacagctattcgtggtgatgatgcgccccccggcgcccccagcccggtgctgcaccggcccccacctcccggcttccagaaagctccccttgctttccgcggcattctttgggcgtgagtcatgcaggtttgcagccagccccaaagggggtgtgtgcgcgagcagagcgctataaatacggcgcctcccagtgcccacaacgcggcgtcgccaggaggagcgcgcgggcacagggtgccgctgaccggtgagatgtccccgtcttccctacccttgagcagagccacaccaggacggatgggcgggcaggggatggcagccaggcagagagggatgacacagctcgcagtcacaacccctgcgctttcgacggagcccaggaagccagggaggggaggtggccggagccccatcaccaggcagctgagccaggggccccggcgcaaccgccgcctgagagcacgagctccaaccacaattctgtggtgggggggtaaatagaacagatataatgatcatcctttcgcaaagatggggaaactgagacctggagacctgccgcgttgcgggagacccaggctagcaggtgacagagctggcctgcaccgagctccttcctgcagcatatcctctgcgaagatgcggatctctcagttgtggctttcggcttgcatgcatgagtcatctagttttcttctaaattctctagctctctggacactgttgcctgtaagtatgaggctgcggatttcagtatatgctgcaaccaccgaaatccgactttttctgcctcctaatgcatctgaggtgcatcagagaaaagtcacacaagatccaccaggcctcagacctctgattccacagtctcattttacagatgataatctgaggcctggagaggtttaggactggtgccaacactaaacagcaaataagtatcagaattgggattcgagccaaagcctcttgaccttccagaatttctggacctagttaaaaaaaatatgatttttattattattttttaaacggagaggttaggaatttaaaggaaagtacagatactatataaaaaaagatgcccatgaaaatgttaagttataataatagtggagcattgggcacaactgaaatggccaatcttgtgagaatggtaaaataaacttaggtccgtgagtaagtggagtattacatagccataaaagtatgcccttaaagaatatttgaagatggtgaatgtgaagaatcttgtataaactgcatggaagacagaaggaaatataccacagtgctaacctttgcctctgggtgatatgaattaccggtgattatttttcttattttccttttggtttagttttctccatttgaagaagcagataggagccggggctttgggattgaaaccctcaccatctgtgtgccctcttcactgtcttcccatcctccccacggctccctgttcacagtcattgattttctttctttcttttctctctttttttttttttttcctgagaccaagtctcactctgttgcccaggctggagtagagtagcgccatctcggctcactgcaacctccgccatccgggttcaagcagttctcatgcctcagcctctgagtagctgggactacaggcgcatgctgctacatccggctaatttttgtatttttagtagagacatggtttcaccaccttggccaggctggtctcgaactcctgatctcaagtaatccgcctgtcttggcctcccaaagtgctggggtgacaggtgtgaatcaatgcgccctgccaggtcattgattttcttaagcctccagccctgccctgcttggaaacgttttgggaagctgctcagttcaaagttcccaggagggtgtgcctggaggggagttgctcccaaagtctgcctgctccccccgccccccctgccccccaccccccgccatcttctcctcctcctcttcccctgagcagcccctttgtccacagaaccggccttttctggtagaaggagcaaggccaagtggtttaagccttcttagggagaatgaggctgtgtggtagtgctggggactcgagggccttggccttggcatggctcttccacccagggcagctggcagccaggctcccaggaggcagaggagatgaggggggaggtgagtccgagcaaaggaaaggaggtcggctgtgcagtcacggttctagaacattccttggatcagcagcatccatatcacctgcagactggctggaaaagcagtctcagaaccaacattataaccagccctgcagtgattcataagtactttaaaaagtggtcaatcatttcagcaaagcagagccacacagtccgggggaccacaggtggcctctgtgtgcttgtctcggttttcctgcccctctccagacatgttgattagacactgccaatgcccagcctcagacctcagtctaatttggaagtagtcagaatttactatgattacataagaccctcgtgtttacagaacacattcccctctctgaggtctggattagatccattttacagatgaagaaactgaggctcagatatttaagtgacttggaatcaaggaaagaatactggactaggggtcgggagggctgggctctcatcccagggttaccatgagcatgctgtggactctagggagtcccatgccctctctgggcttcagcctcaccgctagggtagagaggttgggtgagagaacgacctccttcccaggtctgagctggatggttcaccagggaccccaggctccctggagcagactctgtgcccgctgctgagtctggaattcctttcctgtatcttgcctttggctgccccattcttcatggcccagcaccctgtcttctggtcagaacctagttctgaatgggtttttccagaagttgttgctttcaggggcccctggcagagaggtgtttctggctggctttgtctctctggcatgacaaaggctctgttcctgctggaggcatttcagggctcagtgggcagctggggcagagcccgtgagaccacagccttcctggtgagcccggtctccgccccctaccccatctctggggaaggcgctgaccccatctcttctcccacgctgctccctggctctttgcgcctgattacttctcatgagaggcactccttgttaatgtgctactgagtgtccagatgggcctgctgggctgagcgggctttggatgtgaaccatttcaggaaggggaaccccatcgtcctgttggttctgtgatggcaaatgggtgagctcagataagcagttcttgggaggggcatggtgggggtggagtgcagggggaggggtttctgttttatgcaacagcctcagcttctgggaaagggtccattgtgtaagaccggggctatggcctgtgccccgtggctcagggcagccagcccagtggtggcaggaacactggcagggcagcctgctgtcggcttagaggggatgggcagtgtggagggcctggcagagcaagaggactcatccttccaaagggactttctctgggaagcctgctcctcgggccactgcgaaccctctctactctccgaagggaattgtccttcctggcttccactacttccacccctgaatgcacaggcagcccggcccaagtctcccactagggatgcagatggattcggtgtgaagggctggctgctgttgcctccggctcttgaaagtcaagttcaggtggtgctgagactccctgggggctgcagcgctgtggtgaatggggagcgtctgctggggtgaaggtttaggtgcacattgcagaggacgtggctggtctctgggatgcagtccctctgtggaggtggcatggggagggacggatgcatgacctaaggggggtattttcagtgtctgacatgatcgataccactctggacaaggaggccaggatgcagaaagcctgtgtgcctcgctgattgtcggggaggatgtggcttggacaagagcctggttcctccgatgccagggttcttgtttcttccactcaacattgctgtcctgcagtccctccctccctgcacctcctgccttcgctttcattcgaggtgtccatggcaagtctggtcatttccccccatttcctcaggaataaaagtgcagcagtgcctgctgtggggacagctgagggcagtgaggccctggggagctgctgcaggcagcaggtgggcgggacgccagcaggctgtctagctgttcccatgatggtctcctgttctctgcagaggcgtgcaaagactccagaattggaggcatgatgaagactctgctgctgtttgtggggctgctgctgacctgggagagtgggcaggtcctgggggaccagacggtctcagacaatgagctccagggtgagtagaccaagcatgatgttcctctggccacagggtgatgaggtcagagggcagggtagctaattctgctcagtgcctctctatcaggccccagtgttacagaccgtttttatcttgtgcactgggtctgggtgcctgtgtctgggcccactctgagcctcagctccgaggcccctggttcaggctctgcgtgcatcagactgccggcatttgcaggcatttcccaagcactttcggctgttgcatttcattcagctcttcccctcccaggccccttagcccagctcccaggcctcctccacgaagctgtgtctggaccaccggagctcttatccctctcccctttggagtgcccagagcttatccctcctgtgagctgacggtttctgcaggatcattgttaaaaacccagatcagacatgggtgtgagtctgtttcacctcttctcagctgggtgactttgggccactatcttgatctcatgacactccccccaccccccattttattgagatataattaacaaataaaaattgtgtatatttaaggtatatgacgtgatgttttgaaatgcacatacattgaaatgatgaccactttttatggtgggacggtgggaagacttaaaatctactttcttagcaaatttccagttatgatatggtgttattaactataagcaccacctgtatgttagacctccagaacatactcctcctacctgatgaacactttgaccctttatcatatcacacttcccatgtctccctctgcgaagtgggcacggcggggggctggagcattatgtaaactgcacatgaagtgtttggcgcagtgcttggcatgggataaacaccagtgaagtagcacttaggtgacacagtgtttcgctgcatttgtcaccagtgctataccttactcatttactcatcttcttattcctgtcgcctggcactgcattggaacaaagaaat

SEQ ID NO: 1301 - DNA, 6000 bp, Homo sapiens
gtagcctcttctgggacatttttttcttcttctgggttaatggccttctaatacttggcttggctctaggttaggttgcagggagccgtggagatgatccattcccgattcctcatcgtccagatggaagaaactgaggcccaagggcaaagtgattagtccgaggtcacccagtgtctaggggcacacctaggactgtaatcagactttcatggacctggtctgggttctcccacttagtcatgggccttgaagattccccgaggctgcctcctgaaaaggactggggtcctagtggcccctggacgttgggcaagcaagggactgggcctccatgttgtgcctccatagtcctgatcctgaactggaaaactcagcccctgaccacgcagctctcctttaagcccctttgtttcacatggttttcaaagtctgccacccacagtggggctgcctgtacccgccctgtccacccattgccccagctgtcagccccttgacttctctcctggggcttaaacatccctggctccaaaatgggcagctcactttcttccccaagaagtagctgcacctccagggttcctagatttgcccctccttgccagggggaggggtggctgcgacaggagattctccctgctctcagcagaaggaactccagcagttggagaccagcaaacccctctggacacagatctgatttcctaactgggaaggctcagggcaaaataaaaattcaggtccactggttcaaaaactatgaagaatttcaagaccgtcacagtagcccattaaaccaaacgtggatctgcaagggtcccacagccatgaagcccaccctgcttggttgggttccaaaaagatggggacagtgattgcttaagctctgtggatcaaggaccccggagaggccttctggctctccacatatctgctctgatcactcctaaacacaattctgtttcctccaggcctggcgggtcagtccagggacccccatcagtgtgatgtttccaggagtaggcgtttcaatacttcctgtgctctcttctccagcacaaggcccctctccatcccaccctcattatgtctgactctttactatttaaatgggtcaagagaagtggcgcttgtgtaatgtgaaggttaaggtcagtagggccagggaactgtgagattgtgtcttggactgggacagacagccgggctaaccgcgtgagaggggctcccagatgggcacgcgagttcaggctcttccctactggaagcgccgagcggccgcacctcagggtctctcctggagccagcacagctattcgtggtgatgatgcgccccccggcgcccccagcccggtgctgcaccggcccccacctcccggcttccagaaagctccccttgctttccgcggcattctttgggcgtgagtcatgcaggtttgcagccagccccaaagggggtgtgtgcgcgagcagagcgctataaatacggcgcctcccagtgcccacaacgcggcgtcgccaggaggagcgcgcgggcacagggtgccgctgaccggtgagatgtccccgtcttccctacccttgagcagagccacaccaggacggatgggcgggcaggggatggcagccaggcagagagggatgacacagctcgcagtcacaacccctgcgctttcgacggagcccaggaagccagggaggggaggtggccggagccccatcaccaggcagctgagccaggggccccggcgcaaccgccgcctgagagcacgagctccaaccacaattctgtggtgggggggtaaatagaacagatataatgatcatcctttcgcaaagatggggaaactgagacctggagacctgccgcgttgcgggagacccaggctagcaggtgacagagctggcctgcaccgagctccttcctgcagcatatcctctgcgaagatgcggatctctcagttgtggctttcggcttgcatgcatgagtcatctagttttcttctaaattctctagctctctggacactgttgcctgtaagtatgaggctgcggatttcagtatatgctgcaaccaccgaaatccgactttttctgcctcctaatgcatctgaggtgcatcagagaaaagtcacacaagatccaccaggcctcagacctctgattccacagtctcattttacagatgataatctgaggcctggagaggtttaggactggtgccaacactaaacagcaaataagtatcagaattgggattcgagccaaagcctcttgaccttccagaatttctggacctagttaaaaaaaatatgatttttattattattttttaaacggagaggttaggaatttaaaggaaagtacagatactatataaaaaaagatgcccatgaaaatgttaagttataataatagtggagcattgggcacaactgaaatggccaatcttgtgagaatggtaaaataaacttaggtccgtgagtaagtggagtattacatagccataaaagtatgcccttaaagaatatttgaagatggtgaatgtgaagaatcttgtataaactgcatggaagacagaaggaaatataccacagtgctaacctttgcctctgggtgatatgaattaccggtgattatttttcttattttccttttggtttagttttctccatttgaagaagcagataggagccggggctttgggattgaaaccctcaccatctgtgtgccctcttcactgtcttcccatcctccccacggctccctgttcacagtcattgattttctttctttcttttctctctttttttttttttttcctgagaccaagtctcactctgttgcccaggctggagtagagtagcgccatctcggctcactgcaacctccgccatccgggttcaagcagttctcatgcctcagcctctgagtagctgggactacaggcgcatgctgctacatccggctaatttttgtatttttagtagagacatggtttcaccaccttggccaggctggtctcgaactcctgatctcaagtaatccgcctgtcttggcctcccaaagtgctggggtgacaggtgtgaatcaatgcgccctgccaggtcattgattttcttaagcctccagccctgccctgcttggaaacgttttgggaagctgctcagttcaaagttcccaggagggtgtgcctggaggggagttgctcccaaagtctgcctgctccccccgccccccctgccccccaccccccgccatcttctcctcctcctcttcccctgagcagcccctttgtccacagaaccggccttttctggtagaaggagcaaggccaagtggtttaagccttcttagggagaatgaggctgtgtggtagtgctggggactcgagggccttggccttggcatggctcttccacccagggcagctggcagccaggctcccaggaggcagaggagatgaggggggaggtgagtccgagcaaaggaaaggaggtcggctgtgcagtcacggttctagaacattccttggatcagcagcatccatatcacctgcagactggctggaaaagcagtctcagaaccaacattataaccagccctgcagtgattcataagtactttaaaaagtggtcaatcatttcagcaaagcagagccacacagtccgggggaccacaggtggcctctgtgtgcttgtctcggttttcctgcccctctccagacatgttgattagacactgccaatgcccagcctcagacctcagtctaatttggaagtagtcagaatttactatgattacataagaccctcgtgtttacagaacacattcccctctctgaggtctggattagatccattttacagatgaagaaactgaggctcagatatttaagtgacttggaatcaaggaaagaatactggactaggggtcgggagggctgggctctcatcccagggttaccatgagcatgctgtggactctagggagtcccatgccctctctgggcttcagcctcaccgctagggtagagaggttgggtgagagaacgacctccttcccaggtctgagctggatggttcaccagggaccccaggctccctggagcagactctgtgcccgctgctgagtctggaattcctttcctgtatcttgcctttggctgccccattcttcatggcccagcaccctgtcttctggtcagaacctagttctgaatgggtttttccagaagttgttgctttcaggggcccctggcagagaggtgtttctggctggctttgtctctctggcatgacaaaggctctgttcctgctggaggcatttcagggctcagtgggcagctggggcagagcccgtgagaccacagccttcctggtgagcccggtctccgccccctaccccatctctggggaaggcgctgaccccatctcttctcccacgctgctccctggctctttgcgcctgattacttctcatgagaggcactccttgttaatgtgctactgagtgtccagatgggcctgctgggctgagcgggctttggatgtgaaccatttcaggaaggggaaccccatcgtcctgttggttctgtgatggcaaatgggtgagctcagataagcagttcttgggaggggcatggtgggggtggagtgcagggggaggggtttctgttttatgcaacagcctcagcttctgggaaagggtccattgtgtaagaccggggctatggcctgtgccccgtggctcagggcagccagcccagtggtggcaggaacactggcagggcagcctgctgtcggcttagaggggatgggcagtgtggagggcctggcagagcaagaggactcatccttccaaagggactttctctgggaagcctgctcctcgggccactgcgaaccctctctactctccgaagggaattgtccttcctggcttccactacttccacccctgaatgcacaggcagcccggcccaagtctcccactagggatgcagatggattcggtgtgaagggctggctgctgttgcctccggctcttgaaagtcaagttcaggtggtgctgagactccctgggggctgcagcgctgtggtgaatggggagcgtctgctggggtgaaggtttaggtgcacattgcagaggacgtggctggtctctgggatgcagtccctctgtggaggtggcatggggagggacggatgcatgacctaaggggggtattttcagtgtctgacatgatcgataccactctggacaaggaggccaggatgcagaaagcctgtgtgcctcgctgattgtcggggaggatgtggcttggacaagagcctggttcctccgatgccagggttcttgtttcttccactcaacattgctgtcctgcagtccctccctccctgcacctcctgccttcgctttcattcgaggtgtccatggcaagtctggtcatttccccccatttcctcaggaataaaagtgcagcagtgcctgctgtggggacagctgagggcagtgaggccctggggagctgctgcaggcagcaggtgggcgggacgccagcaggctgtctagctgttcccatgatggtctcctgttctctgcagaggcgtgcaaagactccagaattggaggcatgatgaagactctgctgctgtttgtggggctgctgctgacctgggagagtgggcaggtcctgggggaccagacggtctcagacaatgagctccagggtgagtagaccaagcatgatgttcctctggccacagggtgatgaggtcagagggcagggtagctaattctgctcagtgcctctctatcaggccccagtgttacagaccgtttttatcttgtgcactgggtctgggtgcctgtgtctgggcccactctgagcctcagctccgaggcccctggttcaggctctgcgtgcatcagactgccggcatttgcaggcatttcccaagcactttcggctgttgcatttcattcagctct

SEQ ID NO: 1302 - DNA, 6000 bp, Homo sapiens
aggagattccattgtatatccattgtgtagttccactgagaaccattgatctaaaataagtattaattgccatctgggtagttgtggaaaaagtaggtttgacttaaagcagatctggcaccattttttgaagggctcattcacctaataattggagctaaaggtcacagtaaagcaactctggagtgaaatacagaacacatagccactcaatagcatgagggacagtgaaggtggcataagcgacatttgtttacttgtaggcacatgctaaacagttcaggattggctagcctcagacctttacccaagaagatcctgaatggggagatgagacacacccactgatggagtgaatgtttctggactttatggaggtccggagaaaatcactcagaatacctctgtatcatctatgggctgatttcactggatatgattttattagccaccatttgatcatgggcctgtaattgattaaataaatgtatatacccattaaataattacagcttggaaagtgattcttttttactaagaatcatttgtgatctttttactaagatcgtttgtgtaatgatcgaattagggtaattagcaaatccatccttttgtttgtttgtttgtttgtttttggatggagtctcactctgttgccaggctggagtgcagtggtgcgatctcagctcactgtaacctccagctcccgggttcaagcaattctcctgcctcagcctcccgagtagctgggactgcaggcgtgtgccaccatgcccagctaatttttgtatttttagtagagacagggtttcaccatgttggccaggatggtctcttgacatagtgatctccccacctcggcctcctgaagtgttgggattataggcgtgagccactgcacccagcctttcactaagttaaaaaaaattaaaactgacacgagaatggtacatatttgtggggtacaatgtgatgttttgatacgtgcacacattgtgtaaggatcaaattagggtaattaccaaatccatctcaaacatttctttgtggtgagaacattgtaagttctctcttctacctatgttgaaatatacattattcaaaaaataagaggtgctggtgaggttgtggataaaagggaaggcttatatacactgttggtgggagtgtaaattagttcaaccattttggaaagcagtgtgatgattcctgaaagagctaaaaacagaattaacatttcacccagcaatctcattactgggtatatataggaatataaattgctctgccataacgacacatgcactcatatgttcattgcagcactattctcaatagcagaggcatggaatcaacctaaatgcccatcagtggcagactggataaggaaaatatggtatatatacaccatggaatactatggtatacaccatggaatactatgcagccataaaaaagaacgagatcatgtcttttgcaggaacatggatggagctggaggctattattctaagtgaagtaacacaggaacagaaaacaaaattctgcatgttttcacttataagtgggagctgaatgatgagaacacatggacacatagaggggagcaatagatactgggacctaaaaaaaaagttaaactctactatgcgatagaataccagaacttatccctcccatctgactttaactgtgtactggttgaccaatctctcaccatcctccctccctgctccccttggagagtgattctcttatttttttcatttttatttttgagagacagggtctcactttattgcccaggctggagtgcagtggtgcgatcgtagctcactgcagccttgacctcctgggctcaagcgatactccatctcagcttcctgagtagctgagattgcgggcatgcactaccatgcttggctaattttttaatttttgtagaaactgggtcttgctatgttgccctggctggtcttgaactcctggactcaagtgatcctcccacctcagcctcccaaagtgctaggattacaggtgtgagtcaccacgcccatctgagagtgattcttaatcacaggccacaggatactgctcttgcccattcctagtttgttccagctgtatcagactgctggctgagctgtcctgcttgtggtgctgagccagacaaaggctggttggggatgtgtaataaggacactgcgtagcgaagcagccccagagacattcaggcagccagagatggtgcacaaagcatagataaacagataaatgcaagggtctttactcatccctccctggccctccccatggctctgactctccaagaaaataaatcaagctaatgccccaaacccagctgtgtaagtccataatgggagacagaggatcaaacagcagcacctgccaagaagatgatgcattctctatgaatcagcccagtgactcagcatctgataaagcttatttggagtgtttagggcaagggaaggggtggtcctgttctgctttgtgtgctcaggccctccggcattggctggtccaaggctccccactggcattggctagtccagggctgggccaagagtttcaagagagatgaggtccagaatgtcaaagggctggggaaaagtctgcaaaccacggcaaggcaaggagctgcaagcctggaggtcactgggaaaagcagactacgttgccttcaaatatcagaaggggcactatgggagagataggctggattttctctgtgtggctccagagggcagaactgggctccggattggcccatacacgagccagactgtgactcaaccaaagaaggccctaactttatcaacagctttactagacaaatggttgcatggcaggtagtgagctccctgttattggtggcattcaaacatgggcaggatgaccaccgggtgcagatgctggggatggggtaggaatcaagcagtgtgtgagtcctgaaccaatcaacgtctatgatctgcttagaatatgaaacatctggtgatgcatttatggcgctttcaaaatttacacttttctttcctcaaagtttgaccttctgaaccttgtttgcttagtagtgggaataatcaagtaattattcccaagggatcacagtcatgactgtgaatctgtgaatcatgctattttctcccaagtcctttcttcctctcttcccttcccctaattcagctggctaaggcggatctcactgactgacctccaaagtctaatttttaaaaatataactagatttatgccttctgttccggatgctgagggagctacagaacagaaaagttacaaggagcgagctcaaaaacaattcttctaacctcaggtattgataaggagcaggcactgataaggagcaggcactgtccacagaaaatgtagctgttactgataattagacattttttttttttaagaaaaataaagtgtagcctcttctgggacatttttttcttcttctgggttaatggccttctaatacttggcttggctctaggttaggttgcagggagccgtggagatgatccattcccgattcctcatcgtccagatggaagaaactgaggcccaagggcaaagtgattagtccgaggtcacccagtgtctaggggcacacctaggactgtaatcagactttcatggacctggtctgggttctcccacttagtcatgggccttgaagattccccgaggctgcctcctgaaaaggactggggtcctagtggcccctggacgttgggcaagcaagggactgggcctccatgttgtgcctccatagtcctgatcctgaactggaaaactcagcccctgaccacgcagctctcctttaagcccctttgtttcacatggttttcaaagtctgccacccacagtggggctgcctgtacccgccctgtccacccattgccccagctgtcagccccttgacttctctcctggggcttaaacatccctggctccaaaatgggcagctcactttcttccccaagaagtagctgcacctccagggttcctagatttgcccctccttgccagggggaggggtggctgcgacaggagattctccctgctctcagcagaaggaactccagcagttggagaccagcaaacccctctggacacagatctgatttcctaactgggaaggctcagggcaaaataaaaattcaggtccactggttcaaaaactatgaagaatttcaagaccgtcacagtagcccattaaaccaaacgtggatctgcaagggtcccacagccatgaagcccaccctgcttggttgggttccaaaaagatggggacagtgattgcttaagctctgtggatcaaggaccccggagaggccttctggctctccacatatctgctctgatcactcctaaacacaattctgtttcctccaggcctggcgggtcagtccagggacccccatcagtgtgatgtttccaggagtaggcgtttcaatacttcctgtgctctcttctccagcacaaggcccctctccatcccaccctcattatgtctgactctttactatttaaatgggtcaagagaagtggcgcttgtgtaatgtgaaggttaaggtcagtagggccagggaactgtgagattgtgtcttggactgggacagacagccgggctaaccgcgtgagaggggctcccagatgggcacgcgagttcaggctcttccctactggaagcgccgagcggccgcacctcagggtctctcctggagccagcacagctattcgtggtgatgatgcgccccccggcgcccccagcccggtgctgcaccggcccccacctcccggcttccagaaagctccccttgctttccgcggcattctttgggcgtgagtcatgcaggtttgcagccagccccaaagggggtgtgtgcgcgagcagagcgctataaatacggcgcctcccagtgcccacaacgcggcgtcgccaggaggagcgcgcgggcacagggtgccgctgaccggtgagatgtccccgtcttccctacccttgagcagagccacaccaggacggatgggcgggcaggggatggcagccaggcagagagggatgacacagctcgcagtcacaacccctgcgctttcgacggagcccaggaagccagggaggggaggtggccggagccccatcaccaggcagctgagccaggggccccggcgcaaccgccgcctgagagcacgagctccaaccacaattctgtggtgggggggtaaatagaacagatataatgatcatcctttcgcaaagatggggaaactgagacctggagacctgccgcgttgcgggagacccaggctagcaggtgacagagctggcctgcaccgagctccttcctgcagcatatcctctgcgaagatgcggatctctcagttgtggctttcggcttgcatgcatgagtcatctagttttcttctaaattctctagctctctggacactgttgcctgtaagtatgaggctgcggatttcagtatatgctgcaaccaccgaaatccgactttttctgcctcctaatgcatctgaggtgcatcagagaaaagtcacacaagatccaccaggcctcagacctctgattccacagtctcattttacagatgataatctgaggcctggagaggtttaggactggtgccaacactaaacagcaaataagtatcagaattgggattcgagccaaagcctcttgaccttccagaatttctggacctagttaaaaaaaatatgatttttattattattttttaaacggagaggttaggaatttaaaggaaagtacagatactatataaaaaaagatgcccatgaaaatgttaagttataataatagtggagcattgggcacaactgaaatggccaatcttgtgagaatggtaaaataaacttaggtccgtgagtaagtggagtattacatagccataaaagtatgcccttaaagaatatttgaag

SEQ ID NO: 1303 - DNA, 6000 bp, Homo sapiens
caacatgataataggtcttatgccggcagtagccatttagaaagtaaaggggtgaggccagatgtggtggttcatacctgtaatcctagcactttgggaggccaaggcagaaggatcacctgagcccaggagttcaagaccaacctgggcaaaatagtgagagctaatctctacaaacaaacaaacacacacaaaaaattactgagccgggtgtgatgatgcatgcctacagtcccagctactcaagaggctggggtgggaggatcacttgagcctaggagttcgccactgcagtgagctatgatggcaccactgcactcctgcctggatgacagagtgagaacctgtctcaaaaaagaaaagaaaagaaaagagaaaagagaaaaaggaaaaaggaaaggaaaggaaaaaagaaaaggaaaagaaagaaggagggagaaaataagtgtctctacatagaatatgtgactaagaatgaaatagaaatagggaacgtttccattgatctattctgttgagcagttagttcatgaaggtatcagaaggaggaggaaggaagagaagacaatgatgttgctggccaagtaacagcctggacgaagggacaatcagcattaatggcaaaggtgtaatcaagaaggagggcacatctgggctccctgtgaacacatgtgccttcccattatgagggcatcacacaccaccaccacccccttccttaagaggatgctatggaataaatcacttgtctttgggattagattttaatacatgtctgagtctctagcctagatattaaaaaaaaaaaagcagaagggaaggatatcaaacatgcagtatctcccaataaaccaattccctgataaacactggcagtgctttaagttgggtactgcatttggtaggaagaggacaatagaaacaaatttatgaagcattgagacaataaacagaaaagtgatttcctaatcaataagacagcgcagtgtagaactacctgacggattcagtcatccagtcctgagagagctcagaaaggatccacagctccaaatgtttccctcccctgtgaggtactacttaaagaaccacagacccaccgataggtcatctggagagcaaaaaaagtatgcaaagggtgacaagtgctatcattatagggctaggtcagaacaattaatctcttattaaaaactgagatgcttaaaagatctcttaagaaggtgccactgggctgctcaaaataagagcacaacccaagaatcaggaaaaaataagtctggcaggaaataggggaaaaagactctttctcatagtcctaggaagagaaagatttgtgaggaaaaggaacagaagaagtaaagtgggaaggaagagggtggcctcacaacattcattaaggtagaaatgactatagattttaaactttatgagctagacagatagacggatttaagtatgtgtaaatcacaagactattattatgcctatgtaataaatgtgtacttctcttgccattaatgcattactctagttattgcaatcaaaatttcattgtccaggaaatgttttaaagcaagaaattgtatgaaagctcagcttgtctaagattatcttcctctctgcctttaatgactacagtatcttatgtacagtatctaaggcaaaaataacaagcagatgaacagcagtccccctttttttcttgaagaacaaaaacaaatcagtatgacaacatgatgtggattcagttagcacttggcaggtcatgaataacttttaaacaacctccttttaagttggaaagtgtaaaaatatacagtgatcatggcaccagagtgccttccttacaatatgccgacaggcagagatgttcatctgaagagctaagtcttacttacaaaggagggaaacagaacattgcttcttgggccactactgggctctacaacatttccttgtcccaagggtcttcctcctagagtatattcaaaaccaatttgaaatctccctctgatttgcagaggtttctacataagtatggagggaaaggaaagaaaaaaaaaagttggtgcaatcattttggaaacagataaatgataaatatggtaaagaaaacgctactgaattgttaaatattctcataacagcaaggcaaatggcataattctataccccgttggttagggcaagcaaagtatcttgtttcaaatcaacaagaaaagtcctaaagaacaaaaactattaattggataagtaagaacaacctagggctaatcctagagagtatggtgagactagtggtcaggcaagcatgccacaccagtgcatcttatcttggttttaatgaatggacacctttctgggaagggagaacttcataagcactgaaacacaccctctattctgaaaactccaattacacccaactgtgcaaagccaggtgcatgtggcttcaccggtttcacagcctgactagtgctcatttcttgaggactctctgacagttgctaaggggaatgggcctcatgccccagaatgtaaaatatgacatgggaaatatcagtcagatttacggctccactccatgtgtcttgcatattactatgatctgtgcaagacatttgttgtaaataagcctgcagaatgtacagcatgttttccaggagacctttaaagaacagcttgcagacaagaggtgctagccttagtttcgcagccagcaaaactccatccaagaggctgctggcatgtccccacctcttgtttcgagctggcttcaagacaacgtcaccaacccaattccaagggtgagtacctggagttagtgactgtgaggtattccacacgaatagtaagtggaaactcagacatttagattaacatttagaaaagacccacttttcccataagagtgtattaaaaacaactgagagctgactttgcaatgagacatttgccgtacgtagtaaattaaatggctgaagcttgtgcttcttccagtacgagaaggaactgtggttcatcataacccagggtgtacaatcaccgacgctcatttttaaacctcccctgcttcttacaaagcccgctccattaaaaaaaaaaaaaaaaaaaaaaaaaaacttttcaggaaatgaaatgcaaatgggcaaagaataggatcatacaatggagagcctctatcaacctcttaaaaagaaaatctttctaggcagccggactgcttttaacacgccataagcttttataaaaatgagataacattggttcttttgtgatcgtcctcaaccctttccaccctttcactctccaggctggtcggagcatgttcaggagaccgaacagagcaggtgaagtggtcagctcagctccacctctcccctggcaagtgtaaggcaaatcatttaacggtatcacatattctaagcctgatggatggaacacagagaaggaaaaagggaaagaagggcgggaaggcaaagcttccgatttttttcaaaggtaaagctccggtacttgagctgtgtctgaaactgcctctgatcatcttcaaaacaactccttgggatttatctttaacttgatgctgcctgtcctcgctcaaggtggagctgaaaccagttgcgaaatttccctctgctggagtccagaggatccaagaaaatggggtctaggcttctaagtcggaaagaagcagaggtttccctgcggctcggtggggcccgcgcttccaagccagagtaggcgccgggaagggagaggaggcgcctggtgagcagcctcgggccaagtgctcatcccggctgggcactgcaggcgcggttaaactgggatggtgcacgccgctctcccgagctccagggctggctgggacctcgggctaaggacgcccgaggggtgccaagctaggcgcagagcgaagggacttcagcatgggtgttcctcccctaagggaaaagacaccctctctgttcaagcccaccctacagacactcccatcacctggcccctctccccaggaactctccgacatcgctatgggcgctaactcatgaccaagctcggcttgagaggaagtggagaggagaggggagagcgagattggagtgaagaccgggctactccagtctgcagcaattggggagggcttggaaaatggagcaggcaaggagggtccaggaaaacggtaggggcccgggtcacagccacctgtaggattgcggcagatcgcaaacttgggttggaaggctgtggtcccctcggagtcctccactcggctcccatccggttgggcttggagcgccgaggtgcagggcgcaagttgggaagccaacgccatcggtgcaggtcccgctccgtcaggctggcgcccctgcgccctcgcccccagctgcccgctccgcccagcgcttacctcgggcagccgcggtccctgccgcccagaagcacagccccagccacgggagccagcggcgcgcccctccgccgccgcctgcggtggccgccgctctccccatgctcctcgccgcgttccggagggcggctcttcttcacgctccgggagcccgggaaagggtcggcgatgagggtcccgagtcgaatgggtctcgggagtcttcagagagtgactctgctccacgatcgcttcctaaagcagcggggcagggagctccgagccgccgctgaatgggcaccccgagaaagggcgcgtccccatagcttcccacggcgcggcgaccgctgccgccagcgcggatgccggagtcgcccgcagtccccgccgcgcagttcccagccctcgcgccgctgccgggccccgaactacggagcggaggcgagagtccgcatcgctaatgagacccccgcagccgccccttcccctcccctccgagcggcagccaatgagccgggctggggcggggccgcgggaggggcggtgacgcggcggcgctgggctggggcccgggaggcgcaggtgagccagaggccgctccacgtgcccccggggcgcttcgggccccgcctgcagctcccccccccgctcgcggagagaggaagcgggctgggagtcgggcggcggggatgcggccacgccgcggggagctgagcggagccggctggcctcttggggcgaacgccgcacagatatgtgggcatctcggttgcctaactcagtcacctgcttccaggagacctccgttttgttcatctactttgagcccttctaaagtcctgcctctcctacttccactttttcccattagatcagacatcactcaggaaaacatcctgagaaaaagaaagacttaaaataaatgcgtagtgggaaaaaataataatggagttactccattgctgcaactatgctaacttcattcatataaataaagaagtggggaataacaatcatgggtgcattaaggcttgtataatcgatttttatttttgctttctttttttttcgaattccctattctgttgtcctgaacactccggaatccccaaacttttcagaagctccctcatttcgaatggctcctatttttgtcagttttaatctgagcccaaggaattgccttctggtaagtatcagggaaaggagtgtcgacttaaaaaggaagaaggtgaggcgaaattaatataagtaagagtttatttgggccaagtgtgaggattgcaactcaggagtatagatttaagttgttttgaatatatattttgattagtagtagttataagtggattcttaaaggcaaaaaaaagggggatggggagtggactgatgtaacattgttaggaatttatactgatttattgaaataatgtcgattagtgattagttatatatagttaagtcataggatgtgggttatactgtttgatgtggtattattaggttaatttatagctatttgtagtaatagtatgtagttttaagaaatgaatatatagtttaaaggaaggagtagggcatgattgtggtctcattctaatgtc

SEQ ID NO: 1304 - DNA, 6000 bp, Homo sapiens
gctgtaaacagatatgctgccatctagcttttgttgttccatttatagagcacaggtagagaaaaattagcgtaattcttaagggccctaagatttttggatggttaatgaacattggcttccacttcaagtcaccagctgcattagcccctaaaaagagagtcagcctgtcctttgaaactttgaagtcaggtatggacttctcctctccagctatgaatgtcctaggtagcatcttcttctaatagaaggctgtttcacctacattgaaaatctattgtatagtgtaatcaccttcatcaatgagccttagctcatcttctggataacttgctgcactttctacatcagcacttgtggcttcatcttgcatttttatgttatggagatggcttctttcataaagcctcatgaatcaacctctgctgtcttccaacttttcttctgcagcttcctcatctctctcagacttcatagagttgaagagaattagtgctttactctggattaggctttagcttaagagaatgtcatggtttgtttgatcttctatttagactactcaaattttctccatatcagcaataaggctgttttgcttttttgtcatttatgggttcattggagtagaacttttaatttccttcaataatttttcctttgcattgaaaagctggctaactgtttggcacaagacacatagcttttggcttatcttggcttcaacatgcattcatcgctatcttaattgtgtctatcatttgattttattaatttacctatttcaatgtttttgagtcacaaggaatcgggaggcctaaggagaaagacagaaaaagagacagagagagagagagagaaagggcagtgagagaaggagagaggcacaggggaatggctagtcagtgcagcagtcagaaaacacacagcattggtaaatcaagtttgctgtcttatatgagcatggttcatggagtcccaaaacaattacaacaacagcaaagatgactgatcacagatcatcataacagatataataataataaaaagattgaattattgggagaattgctaaaaggtgacacagagaaatgaagtgagcacatgtgcctggaaaaaaacggcactgatagactttctcaatgcagccttgctgtaaaccttcaatttgtaaaaaacacagaatcttcaaagtgccataaagtgaagccccatgaaatgaggtgtgcctgtccaatcccttcaccatttctcattaggatttctatcacctccataaccttaatgatgatttgcagctgtaaggaggagggccatatcttagcaggcttggcttttcaccaattacttggctctcctctgccttccccatctcctagaactacaaattctttcccttaatcacgtagaatatttctacattctttaatgtcttttgaagttttacgctcttataccatgtatgttggtaaaacaatgtgttccataataacatagagctcttcctaaggaattataataaactgcttaaaaaaatacttattatatgtggaagggctcatctatccatgctcaatctgtaagtcctctcctccaagtttgacttaaatattttctattttttggaacttgccgggctagagatgatcaaatggcaatggaagtagaagctttctacctctttatctttatgggtagagtgttagaaaatgggtgtagtcaattcaaactacaaataattgagaaaaacacttcataaagtctattcattgaatcaatattacctggtgctatggttggaatgtttgtctctcccaaaaattcatatgttgaaacctaatcaccaatgtgatgatattaggaggcgaggcctttcagagatgattaggtcatggggacagaatcatcatgagttgagaattttgggtattcaaaattataacatggtagagttaaaattgatggctcctaaaataggagtgatcttaaaatcatctagtcaaacattctcattttatagaagagaagataggagatcttgacttggccgaggctatctaaccagtccctgatagtgtcagcgcctagcctctgcctgtcttgaatctcacgaaagttctattacatcctgctgtttcttggccagagacagtgatcctgggtagcaactactcaacttatttctccaaatagatatacatatttctccataatggaataaagtacaattcacacatgttaaaaaatagccaggattagattaatatagggtatattaccatctgaaacataatagtgatgtgcaattaatacagtgtgtataatactaaagattcaacttctgtcaacccggtatctaaacagttctgaggaggatgaggtggaaagtctatctctggaaaacctgattgaatggatgctacctcagccttcatcttgggtttaaaattacacaaactagtatatcattcatgacgttcagccacttactaatgtgatcttgggcaaatcacctttaaactcaatctgactttcctcacttgctaaataggaataataacgcctaccttgcagggtttggttctgctttaaaataataatctgcatgagagactcaatccttgagcatggtatacactaaaaggttattaatttcccccttcactctcatttgtcattgcaattttacttgaattattaacctaaaattagcttatctattacttatatcccattttgaaataaaactgattttatttttgcccccagtgggtcagtagaaagacttaaatagtatcttggacacatagtaattcttttttccttttttgttctaagaaaatcctcatttgtgacagaactgccacatagtcctgaagaataaggaaagtcaggcgatgaatgactattttccagaagacaggtaaagcatatttggtagattaattctcaattcaccttctaagcagaaaaggacaaaaccctcatttaccaagattctaaagagatttccaggcaagtccctagccagccccacatcagtctttgctttgaagcatccattccccagagcttggttttcttgactaggtcccaaaccttttattgagccgcaaggcgaccggaggaaacaatcggcttcttgcacagacattcacgtgtctggtggcactcaagagagggctggcacaaaagtgcttatcagagaatcaatcttttttgcctattatcttccttttcctcggaagaaagtgagttagtgcaattacctcatctagaacaattacctcaccttaaactgtttattcttcagagaaaggcgtttgggagcaggtagcacattggcgggagacatggatttttgaaaagtacttgatgttgagcgtgggtagtgaggaactgctgggaaggttgcctttcaaaccaaggctcccttttctatgggggattaccaggcaaaaggtgagctctgctgccattttgaggactcgatcctggcagcgataatgaggtagtccaattggggagcctgggactccccaccaacttcctgggtgtgctctgaaattgagtgacctaggacaagctctctaaagttactcctccagcagagggaagaggcaaccgtgaggtattttcgaaagcagttaaataaaaatttgataatctatctaaaacaagccacacttaaaaaaaaaaaaaaaaagagtcttctttccttcttcttataaaagtccagcgcgtttcaaagtccttttaattgtcaggcccagagagacattagaatgagaccacaatcatgccctactccttcctttaaactatatattcatttcttaaaactacatactattactacaaatagctataaattaacctaataataccacatcaaacagtataacccacatcctatgacttaactatatataactaatcactaatcgacattatttcaataaatcagtataaattcctaacaatgttacatcagtccactccccatcccccttttttttgcctttaagaatccacttataactactactaatcaaaatatatattcaaaacaacttaaatctatactcctgagttgcaatcctcacacttggcccaaataaactcttacttatattaatttcgcctcaccttcttcctttttaagtcgacactcctttccctgatacttaccagaaggcaattccttgggctcagattaaaactgacaaaaataggagccattcgaaatgagggagcttctgaaaagtttggggattccggagtgttcaggacaacagaatagggaattcgaaaaaaaaagaaagcaaaaataaaaatcgattatacaagccttaatgcacccatgattgttattccccacttctttatttatatgaatgaagttagcatagttgcagcaatggagtaactccattattattttttcccactacgcatttattttaagtctttctttttctcaggatgttttcctgagtgatgtctgatctaatgggaaaaagtggaagtaggagaggcaggactttagaagggctcaaagtagatgaacaaaacggaggtctcctggaagcaggtgactgagttaggcaaccgagatgcccacatatctgtgcggcgttcgccccaagaggccagccggctccgctcagctccccgcggcgtggccgcatccccgccgcccgactcccagcccgcttcctctctccgcgagcgggggggggagctgcaggcggggcccgaagcgccccgggggcacgtggagcggcctctggctcacctgcgcctcccgggccccagcccagcgccgccgcgtcaccgcccctcccgcggccccgccccagcccggctcattggctgccgctcggaggggaggggaaggggcggctgcgggggtctcattagcgatgcggactctcgcctccgctccgtagttcggggcccggcagcggcgcgagggctgggaactgcgcggcggggactgcgggcgactccggcatccgcgctggcggcagcggtcgccgcgccgtgggaagctatggggacgcgccctttctcggggtgcccattcagcggcggctcggagctccctgccccgctgctttaggaagcgatcgtggagcagagtcactctctgaagactcccgagacccattcgactcgggaccctcatcgccgaccctttcccgggctcccggagcgtgaagaagagccgccctccggaacgcggcgaggagcatggggagagcggcggccaccgcaggcggcggcggaggggcgcgccgctggctcccgtggctggggctgtgcttctgggcggcagggaccgcggctgcccgaggtaagcgctgggcggagcgggcagctgggggcgagggcgcaggggcgccagcctgacggagcgggacctgcaccgatggcgttggcttcccaacttgcgccctgcacctcggcgctccaagcccaaccggatgggagccgagtggaggactccgaggggaccacagccttccaacccaagtttgcgatctgccgcaatcctacaggtggctgtgacccgggcccctaccgttttcctggaccctccttgcctgctccattttccaagccctccccaattgctgcagactggagtagcccggtcttcactccaatctcgctctcccctctcctctccacttcctctcaagccgagcttggtcatgagttagcgcccatagcgatgtcggagagttcctggggagaggggccaggtgatgggagtgtctgtagggtgggcttgaacagagagggtgtcttttcccttaggggaggaacacccatgctgaagtcccttcgctctgcgcctagcttggcacccctcgggcgtccttagcccgaggtcccagccagccctggagctcgggagagcggcgtgcaccatcccagtttaaccgcgcctgcagtgcccagccgggatgagcacttggcccgaggctgctc

SEQ ID NO: 1305 - DNA, 6000 bp, Homo sapiens
tccaagattttagagggtaaaatttctcaatagataataacacaaaagttagttgtcaatttaatatttcatgttccaccaaaacaaaatgggcgtgatgaaaaaatgctgttctggatgtcagtgcaaagaggtttttatcctgtgcctgtgacttagaactcgttgacaagttgtttagcctctgagagcctggatgacttctaagataggagagtcggttcggattttctctaaggtgatcttctgccctattttgcctgtgtccacatcacatacaaaaaattccgtcgaatcatgttccagtcaaatcagcctatatttacattttgagatatgcagctaagtggccacaggctaggattttatgtgacctgacatctaacaggagtgtatttctttcaaagagaatttaatgttgtttgttccttacagtttcgttttccctcttttgtttcgtctttttgtcataaaaagattgaaaatacttgctgtattagtgtgcagaacataaaacataaagctcttcctgaaaggtaattttccaagagtgaaaaatatgagaatggtgtttgattgtttggttttctgtcattcaatgttgcattaaaacaaccatttttccataactatgaatggcctcactcttgaaaactgtcagttacaaatgaaaagcgataacactttgaaagcaaaacctttcccaaatcccactaggttttcagatgaatttgaaaattagtcagtgggacatattcatacacaaatgtatccattgttgggggaggaattaaacaatttataaactccatctccatattctcagcaagatattcttttttacatcttaaaatgaataattgttataaatcttataatcttattctttttcatttttttcctaaatacatttatattttgtttttccctgatacgtggattttaatacaataaagttagagaccatgaagtgaaagctaaaattgccatagtttatgaagccctttatattctttcacaaagcagaggggtgtgtgtgtgtgtgtgtgtgtgtgtgtgtgtgtgtgtttcctggttatgtgtttattctagaaacctaaaaatagagaaaaagcaaaaaacttaatacaaacttaaattactaacattgtgtgacccagagaaaaatacctggactaaatttgacatcttacttcaaagtctctttgaataaactgttatgggaacaggtgtctcaggttaaatcactgtatgtttccattaggggacaaagctgtatctgccatcataactggtgtagaatctctggcttagatccaatttgagaggccagttttggagacaacttaagtgaaagctaaaatgatggttacaagttaacaatcaaagaaaaacaaaacttttctttgtggccctcttgggaaataagtcacctgtgttagtgtggctgaaagaataactgtcctgtgtattaggaccagcatgggttctcttgcattcaaagaatgcacagctgaactggtcttagggcccatgctgtaaaccaagacagctttctttctataatctagtggttactctgtgtctgcatctctgaaagttcctagttcaaggcacacagaaaggagaggtgttagaattgctaagggacaaactttaaaaaaattaaatttaaccgagttgaattgagcaaagaactgttcacgaatcaagcagtccttgaaccaaaataggtttagagagactccaggctgccacgtggtcaaagacgatttatggacagaaaaggaaagtgacgtttagaaaacggaagtgaagttcagaaacagccagatcagttacagctcaatgtttatcttattgaacacgatgtgaaccatcggctttaggcacaatttaaaatatgtcaggaggcagctttagtctaaacttaatttaacagacccacataagaccaatggtttaataaaatctcaaactctttaaaatgtgcattctaatgaagatgatatttagctctacctaacttttcaaattcctttccatgtacccatggcatgtaatatttcagccatcccacatttcctaagatttctctcttaccttttaatctctgcacatggcatgcccgctgttgggctaccttctccaacttgcccagttggtcagcacatttatccagactgtgatgaggggtaatcttccctgtgatgcctgccataaaccctcccagggacagttaggctctctcctctgtacccaatgacactttgcatatacttccaatttaagcatgcttgtcatagatttgttattatttatctctatttttagtctgtgagctcctggcagaaagtaaatatgtcttagtcatctttgaatccctagtacctagaacattgtctaatcttagtaggcatgcacatgcgtctatttaaaaaaaaatacattgaatgtattaaactgataaattggagaataatgaacgtgcttttgtagagtctactgaaatctgaagttctttaaggaactaagaatggctctttgatttctttgaatgtgtcttaagcactctttcccatctttcattctgcaggatttaagatctgctcgataaagtaatatcttagtcatatataagattggcacaggtgaggtgaatgatgcaaacgcaatgatataaaacgcttccatttttattacaggttaggaagaaagaatagttttcaagttaaaaataaacaagaaacttttactggggcctggggaaagagtctgtgtttcataaattgcattaaatatttggtatgtaaaattccggctgctgttctgcattaaatgggcgaaatgcatcccgtatctaattaagtaaccatatggagacaagtcacatttacataaatgaaggcagaaagcctggctctattgtattctcttttagattatgtaacttggttttcctgctatggctttctgctctgacttgcacattgccgtggaccaatacactcacagaaaatgaatggaagttaaagagctaattctaaggagcattactctatttacatattgcagtgagaaggactctggaatattatgaaatctcctatgtttattaactacttgcctattaaagccaatagttttgggacctggccaacaggaaacccattgtctattagcctgctttgcaagatagctatgtgcctggtgtacagtgtaaccatttcactgaatgtttattgaataagtgcttcacagcatgtattctgaatttttcacctaacagaattttactaatatagctacagggagcaaatgataaagaagtgttataagcaacggtccatatcactaggactctgagatgaaaatgataatagcaatcagaaaatcaaaatataaatgttaggataataagtttggggatggaaatcatagggatgataattgtaattctttcctttttatgcttttgtttgtccacccagtgatgatgctgaaggttgtggtcatggtgccacatgatatgtatgtaacatttaaccatttactctatttttacatatattttaacatcacaaaacaccaacagattttagtcatccatttttgtgtatgagaaaaatggaacatcagggttaagttattcacccaaggtcacagagttaacacagaccttgtcaggttatttgattctcatgtaaagttctttagttttagcagatttagtctttgctttttggtatggtccctgtttacactttgaaacaaataccagtatagtgaaaagaaaagcatactttggagacagaaaaagcatactttggagacagaaaaggagaaaaaaagtgatatgtatttcaaagtaatgtcctctcaagaaaaaagtatacaaataatttagaacgtctcaaaatctcttgatgctcaaattcacttaaacaataatccaatggatcaggattttatgaatcccaattttggatgactgtgggccccggtgtgcccaattgcattacaaatacaacacatcaaatgataaaatattggcagtttattatgcttaaccctattagaatggcagtgcctttcgcccagttgtttttcttgctaatgttcaccacgtccttatattttaattggaattttagttgttaaatattcctgctttaaaagaaacatttatttctaaatgaaacacagaaaaattcttattattttattctcaattattctttgacttctttatttctgactttggtgaggatgtctagtcagttaaatatagttggtagaacactagttctctcaaaaatatttattttctcagggccttctctgggaggggttcctaacacacccatcctgatctggaatcgcagtccagctcacaggttaaccaaatgatctttaaggtaaatgtcattcttattgtaagtgaagaagtgactcacagataatgtgtgtttttataccatcttttggttttatgaactacacactattaccctgcgacaggcactcactaaattagagtatcagacttataagaatccattcctctgaaacaaaatggaattctgaggtggctggagtcagagacctgcattcaagttctgagcccaccacttactgtcagtgcagccttaggcaaggcagataattaaagcatctcctcagatgcacagtgacacccaccttggagagtttctgtgtctcttaaatgaccgaatccgtgtagaaggcttattaccacaatctgtagctacttggtaaacggcagctcttattttgactttctgctaacggagtttccacattccttagcctaccaaggctctttcctgaacagctgatggcattaggatttaattaagtgaagcttggagtgctggctttgtgtaagaaggaagatgcagctgtatcagtgaggaacgttttctgccacaaataacagaaaatctatcagtagcgttaaataagtagggattgtttaaaaaaaaaagctgtaatatgttatctgggggtggatgatcctggtgttagttaaagctctcagtgatgtctgtgctgggacttccgggttcctgttggacttttcctcccaaacttcaccaggtaaggcaggaacaaacaggaaaaaggacagtaccaaccacacctattctttcgttttcgtttttttttttttttttttttttttgagacagagtctcagtctttcactcaggctggagtgcaatagtgtgatcacggctcacggcaacctctgccttccgggtacaagtgattttccagcctcagcctcctgagtagctgggattacaggcatgtgccaccacacctggctaatttttgtatttttagtagagacggggtttcaccatgttggccaggctagtctcaaactcctgacctcaggtgatctgcccacctctgcctcccagagtgctgggattacaggcatgagccacagcacctggtcacacctattctttatatcaggcagatacaagctttcacagaagcttctgtttacgactcatgtgctaaaccagtgtcacctgaccatgctgaactgcaagaaggtcatcagagtctgtgatttttccagcctctgctgtgaatgtggtgtggaaggaggcagatggctggatcagtcaccagccatttgtcctaccagaatttaaaacttttctttgagttgtaaagtggagttgtggcatatgtgttgagattatgaataaatttatcttgaaggaaaaaaagcattcatgcagtcttgcataaaactatttattaaagtaaatgacctcctcccaccctgtcccaaagaatagaatctgtcagcaatttataagccccttaaaagtttccacttcagttcctgttcctctttcttccctatccttcccttttactgaaagaattgacagtttcctgaagaattcagttcaaaactactaggcagggctgagcatggttggcaagtatggg

SEQ ID NO: 1306 - DNA, 6000 bp, Homo sapiens
cacacacacacacacacacacacacacacacacacacgactttctcccttctctcatgaagtcagggtaaaaaaatctagaactaaaccttggggccagtactgaacacatgaaagagaatcacttcaacttttgtaaacacacagaaatctttacaaagaaagccactgtgtactcttggaaagaaagatcagaaaacaatgggatggaggtgtgggtgtgaagaggaaaaagaatgaggtgaagtacaaccaggtagatcgaagagagaagggtaaaaaagaaaagaaagaagaaagaagcacagtgacccaactgtagaagaatgtgagctgtgggtaaagtctggttctatctcctgaagtgtaaaatgtggctttgaggactcgtgtatacctctgtggctgcacttgaagtacccagatctcatcactaccttgtccttaccacctttagacaagaaatgactgagaataggagccacgtgttaattcatccatgcatcctcattgctgcccctcaataaatgtttgttgaattagtgaaattattataagctgaattttataattcccaggacaaattgttctgtaaaataattcccattttgcttatctctctataggcatccctttcctctgccgcttagcttgtagatcaagccatcccagtgtcaggttgagccttagggagccagtgctcgccatgcactggctttctttccctaccctgtccctgaagttcctctactcatttttaaaattttataatttagtattttattcctttaagtcaaatggattctacagatgttcctgggagagaaaacacactgagccatatcaaacattgatactttggtctgcaggcatacatagggttattcctaaaagcaggatctatatctggagggagaatgagaattctggttacctggtagggagggagtgaaacataaaagacaaaatggcaatccaggggaacaaagacaacttgttcctgctgtttggttttgtcttaggatgttcactgccactgaatccatttccagcccaggcgtcttgccctggtcatcctcctggcttctggtccttcctattttagtacctggaaaactgaggatgtctttgtctctactttgtcaactcagcaacaaaggagctgcattctgcacactgccaggctgtttctctgtatgtgctcatttgctgagcaggtgtgttctccccagctacaccttttaaggtgagagtgtcatcagtcagcagtgcccaaggaactggaggaaagggaggaaaaatgctagttggttttaatccaaagttccctcactgcttcccatacactggcatgatgcatctgctgtgttctgtgtcctctgtctgctctgggaataattattccctccaagacacttaattgagtagagggaaggtgggagcttaagaatgatagctgccctccttcttaccacacatgacagaggcacacgtggaaactgaggctgacgtttatcaactcagccatggttatgagtggttggagaagtaggctccattcctgtctctctcacatttgaatcatcatgaagctggaatggaagtttaaatcacaccctgtttctcagcgggcaccatgctattatggttattaaatgtatttgataaacctctgacctttcagatgctgtttttttttttttgatggttgtgttctcccttgagaattatttttatgtgtttattgccctattagtgaaccagttctgcttgatttcctcgttcactctttaatttggtagcaccctattttacagtccactaactgttgaaaataaattcactttccttgtgtggttagtattactcatttgataacataagtaccatattagggtgcggtgaatgcatagtaagtgctgcacaattacaaggtaaatatatgatggctttattttatcctctaagcccaacacaggggtgacagagtaattactgttggacccattaagtgtacttaccacataatctgtaggaagattaactatgtagttagcacttgccatcctccattttcacacaccttctaagattacacctctttgagacttatattatctcagataaatctcgtgtgctgtattgcaggagccatcatggatctgctacaggaataaccacatccaacgcacctctagaaaaaagggtgaaaagcagctatagcacatcttgcggggtggggaggcacccacattctaaattcaaactaacgcttttatttttgctttgcccatgcattcaataggatggagtaggagaggtatgggagaaacagcatgtgccgtcctagcaacccgtcctcttccacaataaattattagagtctagcatttaattggtgtcagaaaacatctgccatggacttaacagcacctgggaccaagaccttcatatcccacaataaaattctctcataatgactgtatgccctaaactgatgttgtcagtgtacttttaatctgaatgatttgtaccaaagctaaaattcatatttgtgaactctggtctttctctcaactaatagactttgtgttatctccttgccctagactgctctctgcaaaggcatgtgccccaggtttcacataagcagagcagatcacccatattttatcactgtgtgtgggtctgccctcgctctggtaaaagtgtaaaaagtgttttgcaggtaaacatgacatcctaaactaaggagttgtctgctcttactagaaaaaaacattattttctttgcaaaattgattatattcaagagtctattacatgctaagctaccttaatgcagttaagatatttgcctagcatccctttgatttatacaaggcattttagaaacacgattactgtgtgaaagtgagtacaacttgtgttcactgtacatctgtcattgtctctgagcagtagctccaaaaatccaatagcatttccttttgtattcccgagtggttctttgactttgtgcccatgctggtcacttacaatttctcttgtgtctttcaggcattgagaatgccagcgacattgctttgtactcgggcttgggtgctgccgtcgtggccgttgcagtcctggtcattggtgtcaccctttacagacggagccagagtgactatggcgtggacgtcattgactcttctgcattgacaggtggcttccagaccttcaacttcaaaacagtccgtcaaggtcagcggcataggtccctccacacctcgtcctcagtgccatagactacgctcacactagaccccagccttctcctgggccctgtgtgaaggtagctcttggcactgggagccgctaccaaattgtcttcacacatgaacagaccgggctgggtgaagtggtctgcttaggtccttgtctgccacagggacaagaggatctcggtttattatcagcaacattttcaatgaggcatttccatttttgatgtagggtcagcctaatgagttattttatttcaaattatccttctttttaaaaaagtccttttgaggatgtatatttaatttagttaaccaaagtattggtcattcaagactgaggactaacacctatattacagcctcccaggtatatttattaccctatttatgaagtggagtaattttgttatttctattttaaataagtaaacagattttagagaatagatgatgggtcagctagccaggggaaaaaaaatgaaattccagccgaaacgactctcagctgttgccaagtccaagcaatctttagttgtgggggaaggaaaatctatcatgtcaaactgtatcatgtcattttcaaaacagagtcatttaattctgttataggaaccaaatctattccttattgcaaggtggggatgaaacatacacagctttcattttagaaaaaaatgaaaccgtctcttttcagaggatgaagttttctaccttgaccctcatcgtcaatatcgtcaccttcatttctgtttattgtgcatcagtggtgcctacagcgcggaaccagaagtctcagtgcaaggcagtgattgagtagacaggcttccgaagtggaaacacaggcatgctggaaaaaattgagagatggccagagagatgagtaccttccctcttgccattcacttctgggcacctcagagttaggcctcaaaagagacacatcccctacatttggacatatagtttagtatatgtagttaattggaaataaatccaaatatagaactgattttttaagtggtgttactcaagctggagtgcagtggtgcaatcatagctcacggaagcctcccacccatgggcttaagtgatcctcccacctcagcagctgggactacaggcacatgccaccacaccaagctaagtttttgttttatttttattttttatagagacagggtctcactatgttgctcaggttggtctcgaactcctggcctcaatgatcctcccacctcagcctctgaaagtgctgggattataggaatgagctactgggtctggtcaagaactgatttttatgctacctaaaaaactagaaacatattttcatcaaataataaaatatcaatatcttagaccataacacttgaaaacagatgagctgtattagtgtgagagacagttttgtgcataagtccgtaggctttgaagttagattttagtctaaaactgctatcaattagtctgttatcctcttgagtctcaagttttacagctataaaatggggttagtaacattcaactcaaagtgttctgaggatgaaatcacctggaataacatgggtaagcccttggcatatggaaagcgctcacaaatgcagcgaatagagttctagacgctggttgcttcctcttaccctagtacaggatgccagcgtgttccgtggagcaccaggcagcaggtgagaagggtggatccctggcctacacctgtctggggagtgctgacttgcctacacttaaactcaacttatgtgtattgtaaatctctaagacaatattagtcttaccaaacttacctgaccattttgttttatttttatttttagccaagaatatcatggaactaatgatacaagaaaaatcctttggtaaatgccactctccctgcatttattatggtaatctgcctcatgctgatatcatgtggttttcacctccactgtcttagagagatccgtttttgagcaatacatccagtgccccggcaaggtgaacactgagccttttaaatagaatgccatacacagaacagactagggacttgaaaaaggatttccaaagagaagactggggtgaccagcggtgggtgactgtcgctggtcagacttcagtcaagctggcagccaattttctctgaccgtggatgctatcatatgtacatatgtccagaatcaggcatttcccgctcaagtgctgtctcactctaggaaatatttttgcttccttgtgtcacttagactaggcagatcttctaagcgtagccaaaaattaaacttcagaggctagggcttgagataaaagagccaggtgactgaggcatgtggcttttgaggtctccgcagaacctcctgttctaaactcttttctaatctaagatgggttttggtcctgcttctttcctgggaagaccataaacaggagcaaagtggtcacctgaagaactcagtgcagacctgctagaaagcgcagctccctgatggtacctgggtcttgatacaacacactcatgcatggaaaaaaaataataataatcaaagatcctttagctctatagcattatttatttcatccaatttgtatattttcctctgtgattctggattcttagagcatcacaacaagagatgggaaaagtcagggtgatagatttcctactggcgttgctgcaaattatgaaaatggaaaaacaatagaggctaatacaatatggccaagaattgcaacat

SEQ ID NO: 1307 - DNA, 6000 bp, Homo sapiens
ctgggaggaaagacttccactggcttggcaacatggttcatgcctgtaatcccagcacttgggaaggcagaggtgggaggatcacttgagcccaggagttcaagaccagcctgggcaacatggtgaaaccctgtctctacaaaaaaagaaaaccacaaaaattagccaggtgtgatggctcatgcctgtagtcccagctacttgggaggctgatgtgggaggatcatttgagcccaggaggtcgaggctgcagtgagctgagatgatgtcactgcactccagcctggattgcagagccagaccctgtctcaaaaaaaagacttctgctgattatagttgccaaatatctgtgtccaatcagttgcaaaatactacctcatgcagagttcataaatcctcttccttctcctagtttagctttcattttaaaaagttatcataaactcactaaaaccattaattcatgtgttaaactatctgaaaggtagggatgcttcttcagtgtgttgggtgtggggttgggaagacttgcaactttgacccagagtgacctgagataacgaagtttcatagtaatggctaattactgttacccacctctttattattaattccacaattccggcacataaaataacttaatcattttcagaatttgcatgactaatggagtgagttctgatagaataaggataagtttcataattaggttttgctgggaacttgtgcaaaccagtctatttataatttggtcagctcctgatttttaatgaggacattgagagggactaaagcctctggcagcattcacttcatattttaattacccacagtaattctgacaattacacatatgtcataaatcacatcataatgacccgtgaagcaaatgtatttaattactgaaaggggagttttcaggttaaatgcgtggcagggtatgccgtgatgtgagccacatttgaaaaccagtagccgggcgcggtggctcatgcctgtaatcccagcactttgggagtctgaggtgggtggatcacctgaggtcaggagttccagaccagtctggccaacatggtgaaaccatgtctctactaaaagtacaaaaattagccaggtatggtggtgcacacctgtactcccagctactctggaggctgaggcagtagaatcgcttgaacccaggaggtggaggttgcagtgagccaagattgagccactggacttctgggtaacagagcctgggtaacagagtgaggcttcatctcaaaaaaataaaaaataaaaataaaaaccaggaaaaaaaaaagaaagaaaaccaagcctcttgattctgtggcctaggagaagcagtcttagtgaataaggaaagctgtggttgaatttccagttttaactctggcttgtaaagatctttgaagtcatcactcctgtccttacaataacaaaaaaactaaacaaactgaaaattggagacttttcttggcccatcagtgaaactgaggttatagggcaaaatccagaaatgtggagaatcgcagctgagatctgctcactgggggaagcactgaagctgtaaactagtaggaatatttacatgataactgggataaattactagaggctgagtgtggataaggtatagaatgagaaactcctgggggcacactttggagggttttgccttcagaaatcctaccaggctctaggaattttccaatgaaaggcctagaaaaagtccctcagagactggcagggtgagagaaaaagtaaccattgtgaaataacaaccagtggccggatacgatggctcacgcctataatcctagcactttgggaggccgaggcgggcagatcccctgaggtcaggagttgaagaccagcccgaccaacatgatgaaaccccgtctttagtaaaaatacaaaaattagcagggcatgttggtgggtgcccataattccagctactggggaggctgaagcaggagaatcgcttaaagccaggagaaggaggttgcagtgtgtgagatcgcaccactgcactccagcctgggcaacagagcaaaactctgtctcaaattaaaaaaataaaaaaaactgaagtcaggagttcgagaccagcctggccaacatggcgaaaccacatctctactaaaaatacaaaaattaactggtcatggtggtgggcgcttgtaatcccagctattctggaggccgaggcaggagaatctcttgaacccaggaggtggaggttgtggtgagccaagattgtgccattgcaccccagcttgggagacagagcaagactctgtctaaaaaaaaagaaaaaggaaaaaagaaatacaatcagagcattctccattacaaggacctgctctccagggaaaaaatactttcccagggctttgcctcagctgagggaatggcatgtctcctactctacccctgtatcacctgaagaagaaaggagaaacatggggagttaagatccatgctgatggtcacagcctccaaaaacagacccacgaaaaatctgagacttcatcatacaatcatataatcttcccgtatcccacacattaccaccacaccaatagggcttcagtatcacaaaagtgaattatagttgaaagaggtgcaaggaacagattattcaagaaggagttcttaggaaaacccaaagacaacaaagtagacaaaagcaatgacactagaggaatttagagcctctgaaaactgcagctacagcaaacaaacagtgcaattcctagctagattaacataaaacctcacactgaacacctatttacctcagttcttattatccaatataacatatcctattgtaaaacaaaattgcaaagaatgcaaaaagccaaaaacaaaacaaaactctctctgagatgttcaatttaaaaccacaccatttataaattcggaaaggagactttatttcttgtaaaaggttacagcctgtaaggtggccatcccacaagccgggaagtgtgcctccagaaaaaaacagaaacaggaatttcaaaggagaaggggttgaggtaggagatttatgttgaacaggttggcaaaacaaacgtattcaacaggttacaggaagagctatggatatgcatgcaacataagacccatgtttaccttggggtggagacttaatatttttttaatgtcagctttaggggtacaagtggttttttggttatatggatgaattgcatcgtggtgaagtctgaaattttagtgtacctgtcaccaaagcagtatgcattgtacccaatatgtagttttttatccctcatcctcctcccaatgtcccccttctgaatcttcagtatcccttataccactctgtatgcctttgcatacccatagcttagctcccacttagaagtcagaacatacagtatttggttttccattactgagttacttcacttagaataatggactctactttcatccaagttgtgacaaaatacattattttgttttttttatggctgtgtagtattccatggtgtatatataccacgttttctttatccactcatcagttgataagcacataggttgtttccatatctttacaattgtgaattatgctgcaataaacatatgtgtgcaggggtctttttgacataattacttatattgcctttgggtagatacccagcagtgggattgctgaattgaatggtagatctgcttgtggttctctaagaaatctccacactgttttccatacagattgtactaatttacattcccaccaaccgtgtagaagcattccctttttgccacatccactgttttttgacttttaataatggctattctggctggagtaaaggtgatatctcattgtggttttaatttgcatttatctgatgattagttgagcatttttctgaaaacgttgagcattttttcacatgtttattggccatttgtttttttttgtttttttttttttttttggagaaatgagacatttaaatgtatcacaactaggccctaaacatcaaaatgccttttcagggcatgaaggcatgtaagagtgtatcttctggaaaccggccagaaccaatccatggttgatggtcttcttatctgtagaaagtgctgaaatcagtctcttgtccaataaaagctgtagttatggctggtagaacagagattagttagtcagaatgtggtggtgaactacaaattgttttaatattgctcatcttgaggtcagtgcttgtttagctgctagagaaacaaacaaaaagctttgtggcagttagaatgtcatttatttcttaggtgtagggtacatgacttaacccttgcctagaatggccttaagttccatttgtaatttggtatcttattgccacaaagtgtctgttctgtcagtcttataatctctattttaacattaatactagtcagtagttatgttgaaacaatagaagggacgggggtatcatgaggctcatctaatctcctctcctgtcatggctgggaactcagtttttaaagatttttctgggttgcccttgtccaagagggagtctgttcagttggtcggggaaagggggatttagaattttatttttattttatagaggagaaaaaccaagtaacagaaacaaactaagagatgatgccaatttggaattatcagaatttgaaataagtatgattaatatgttaaagactctgatagaaaacatagacaacatggaacaacgaatggacaatgtaagcagagaggtagaaatcctaagaaataatcaaaggaaatactagaaatcaaaaccacagtaacagaaatagaaaatgccttgattggctcaccagtagactggacagtgtgaaaaggagagtagcttttcctgccactcctccctcccccacaacaccactctggctgcaccgtgctctgaactccaggcttctgctaagctagtgccaccttcatctcccttcagccccatcacgattatcttccaggacctcatcagccacaatgagatgttctctgacatttacaagatctgggagatcacaaatgggctgtgcctggaagtggagcagaagatgctcagtaagacaacagggaacactgatgactcactcattggcagaaattcctcctctgaaagtactgaggatgaagttactgaaagcacgataatcactagtgttgatattgttacaaaccatcacttgcaggaaagcatcttcacaaaagaagcctacaagaagtatatcaaagattacatgaaatcaatcaacgaaaaacttgaagaacagagaccagaaagagtgaaactttttataacaggaatgaagaacaaatcaagcacatctttgctaattttaaaaactactagttccatttttttttctttttgagatagggtctcgctctgtcacccaggctggagtgcagtggcacaatcacagctcactgcaatttctgcctcctttgttcaagtgattctcctgcctcagtctcttcagtagctgagattacaggcatacaccaccatgcccagctaattattgtatttttagtagagacagggtttcaccatgttggccaggctgatctcgaactcctgacctcaagtgatccacctgctttggccttccaaagtgcttggattacaggtatgagccatatgcccagcaaaactaccagttctttattggtgaaaacctaaatccacctggcatggttgctctgctgaactaccgtaaggatggtcagtatgaccccatatatgattttttaaggaatggtttagaaattaaaagatgttaagaaatttggtaattactttggatctatcacctgtcatcataactggctgccacttgtcatcaacacaacaccagagattaagacaaatgagactgatgtcatcttgagctttttaattgttttgactctgacttatttggtgtggaggcatcacttttaaggaaaaaaaa

SEQ ID NO: 1308 - DNA, 6000 bp, Homo sapiens
gagcctgaggcagtaaatcgcttgaacctgggaggtggaggttgcagtgagccaagatggcgccattgcgctccagcctgggcaaaaagagcaaaactccgtctcaaaaaaaaatttaaaaaaaaaaaggctgggcgcggtggctcacgcctgtaatcccagccaaggcgggcggatcacgaggtcaggagatcgataccatcctggctgacacggtgaaactccgtctctactaaaaatacaaaaaaattggccgggcgtggtggcgggtgcctgtaatcccagctactcgggaggctgaggcaggagaagggcgtgaacccaagaggcggagcttgcggtgagccgagatcaggccaccgcactccagcctgggtaacagagtgaaactcggtctcaaaaaaaaaaaaaaaaatagtgatagatttctaattttttccctgccatacttaaatgtgttaatatagtcaagtctgtgttgtagttcagtacatcatctaaatataatcagttctatagagcaatgcttctgaaatattaatgtgcatatgaatcacctggggatcttaataaattgcagcagtaagtctggaagaggagagattttgcatttctatcaacctcacaagtgacaccgaggcttctagtccatggaccacactttttgagtagcaaggttataaaaggttcctatactgtttgtttttttaatttgacagatgtatactataaaaatgcaaaacataaaaaaaagtcaaaataacaaatctggaaaaaacattgcaacatctgtgacaacatgcatatcttttttttttttttttttttttttttgagacggagtctcgctttgctgcccaggctggggtgcagtggcatgatctcggctcactgcaacttctgcctcccgggttcaaatgatcctcctgcctcagtgcccctagtagctgggattacaggcatgcgccaccatgcctggctaatttttgtgtttttagtggaggtggggtttcgccatgttgaccaggctggtctcgaactcctgacctcaggtgatccacctgcctcagcctcccaaagtgctgggtttacaggcgtgagccaccacgcccggccaacatacatatctttggtatgagttttctattgctgcagaaaaattaccatcctatacttttaaagtttcagaatcatcaatctgaaagatagtacaaactattaaaatggtttacaaatgcccattacacatttccacctttatctccaactacttcagcaccatcacccaccctgtgggcacaaatgtactcaaaccacacctgacaaccccttacacaatgctaaaatcttaacttctttagtctatccaaccctccctaactctatgccagaaaacagactttggttttgataatacagcaggcccagcaaaagtcagtcatcagtttagaggtcctctcctctttccccacttcaactgatttttggtctaatttggccaagcatttcaccattctatagtcccatgacctatgtattccagatttaggctgagaaaatatggatctttctttctttatttttttttttgagatggagtttcgctcttgtctcccaggctagagtggaatggtgtgatctcagctcactgcaacctccgcctcctgggttcaagcgattctcctgcctcagcctctcgaatagctgggattacaggcgcccgccaccatgcccagctaatttttgtatttttagtagagacggggttttgccatgtgggccaggctggtctcgaactcctgacctcaggtgatccgccttccttggactcccaaagtgctgggattacaggcatgtcaccacacccagctggatctttctttaatttataattaatcttggccgggcactgtggctcacacctgtaatcccagcacttttggaggccgaggcaggaggataccctgagatcaggagttcaagaccaacctggcccacacgacaaaaccccgtctctacttaaaatacaaaatttagttgggcatggtggcaggcgcctgtaatcccagctactaggaaggctgaagcaggagactttgaccccgggaggcagaggttgcagtgagctgagattgcgccactgcattccagcctgggcgacagagcaagactgtgtcccaaaaataaaaaataaaaataaaaaataatttatcactgctccatgtttttctcatacaattgtttacactgtgatataatcaacatactataaactctacccttttaaaatgtacaattcagtagtttttagtatattcagagttgtgcaaccatcaccactgattttagaacatttcttattttttgttttttatttttttatttttagagacaaggtcttactatgttgcccaggctggtctcgaactcctggactcaagcaatcctccagcctcggcaactcaaagtgctgggattacaggtgtgagccatctcaccaggccctgattttagaacatttcattatcccaaaaagaatattctcacctacaccgccagtcccccaacctctggcaaccattaagctttctgtctctagatttacctactctggccatttcatataaatggaatcacacaatatgcagtctttctgactgacttagctcacgtagtgtgatgttttcaaggttcattcatattgtagcatgcatcagcagttcattcctttctaaggccaaataatactccattgaatgaatatattaacaccatattttgtttatcgatgcatcagtcgttatgtccttacaacattcctgtattcgaataaagaaccagggctccaagaggttcactcactttataactcaaataataaaatgacatttggggccgagcgcagtggctcacgcctgtaatcccaacacttcgggaggccgaggggcaggggaaagggggatcacttgaggtcaggagttcaagaccatcctggccaacatggcgaaaccccgtctgtactaaaaatacaaaaattagccgggtgtgatggccggcgcctgtaatcctagctactcgagaggctgaggcaggagaatcgcttaaaccgggaggcggaggttgcagtgagccgagatggcaccactgcactccagcctgggcaacagagcgagactccaactcaaaaaaaaaaaaaacaaaaaaaacgacatttctactttttggcgattatgaataatgatgctatgaacatgggcggacaagctttatgtgaacatacgttatcagttttcttgggtatatagccaggagtgggcttgctgggtcatagactaattctaatgcttaatgttttgaggaactaccaaactattttccaccattttacatccccaccagcaatgtacgagaatttcactattacattttcaacaaatgaggataattcttgaacgaacagagaggtatgctgccaccgcagaacgacaacccactacccagaagactgtattaacaaagcagaagtatatgtccggcaggaaaacggagaataaaatgttgcaggtccaagtgtattaggcaagtgagttaacctcgcagagccccggttccttattcgaaaacaaaaaaaagggccgctgtaatgccattttaccttgcagtcgccgtgaaaattaaatcagtcaatccgcgtaaaggtactttacaacactgattattcatgattcgatctcaggcaaggcattaggggcaaacagctaaatgcccagatccctcctcctcgcaaaggttccttcccctcgggagggtccctgagcggcatcgggggctgcagccacttcccttccccgggagagccggcctgccagccacgcaggataaattgctagagctggagcagtagatccgtgccacccctacccagcaccgctcccaggagagagatctgcagcctgctgctaagcttagtaagtccgcgcaggatctttcttttttaaatggtaataaacatattttttggggtcgaagcagaaaaggaggggcaaagggaacacaagcatgtccccccaacctctgatcttagtctcggtctctccaacaccccccgcaacacaccctcctccacataaggaaaacaagtatgaaacccgatcctttacgaaccccagccccaagggccctcacctccccgcaaggacagagggtgcaaagcttacctggtggcttcctccggctcgaccaggctctggccaggcgcctcccgagggatagtagccatcgcctcctccgccttctcccagccaggtggtctccgccgggccgcccccgcgcacccgccaggaaatgggaggctggggaggttcagggcgaagaggatataagggtggaggtgggtgtaccggcacatctccacccccaggcccgtagtagcggccgtaggacggaccgtcactggggccgtagcccgagcgcctcagggccgacatgggatccgctgccctgaagcgcttcccgccccgctccccacggccgacccatcgcgcaggcgcccgcgggcgattgcgaatggagagcagcgaagggggtcggacgacgccagccaatcccaggcccgggcccgccccttctgctgccgaaccccgaaagctgagggacggaggtcagtgactctggggtctcgggaacccggagacgaaggaagacaccgtgttccttaagagggagtatacgtttcctcgccatttatccaatggagtttcctcttacctacttaacaggaacagggaaagggtgtcccccaacggtacggctgccccgcctcttcctgggggcccacacgtgttacaggaagtgggtaagggtaatatggaggagcttccggcagcccccggcggctgaaagccggggcagaagtgctggtctcggtcgggattccgggcttggtcccaccgaggcggcgactgcggtaggagggaagaggttttggacgcgctggcctcccgccgctgtgcattgcagcattatttcagttcaaaatgaactatatgcctggcaccgccagcctcatcgaggacattgacagtgagtagtttatctcctcccggtggagcccggggttagacccttcctcccgggcgggcgcctcttccgaagaagcttgtagaatgagtcccgggcggggccggtgtgttctgagctcaatccgggcgttccgcgtcgatgtcctccacagctgcggtacacaccgcttgcccacccagtagcctgctgctacttctgcccctcgcagcctccgccagccctctagctggtgagccccaagcgatggaactcattcttgcttccgtggatcgcggcagcagaggcccgaacacgaaagaagcccggggagggggggggcttctcccccgtccactcctgcctgcagtatttcgaagtatcagcgtgttaccggtggatggatcggaatacctagagagaggattcattaaaaagcgaaaatattaagacagcggcagttggacttaattggcagtaaatgtaggcgctctacggtgtggccatttgctagcttattttactgtgagggtcattagcaccttcaggttattgtagtagagaccactgttagacatggtattgacttttctggaaagaccaaatcacttgcaaccttttttttttttttaagacaatttacttttgcttttactaagaagacctcccttattcctggtttttgtccggaagaggagctcagtcctatacaaaagcgaaaagaaccgtctgcagttgttctggctttccttttttctaaattccgtctgtgcattattcctcaagcaacattttttattgttttaatcatgtgatctttctcattaacttgtttcaagatgatttacacatagttttaaataagttgcaatcgtctcagttactctgtgaatacgcaatttagaatctatggttaaaatttcattttacgggcctggcgcg

SEQ ID NO: 1309 - DNA, 6000 bp, Homo sapiens
aagttgcagataaatttcaatattaaataacaaaaaatgcaatgggctgctgttattatccagagtataagagatgtccataaattaatacataccaaattgatcaatgcttcttaaaaagcctataagtgtccttccatctcgaagcagaaccaagtgcttttctggggagagaggaaaaaatcttttaaatgaaaactgacaagttcagcgagtatttaggataataattaacagtttaagctgtaccacttcctcggccaatgcatttaatgtgaagttcaagttcattggaaaactgaaaaaagcagcacagcaacgcggatttagataacatcagtagtgaaaagaatcagagcagtgtggcagagtgggaaaaggacagggcgtggcaccaggaagcctgactagctggctctagacccttatgttggttttttttttttccttttttctttttttttttttttgagacagagtctcactctgtcacccaggctgcagtgcagtggcacaatctcggcttactacaacctctgcctcccaggttcaagcgatcctcctgcatcggcctccttagtagctgggactacaggagtttgccaccatgcctggctaattttcatatttttagtagagatggtgtatcaccatgttagctaggctggtctcaaactcctgacttcagatgatccatccacctccacctcccaaagtgctgggattacaggcgtgaaccatggcgcctagccaaagacccttatgtttgacacttaaaccatctcatgtcatgtcagtttttatatctgtaaattgacaaatttaatctagatgactattatcttatttgtagaattattttgtcctcaaaagatgagcttctatctcacattttgtttgtaaccatagaaggctttaaataaaaacacaatgcttcaggcatttaaaatgaagactaataataagctagagcagaaattcaatgtttactgagggggcatgtgctgttctggggtctagacatacagtagagaatgagacttagaaagtcaccaaccttatgaatttatattcatgttggaggaggacaaataaataagaaaataacctattgtgattaggacaatggaataataaactagcaaggcagtatgatgaagggagagaagtggttacagaaggaagggtggcaagggaaagcctctctgaagaggtgactttgagctgacactgaagaatgaaaataagccagttactagcgcacccagcaaaatttctttcattccatgcctaaagtactttctagatgcagaacagaggaaaaacacagtgactctgccctgaaggaatttatactcttccttgcgctataaataagtaccacagaaagcaaatcttaattatatgagactacagagagagaaactgtatttctgaaggaggtatcagagttggaccttaaaaggtagataattttagggcacaagaagagtgataggaagggggcggggggggagaaggaaatctgtaaattaaagaggaggaaaaaagggctatacatccatgtttagctaaaagctgagggtgtgaagggaaagaacagtagataaagtcagaaaagtactgggcgcaggctgcatctggatttgacttcatagggaacaagaaaacattaagtgatggagtctgtttactgagtttgtataagtgggtatgtgtgagagggtggggtgctgaagatgtgaggtaaagatgtaggagttttatgagacatcacaaaactatttaccaagagttgggaataaaagcagcaagctcagggtgaaggttattagctctttgtgattctaaagtgctatcaggacacttaatagaaacacacgcagatagttggaaacagtaagactggaaaaccaaagacatcaagattagagaaagcaattttggataaatctacaaagaggtgatataaaaaactaaagtacaggagatctactaaagatttaaagaagtaggccacatgtaatccaagtgaccatctattttggagaacagtaagagccagagaagtaagaaaatcaccaagtaccagttgttagagaaatcaagagaagagaattaaagaatctggtggggagagtatcacagtgctgcaaaggggagagaacacagaagaagaccttagacgaataactttgaagaatgcagcttgagtaatttcaggataaaaattagattgcaggagtaatgtaagtagtctattgaaggtgatcaagaaacagacaaaatgaaaatgactcgaggtttggggataaagatatgaaaaaagggatgggcatatgaagagaacggagaaaatatttgagatggatagacagtaacacatgaggggaagaacgcaggggttggggagacagaggatataaaagaaaaaggctaacaacgaaaaaaggttccagaagcagtgagaggagacagtaacaacagacagacaaaaagggaggaatccttcctactcaaattaaaggatgggtgaaaatacagaaacacaaggaggaaactgtgtgttagggttggggagcaaagggtgcatatcaaatggcttcaaagttttcataaagtagggggtctggaatctacaaagaggtaggggttagaggaccaaagagcaaaactgatttttagtaaaatggcaggatgtgttagaggatatataaggagagatgagggcaaaagagcatcctcgagcaactaaaacatcctgttacacgtaacaggttcatatagatgttaatatatatttagtccaattacactacatttcccttacatagcacaataagtaatttgtgtttaaaaaaatgatctgtcggccggaggcggtggctcacgcctgtaatcccagtactctgggaggccgaggtgggtggatcacctgaggtcaggagttggagaccagactgcccagcatggcgaaacctcgtctctaccaaaaaatgcaaaaattagctgggcgtgctggcaggcgcctgtaatcccagttacttgggaggctgaggcacaagaattgtttaaacccgggaggtggaggttccagtgagtcgagatcgcgccactgcacactacagcctgggcgacagagcaagactctgtctcaaaaaaaaaaaaaaaaaaagaaaagaaaagaaaaaagatctgtcaaccataaaatgattttttttttttttttgagacggagtcttgctctgtcgctcaggctggagtgcaatggtgcgatctcggctcactgcaaccttctcctcccgggttcaagcgattctcccgcctcagcctcccgagtagctgggattacaggcaccgccatagtgcccagctaattgtaggaacggggtttcaccatgttggctaggctggtcttgaactcccgacctcaggcgatctgcccgcctcggccccccaaagtgctgggattacaggcgtgagccaccgcgccaggcccgtaaaatgaaattttaaccatagattctaaattgcgtattcacagagtaactgagacgattgcaacttatttaaaactatgtgtaaatcatcttgaaacaagttaatgagaaagatcacatgattaaaacaataaaaaatgttgcttgaggaataatgcacagacggaatttagaaaaaaggaaagccagaacaactgcagacggttcttttcgcttttgtataggactgagctcctcttccggacaaaaaccaggaataagggaggtcttcttagtaaaagcaaaagtaaattgtcttaaaaaaaaaaaaaaggttgcaagtgatttggtctttccagaaaagtcaataccatgtctaacagtggtctctactacaataacctgaaggtgctaatgaccctcacagtaaaataagctagcaaatggccacaccgtagagcgcctacatttactgccaattaagtccaactgccgctgtcttaatattttcgctttttaatgaatcctctctctaggtattccgatccatccaccggtaacacgctgatacttcgaaatactgcaggcaggagtggacgggggagaagccccccccctccccgggcttctttcgtgttcgggcctctgctgccgcgatccacggaagcaagaatgagttccatcgcttggggctcaccagctagagggctggcggaggctgcgaggggcagaagtagcagcaggctactgggtgggcaagcggtgtgtaccgcagctgtggaggacatcgacgcggaacgcccggattgagctcagaacacaccggccccgcccgggactcattctacaagcttcttcggaagaggcgcccgcccgggaggaagggtctaaccccgggctccaccgggaggagataaactactcactgtcaatgtcctcgatgaggctggcggtgccaggcatatagttcattttgaactgaaataatgctgcaatgcacagcggcgggaggccagcgcgtccaaaacctcttccctcctaccgcagtcgccgcctcggtgggaccaagcccggaatcccgaccgagaccagcacttctgccccggctttcagccgccgggggctgccggaagctcctccatattacccttacccacttcctgtaacacgtgtgggcccccaggaagaggcggggcagccgtaccgttgggggacaccctttccctgttcctgttaagtaggtaagaggaaactccattggataaatggcgaggaaacgtatactccctcttaaggaacacggtgtcttccttcgtctccgggttcccgagaccccagagtcactgacctccgtccctcagctttcggggttcggcagcagaaggggcgggcccgggcctgggattggctggcgtcgtccgacccccttcgctgctctccattcgcaatcgcccgcgggcgcctgcgcgatgggtcggccgtggggagcggggcgggaagcgcttcagggcagcggatcccatgtcggccctgaggcgctcgggctacggccccagtgacggtccgtcctacggccgctactacgggcctgggggtggagatgtgccggtacacccacctccacccttatatcctcttcgccctgaacctccccagcctcccatttcctggcgggtgcgcgggggcggcccggcggagaccacctggctgggagaaggcggaggaggcgatggctactatccctcgggaggcgcctggccagagcctggtcgagccggaggaagccaccaggtaagctttgcaccctctgtccttgcggggaggtgagggcccttggggctggggttcgtaaaggatcgggtttcatacttgttttccttatgtggaggagggtgtgttgcggggggtgttggagagaccgagactaagatcagaggttggggggacatgcttgtgttccctttgcccctccttttctgcttcgaccccaaaaaatatgtttattaccatttaaaaaagaaagatcctgcgcggacttactaagcttagcagcaggctgcagatctctctcctgggagcggtgctgggtaggggtggcacggatctactgctccagctctagcaatttatcctgcgtggctggcaggccggctctcccggggaagggaagtggctgcagcccccgatgccgctcagggaccctcccgaggggaaggaacctttgcgaggaggagggatctgggcatttagctgtttgcccctaatgccttgcctgagatcgaatcatgaataatcagtgttgtaaagtacctttacgcggattgactgatttaattttcacggcgactgcaaggtaaaatggcattacagcggcccttttttttgttttcgaataaggaaccggggctctgcgaggttaactcacttgcctaatacacttggacctgcaacattttattctccgttttcctgccggacatatacttctgctttgttaatacagtcttctgggtagtgggtt

SEQ ID NO: 1310 - DNA, 6000 bp, Homo sapiens
ttcaattttgtgaaggctgagagaggtgaggaaactgcagaacaaagttgtaagctagcagaggtcggttcaggaggtttaagacaagaagccatctccataatataaaagtgcaaagtgaagcagcaagtgctgatggagaagctgcagtgagttctccagaagatccagctcagataattaatgaaggtggctacactaacagcagattttcaatgtagatagaatggcttctattggaagaagatgccatctaggacttttagtagccaggaaggagaattcagtgcttggcttcaaagtgtcacaggactggctgactcccttgttaggggctgatgcaactgatgactttaagttgaagccaatgctcacttaccatttcaaaaatcctattggtcttaagaacaatggtaaatctactctgcctgtgctcaataaatggaataataaagcctggatgacagcacatctgtttacagcatggttcacttaatattttaagtccattgttacacctactgctcagaaaaaaaaattcctttcaaaataatactgctcattgacaatgcacctggtcacccaagagctctaatggagatgtacaaggagatgaatgttgttttcatgcctgtaacacaacatccattctgcagccccataaatcaaggagtattttgacttccaagttttattacctatgaaataaattttgtaagcctatagctgccatagatagtgactcctctgatggatctgggcaaagtcagtagaaaaccttctggaaaggattcatcattctagatgccctgaagaacatcaataattcatgggaggaaaaatatcaacattaacaggagtttggcagaaattgactccagccctcatgaatggctttgagttgttcaagactttggtggaagaagtcactgcaagtgtgatagaaacaacaagagaactagaattaaaagtggatcctgaagatgtgactgagttgctgcaatttcatgataaaacttgaacagatgaggagttgcttcttatagatgagcaaataaagtagtttatgaagatggaatctacttctggcaaagatgctgtgaacattgttgaaatgacaacaacggatttagaatattttgaatattaaataaacctagttgataaagcagtggcagggtttgagaggattaactccaattcttaaagaagttctactgtgaccaaaatgctattaaacagcattacttgctacagagaaatatttaatgaaaggaagagtcaatcgatgcagcaaacttcattgttgtctcattttaagaacttgccacagccacctcaaccttcagcaaccatgatcagtcagcagccatcaacatcaaggcaagactctccatcaacaaaaagatcaccatttgctgaaggctcaggtgatcattagcttttttttttagcaatacatatctgtgtgtgtatgtgtatgtgtataaaatttagagatgggatctcactgtcatgatcatagctcacactccagcagcctcagactcctggactcaagggatcctccttgcctcagcctcccaagtagctggaactacaggcatgcaccaccatacctgaccaattaaaaacaactttttagaaacagggtctcactctgctgtccaggctgccttgagtccctgcctcagcctcctgagccctgacacccagctcatggtaactgttggtttgcttgtttgagacagggtctcattctgtttgctcaggctggagtacaaaggcatgaccacagctcactgcagcctcaaccttctgggttcaaggaatcctctcaactcagcctcccaagtatctgggactacaggtgtgtgccaacatgcctggctaatttttgtattttttttgtagagacagggtctcactatgttgcccaggctggccttgaacacctgggctcatgtgatccacccgcctcagcctcccaaagtgctgggattacaggcgtgagccactgcaccaggccattaagccacatcttaagggtggacaggtcagggatgggcatttcaagccaaggaaaacagcctatttaaagaaaccacaaaagagcctaccctctaagacataaagccggaacaaaggtaaagacaagtggagggagatgatggtggaagagtagaagtacttggtcttaaagagctttataattcaccataagaagtttggattttattcagtacagcaggtagccttggaaggatatgagcaagggcgtggcaggcatgcaccacccttctatagaagatagaatggagagaggtaaaactggagactaggatagttaaggggttgctgcaaggttaagaccatgagagcttggtcaagaacagtgaggaggccaggtgccgtggctcacgcctgtagtcccaggactttgggaggccctggctgacagatagcttaaacccaggagtttgagaccagcctgggcaacacagtgagacctcatctctgttaaatataataataaaaataattaaagaacagtgagggttgggcgcagtggctcacgcctgtaatcccaacactttgggaggccgaggcaggcgtatcacctgaggtcaggagttcgagtccagcctggccaacatggtgaaaccccatctctacaaaaatacaaaaattagccaggcatggtggcgggtgcctgtaatcccagctacttaggaggctgaggcgggataatcgcttgaacccaggaggcggaggttgcagtgaactgagattgtgccactgcactccagactgagcgacagagtgagactccctctcaaaaaaaaaaacaaaaaaaaaaacaacaacaacagtgaggagacatgaagagggatggatttaaggggcatttatttatttagtctacaaaattaacctggtcatcaacgggttttatgggtgacaaaaaaaatccaagatgactccaaggtttctggtttagacaactgttgaacagataattcacagatgataattcacagatgataatcccaaaggcagaacggatatacaaaggaaataaaagatgagagaattatggtatttggttcagtttaaggagcagggtgtttaggagttagaggagggcagaagatggaaccctggggaaacagcaacatttaaaagggcaggaaaggtagagaataagggccaagggattactcaacagtccgctctccaggtctgcctggctcagatctatataaagaaaaggagcagggaatgaagtaaaactgttacaggaaaggggtcccaatccagaccccaagacagggttcttggatctcacgcaagacagaattcagggcaagtccacagtacaaagcaaaagcaagtttattaagaacgtaaagtggtgaaagtacagctactccacagacagagtagggcattcccgaaagtaagaggaggaacgcgtccaccctaagtacaacacttagtttatatataggataaaaaaagatcatggggagatgtgctttgctacaagggtttgtgataaaggattaattactatattatgtaagaatcgatattatctttatttatgagacagagtcttactctgtcgcccaggctggagtgcagtggtgcaagcacggctcactgcaacccccgcctcccggattcaagcgattatcctgcctcagcctccagagtagctgaaattcgagggcatgtgccaccacacccggttaatttttgtatttttagtagagacgttttcaccatgttgaccaggctagtcttgaactcctgacctcaagtgatccgcccgcctcggccttccaaagtgctgggattacaggcgtgaggcactgtgcccagcccaatattattatctttaaagcaaaattaggaatgcttctgttctcaaaatatcgggatatctggacacttggtagtctgggtctgtgtagtaaacattatcaatctgttgccttaatggtatacacatctagaggctaggaatacctaacttcccgggaatgcagcccagcaagtcccagcctcattttcctagccctcactcaacacagagtcgctctagttcgaacccctctaacatattctctctcaggtgtgaaaattgctgcagcagttcgctatttgcaacacagcacatggaaatcacagcaatggagagccttcagaaaagcttctggggagggacagcctggtggctcaactcctgtaatcccaacccatggggaggtcgagatgggaggatcccttgagctcgagttccagactgacctgggcaacgtggggagacaacgcctctatttatttaaaaaattacatatatatatatatatatacatacacacacacatatatacatacacacatatatacatacatatacatacatatatataaaacgcttctgcgttggcaattgagatgatttggcgagtgtgtcttttttcattgctaaaaatctgtcacgttggctctcacagaaacttgtgatacctgaagacacaggtaatgggataaagattagcactctgggaaaaggttccacaattttattaatcatacaccatctgtgtccgcccttttaaagaaatgggcgcaatcagccaacgacctcggctttacacctgttctccaagaggccctagttgttccctactgtaagctgccccagaaaaggtccgcatcaattaacccacgggaacagcccggggctggaggatgccccaggaatccggcctcccgccgcgcctcctccccccacaagcagttccttcctgcctgccggaagctcagggctccgcccacttcggcaactctgaagccaccgccggaaacacctggcctcagccaatagttagcttcccaggaaacgttacctctgacctcggggctaatcagagacagtgggacgcacccctcgcgagaggtgaggttgaagctgcctccgccatcttggagatgggagacgggcgatggctgtggtccttctgctaatgcaaacaacaaaacgggcacactagtcacccccgagggaggccaccatcactgtaactgttggccaaagctacaaaagaagcgagggaatccaaccgagcgcagcgacactgagaacagcttcccctgccttctgcggcggcagaagtgaagtgcctgaggaccggaaggatggtgcagtcctgctccgcctacggctgcaagaaccgctacgacaaggacaagcccgtttctttccacaagtgaggaccctgcgcgcctcgcggggccggtctcagccggggtgggggcgcgcggccggcggggccgggggcggagccaggcgcgtgtccgcgcgaggggcgggtggggtctggggccggccgtgtcgggcgtttcccaccgcgtcccgctgggaaccgccgcccgatcgcgcgttctcggcgcgcgtcgccgcggcagccgtttctcgcgctcctggaacaggccctggttgcaggcttcgctcacggcctgggttgacgcgttcggagcccacgggcgatgcctagggtggcgcgggttttgccaccaccagggtcacagagcagccaggtgttttaatatggtcttaggggtaaatttaaaatagaaacaaaggcctttaaacgaagaaatcactacttttcgcccttgccgtggatgggaggccagcatcgtagcaattaagggttttttggctgggaaatcagggagaatttttgcccccaatctctaggaactaagctttaaggaccctgtattttggagaaagcttcaggtactgccgagataaatcgttatcttttcagcacacaataatgataatatggacagttacaacatggatcataataaaatgactcacacggatctttatttattatggcattacctgtgcatagagaaagctctttcgaaagaaactgccccacagctttcagagctgtcttatccagtagg

SEQ ID NO: 1311 - DNA, 6000 bp, Homo sapiens
ttacggctgcgttcagttttccactttcattcatactactcaccttaatcagggaatgtattaattacaaattaaagataattatttgactcattaggtttagggtatatacatgtcaaataccctcaaccctccctccaggtatatcaaacaaaacctcgagctcctactgctgaaattcacattttcctcttacttgatatcaacatgttctatttttatgtctcataaatttaattatctgctaaaatgaagactgaagcccaatgccccaaacactaatttccacaaatacggattcagaataggtttctaaaaatttcagtatcctatttgtcacaattgtattgaatctattatctttcattaaattattccgtgtgtgggtcactgttttgccctaagtgatttaccacccaaccttgccctcctaaaattatttacagtgcagctacacaaccgttttcagcatgctttaggcttgtacttcctggagggaacttcacttcagtgacaaaactattcatctgcgatgaacactaccactagctccagtgccacctcccatgtagctatgcagtcactgcaaacatgagcaagcctaatgcttgctgcatcgcacgtgatttcatttaacaagcagtaatttcccttttctctctgagaatgacttggttcaatgtaaataaaggccgtaaagtttagttggaagagaataagagaatattggaagttgtgtagcctggagtaattgagatatgcaggatgttccaagttacaagatttattgtgtatctacagacactttatgatacaaatggcaatgagctaatagttatacgtgcttctggtgtcatagaactttagatgtcatttgtcatttatttaaaggacaaaactgaaggaagttaggttaggtttaggaatcatcaaaagaaaagaaagtgtcagcataaggagcatcacaggttcctatatcctataagttataatatacattggagatcagaactttttcttttctatttctaatatttagattacagatgagctcagaagctaacctcagaaactattttaagaataaaacattccatcattgcaattgcgggaatcttattggcaatcattatttgcatgttggaaaaatggtggtagcggaggtgatacaaaaaggagaaatctaatgctaccattttgacttacttttaccaagattaaacatggccatcacaaaagattggcttcctaaactgtggacatcttcccagttcttataagtaagggatggtttacctcaaaataacactgaattaaaagtgacttgtgtccaaagagctaaagtcagcacaaattataacagcccatggcttgctgagttctcacaatttcaagcatttgcctaaggccttcctcactcacttcttctgtactcacactagctgacttcgggggaatccagcagtattgccggcccccagtggcacagtggcacagagcagcctgcgaccacgaagatgccggcagatccccgtcacctccctccccaccaagtgtgtggaggggccagctctctccgcctccctgatcatttgtttactgtgctcaagttgggattcttggccaataggcagctcaagggggaaagaaacacggtgtcttaagtgcattaaatcttcatattagccccctggcttggtaaacctttatgttggctttgttctctttttttcaagcatgacaaacaagtggtttttctttttcactttaatgattctttaaacaaaaaggggtagtttagggctttctccgaggctgataggtgtttctgtttaatgaggtttttattatactgtattggcttccctgaaaagaaattacgagcagcaaacagctgataatagaaaaaggctggaagaaacaataaccaagagggggaaaaaattagtgtggcagcagatgcacgcgttgtagctgcgggattaaatgccacttccattctcccttggccaccattgtgcaagtaataaagtgaatgtggacacttatgtgccagttatgtgtgtgcaaaagatatagatatagatatagactcagctaaactgccatctgtggaggaagaaggctggtgagctcagtctagacaaagatgagtgaagctcagagtgcggggtttacaagggctggtcggttaccatggaaactaattggagctaataagtaaagggacattttaactgtgggaacagaataggaggggctatttttcaatatcaccgttacctacaattaatctttcattttaggagtgtctttacttaattcttattatgaagcgcttcactctgtgcacaacctcaccctgctcaatgtacttgaaaattcggcatatcatcttttagaatgtgctgtattttaggtttagatctttcaagacagaatcaatttcacttttttttttttcttaaaaaataaactgtttgcagatggcaaagagaaaggaagggaggtaatggaaaattcttaacttctaaactgacactccgctgagcactaaagcagactacagagagaaggggagctgggaccttatcctgcagcaccaacttcaggtttttgtttgagttgattttccctaacaaaagcatttcagaacaacaacgaaaaatgtgcctttgtggacttactcttacaatactttccaaaggtagcatttacagctactgcagaagcaagtattaagatcatagcaaacaaccacatctattgcatccttgtattttttattttaaagcaagtattaaatcgtgtaaatagctgaagttatcaataaaagagaagcagtgactgagttttaatgaaaagatctacaattaataatagaataaaatgtccgtgttaaaaagcactttaaacaataatgtaggtcagaaccaggcccatttgggaatgcctcatagacagtgtgttacaagcacagggttgataaagcttcttgattccgcatctgtacagtttcttaggttttacttttgtaactcaatttacagtttaagagaatgcgaactaccttaataatgtctctggggtcttcaaaatctatgcagttgaggtaatccagatttccagacatgggtctggttggattaacccccctcccgccaaaacaggaaaaaaaaataccttacaataattggcactattaaaaattttatgatgcccaagggaagttagagccccgttgtgccacttgccattgttgaaaatgtttgtgttgattatgtatctggacttagctgattaggagtagtttagtgaatacacaatatattgtgaaacagacacctcataatcacttctgagaagcaattgagcaaatgaatcaggactttaacttctgattctttttcttccctccttcttctttataactcaattataagaaaaaaatgcactgcagaaaaattagttttctaattttgtacatcagaaaattgcacccagaataatttttaagtatcttaatataataccacacacaaaaattctggaaaaacacaagctagtcaaatcaatgttgctagaaactgaaataattctccttgtgatactagcatgcccatattagataactatttatagtctaaattttaaggcattaggcaagtttaagagtttttttgttttttttttaaaacaatccccctcccagttcaaagaaatacaaaaggtgcaatacttaaaatgttggcttcccacagacactgtcaggaagttggtagtgtttaaaattcctattttctctttcagtttatcaaaattccttagatatctgatggaatttttgaaattgtgagatttgtggcaattaattgatttccagatatcttcttaaagtactgtaacaagtatagccattttctggttcagactgctgtcaaagtacttactttcattaaacagttcagaaaaccaaaaaaaaaaaaaaaatgcccctaagaagaaggtattgaaatgaccaaaaattgaaaacatttcaaagcaaaattgttaatgagctgtttgagctatatggacattataagtgcaattaactagaagccaataaaaataatcaatgacagagtgcagccctctggtaccaaagtgcttttacaaagagatgtctgtgaaagcagcaagtgattaaaaaagccacctttatctatgggagcgcgtgctattttacatgagtagaaacgaaaatgattttcattgactatttctgaagttcagcctgtggcaaacagtgaagagctgtgtgtgggaatagagaagtttctgctcttagctgcgcccccaccccctccttgccaagaatgttggaggcagccacgatctaatcaaagaaaggtaggagtttagatttcaaaatgtagatgtcacatttcagtgccaactactcctacattaaccctttatcagcaagtcaagatgaaccttttatctcctatggaagggaaaacgtcttgctgagatggcccttccatagacgggcagtaaaaatgtttagggtttctgtgcatcccactgagggtccccatcatctcagggggagcacgaggagttgtgaaaagtaacgcacaactggtcatcagaataattcattccctccaccttctctgtagcacctcccacttctcctctttttatagcagtcctttctctctgaaaatctcaggttacttgactgggagttctcagacctccagtttcagccctgccctcagcctccaatccgtaagagacacccagccccagcaattggattgggcagcccgtcttgacacaccactgtgctgagtgcttgaggacgtgtttcaacagatggttggggttagtgtgtgtcatcacattcgagtggggattaagagaaggaaggctgccttgctggagctgtgtggtcttctccaagtgagagtcgcaggcaatagaactactttgcttttggaggaaaaggaggaattcattttcagcagacacaagaaaagcagtttttttttcaggtaaagtaaaagacattgaatgcttctctccccctctctcttttagcatagttttgaatggaatgctagcacggcacacttgtcaaagccagttgttgctgtcctatcaatgctgctattgtacggctgacagatgacggtgagcatagcttgatgcttggctgtctttgtagaactaacactcctcatgccttgcttttgaaggtgtagctaagaaaatacctttgggagccgcgtttgtaccttttcatatccccgttgtatactcaaaacaggagctataacttgcttgtagaggatagataaggctgagaaaggatttattttagctttcaaaattaaaattcactttcaaactgttgcattttactgctcaatttataaagattctttgaagggtctattactgagttgctggcagaggtggaagtgctttcttcaccgatttgtgcaaggtagattatgtctgatttatgacagagcaaagggtgttttaaaatatttttggagattgactctgaagtttggaaactcctgaagagaaggggctaccctctgaacagccactaggtcggctttaaaacaaaaatgcttagagctggaagaaaagcagagaaggaagaaggaggaaaatgctctttaacatagccctcttgcagctgcagggaaagcagatggaggtaattgatttgcagatctgtttgtgaaagttttacaagtcatggaaaactaaagtagcatctctgtaatggatcattaagagtcactacatttataggttttagaccggctaagtgaagtgttaattaaacgtaaatagattttcaggtttggttataaacagacaaacagaaaggatttaattataaactagtcattggaaattaatagtcatctggtgcctgagcaacacaaaatgagttgtcatcatatatgcgagtagccgtaacggctc

SEQ ID NO: 1312 - DNA, 6000 bp, Homo sapiens
cagtgagtagccataaccttcagagtgatctatgtcctggcaatgatttgtaagttccacaactcagtttctccacccataaagagaagattagatcgttgttcaagaatgacaactatttaatatttggaaatgactaaataatgaagtgcctggattctatagaaatgccgaggagaaaagaagattaatttcaaaccaaagtctagtgcaaacatgaccttcctattgtaaatctcatgaataggagaagaaataacatctaaagctttgtttctagggctgagactctggaaatatattaattttaggttgtttctgatggcaaaaaaaaagatccgtctattacaatctcttgcctgtggagatgagaaaaaattcttcctgctacctttgactgaaataatgcagttagcaaagatttaaatgacaagagtagaagtgtcatctttttgtccctttgcctctaggcaggactacagttaagccatctcaggaaagagaagagtgctattgctcccaaaactctccaggtgagaatgataaaaattaaaaacagcaagtgagaaaactcaggggccctgaaattaataaaggtcagttccagctcacatcgtttcagttaaaatttatttctatttggaaatagcctaacagcaaaactccaacggatgggctgtttggcactagttctcggtgaaaattccatttagtattactactactgtctgatctttttctattcagcctcctcttcaccctgttggtgagggagggaggccatcctagggatctggggatggccaaatacacagcacccaacagtggacagatgacagccacagcagcttaaaagtcacataaactcacagcccagggaaggaggatcagggaaggaggataacacataccatgcagggcacacaggggttgcaccgggaacagagtggacaagcagaggctgcaggaggcagtagtaacaagagaatgcggtgccctgaggctccccggggaaggtgtaattggcttgtttgaataattgtgtgggctggtaaggaagtaaaacccataaggttgaagacctggtggagtgaggctggcccagctgacagaggaatgagccaggtgggcgtcctttcttgctggaggggacatatctatgaaagcaggggagctcacagttaggccttggggggtcctgatgaggctcaaagataataaataccaaggtaacacgtgagattttaggcgttacaagccgatccatacaaactaaaccgacttatatgagactcatgttcccttgaccatgcctgatctctctaaggtcttttccacacctattttgtctcacaggaaaagagccacttttgactagattgataaaatgggagtttaagcaatttttctagcaggaggactctcaggccaagaccatgtaattagctaaatgactcatgcagaagtatcctacactcctccctttggtttgaatgaaaagagtaggagagccctaaatcatccagacaaattacatctttaactctttacttaattttagtctgtcacaaggtaaatattgacaaactttagacttatagccagagggctaaaaaaaaaaaataagtctagcttgccactgtggctgttttctgccctccatttttctttctttctctttttttttttttttttttttttgagatggagtcttgctctgtcgcccaggctggagtgcagaggggcgatcttggctcactgcaagctccgcctcccaggttcaggccattctcctacctcagcctcccaagtagctgggactacaggtgcctgccaccatgcccagctaatttcttgtattttcagtagagacggggtttcaccatgttagccaggatggtctccatttcctgaccttgtgatcaggagcatgagccactgcgcccggcccccgccttccgtttttcaagaatactgtcgggacacacacaggtcagggaaatgtagattctctcatttcccctggtttttaacaaatgtcctttatataaaagacaaaacttgagatgttcaggctctgtctgaaactactggcctcttgcatcctttagataaaggacatttgaagttaatgctgggcctgtcatccttagttataccacgttggacaaggcattttatcttctggatcccaagttccatacttttcttttttttttttttttttgagatggggtctcactgtgttgcccaggctggaatgcagtggcacaatctgggctcactgcaacctctgcctcctgggctcaagtgatcctcccacttcagcctcccaagtagctgggactacaggtatgcgccaccacacctggctaatttttttattttttgcagagacggggtttcatcatgttgcccatgctagtctcgaacttctggctcaagcaatccacccgccttggcctccaaagcactggcattataggcatgagccaccatgcatggctatactctttaatgaggaagttaaacaagagtttaaaaatttttttttagcaacaaaaccattgtctcaaacaaagtcttaagtcactctataaaacagatggagataatatttctccatttgactccaactgagtaaagtccaagccagattgcctggcctccctcacattcgtccccttcccacacactgccaaggttcctgaagtaccccttgaaagcctaaagcttgttggaacccagtttgaaaaccaccagatgagataatatctcaggtttcttccagctttcagtagaatagaaaaatcattgactatggaatcagacctagattcaaatcctagttctgtcactttctaagctgtatgaccagactcaatttacccatctgtaaacgaaaacaaaaatagttctgctaggttaaaaagacatgtaaagcatctaggccagttcctgaaacccaggagggatttgtaaatagtagctataataaaggttatggtcctcacctgagcataacaaaatgagagatgatcctacacttgaactacaaatttgcagtaagatcgctgtcattcctgaagccgaatcctcaggaacttgaggccaaaattctttaaaacctgaattggttttaattgttccaaattagtagaggggggaaaattcttctaattcactgaacaatctgtatgcgtggagagcatgtactgcatagacacaccccaagtctcttaaatgacaccacggtcgatccaactagcacaggtggaatttgaagcatgttacttttaccaaaaaataacaggggaaatgtcattaagaacactttaatacaaagccacaagaaattcagtatctgacagctcatgttctatatttcaccccatatcataaaacaattcaccagagagcagttgttcatttgctgagctgctgttgtgatagcacatattatttcaataatggaggagttcctccataaaatcagtcccagaagccagtgatgtctgaaaaatctcacctttggagaattttcctggcattctgtaaaggaagttgcacttacaggtcctctaatgtgcagcagcaaaggaacaacagatgccaacattcttgtttgcctcatgaacttaagccctaaagtaagctgacttgagtaaagtttagaggctccccttcaagttttagaaaagctttcttgtttaacttatgcaaatttacacaccctcatgaacctattgcatatatccgacaaccgtccatattttagtaccatgtggtggctctcacctatgcccatatagctggcgacaatgcaggtaagatctggtcagctgtcagtttcattcagtgaatactcactgagcacctgctttatgcagggccctgtcctgggccaccagggagaacaacgcaaggttccaaacctatggagacagacaacgcatgcggaatgacaacagagaaacagagtcacacggagaaaagaggggaaattggggaaggcttttgtgggggaggcgggatttgaactgagccttgaaggaagtgggtgtgaggatgggggtatgagtaaagatgggaaatggagaattgaaaggccgtctttagagaatgattcacattataacgtgctggggagtaggtgaggcgggagggcgggatgggaagtgggaaattagtgtggagacagaaattgtgggctttgagtgccaggatgaggaatttctttgcgtgttgggaagcagtggcaggcgcaggacaggataataataatttaaagaaaatatgagtagcaagttgtgggagcggggagggaagcttggtgctcagaataatcagaactttctcagtggacccaggctcagtggaaagagcgctctggttccgtttattgctcccacagagaagagaggagagacccagagaggtttaaaattagaggggtcgacagggcacagggaactcctggccaaccatccttaggaaaacaagagaccaggaataaagagaaccagcagaagcacctggtctgagtctaagaaacatcagtgtttactaagcacttggtctctggaacgcctggctttccaaataccacatcttcccatccactccatcctgccacaggcagctactgtgtcgggtgctcagggagccggaaccacatgcctggaaaccctgagcccctgcccgccgccgtccaagccggccggctgcagcgcagtttgtttgccgaggtttgcatgcacatattcagttgcccttttttttcccccagtcctttcagccgtgtcccgaaattcacccttagtgtaacttctgcctctgctcctcctcttcttggaactgccttttgtttgtctggcagcgttggttctatgggggtgtgtgatgataataatacgcgggcttatataaccgtcttcatcttgcgagcacttcgcagaccgtcgctaatgaatcttggggccggtgtcgggccggggcggcttgatcggcaactaggaaaccccaggcgcagaggccaggagcgagggcagcgaggatcagaggccaggccttcccggctgccggcgctcctcggaggtcagggcagatgaggaacatgactctcccccttcggaggaggaaggaagtcccgctgccaccttatctctgctcctctgcctcctccctgttcccagagctttttctctagagaagattttgaaggcggcttttgtaagtatcgtgctctgcttttactttaaaaagaaagaagacaaactttccttcctgtccctgtccttttcgtattatttattcattattcatcatattattattcattatattctcagatgatggaaagtatgtttctggccaaagtcttccacccaaatttggtcccttgtaatgataataagaggggaaagaggtttctgttgataattaattcacttaacaaaatagtacccaggcgaggtactgaaattggccactttcacagcattctggtgatgtctggctgttgatacacaccacacacacacacacacaacactacacacacacacacacacacacacacacacacacacacacactcctttttgcccttaagaggagccctagtcacctggcttgttagacaaggagaaatgatgccactttggtcttcagtttctctgccttgggtactcacaatttcaatcagttgtaattgttgaaagtttcttttcacactacgaaataaatcccatctttcagtgcaggcttgaaacttgcactggcttgggtaaactgtacaaaacactgtagctatagtggacatgtgaatttttattaaatttttcactgcataaccgaaggttctaatattaaagaaacatggacactaactttttaagcacaggcaaaactcaaagccctgttatcaaactatgtgtcttaaagagtgctgaattaacagagtactcttctcagagattatgctcactgctttgagaa

SEQ ID NO: 1313 - DNA, 6000 bp, Homo sapiens
tgaaacagacactcccttggaagaggaaggggatagcctgtagacttgccctaacaatgacatgcggcacacaccatccctctgatactgcttttgcagctgttctggtccttaaatccacaacatgtgattagccatgcctggaagccttcaacatttgcaaatattgcctaaacactttctgaataaagtttatactggagctccaagccaatgacacacacttaaaagaagcaggtggtttaagttttcatcttttctttccttttcattccatttcctccctccctcttacagacctgcatcagccccccctgactgtgggttaagtcattttattagcaagtcaggctctaatcccagcagctgtattgctttagttgtgcaattaacacagtataatctgcaggaaatcaactgctccctattcaagtgtttcaagtaaattaactgatcaaatgttgcagcttttccctgtgctcctggattttggccatggctttgattactgattattgtaattcccacaggtggatttttcgtttgaagaaaatatcttttcttgtgtttatgtattcatgggcgtgtgtgtgtgagcgtgtgtgtatgtatgtgtgtgtgttctgcaactgtaaatttgaagtgggcgtgggtgtttcctgcccttaaagtaattaaattttttgccaaggaattacatcaatgaaacctgagactgaaatatgtatccggtgtttcatgtgttctagtacttttatcgccagattaatcattatcttgggcaaacacgacttgactttttttttccccattgctaagttgtgtattacttaaaatccatttttcgtatgttaccaagctagcaaccctagaaaacaactggcagctgattttctctattatcgaaaatgttcggctgccttgggaggtgcagccttccttcctgctgtagaccttgccacttcgtgcagtgaattgcttctgaggaaagcagttattcaaatgcgatctgatgaatgtcaccttttgtaatttttgttttgtgtcaaatgtatgtttcaggactacttcacagacttaatcactaacgagagcattaattacttcaaaatgtctaagagaatgtatccccataggcccgttatgatggtgatcagccacgctgcgccccacggccccgaggactcagccccacagttttctaaactgtaccccaatgcttcccaacacatgtaagtaacaaactcaactctgcgacctgccgaacatgcctttcccttttctcctcatcccactcctctcctttaccccgtttccttccaccctgcgtatccacaaggctttcttcatgaaaggataacttaagagcagaccacggaacaggcagagccgctgagcctgaaagaaagcgccttatctgggtggtttgaggaggaatcaaatttccagcatttacaagtagctaaatagaaaggaagagatgcacatagagtgaatgggggcaagttttacaagagtttcctttcgttgtcttaaataatattcgtgtgtctgatctaataatgatgatgatcaaatagtatgcttttcatagctgcacagtggggacctctggtctggttatagaaacatggatttattttccaggcgaataccgtagcagctttgctgcagacgtgcaattagaattcctgcagaaggcagcttgagtggcttgcccaagagggcttctcaggtcacagctttaaaataacctgatttttttttttttaaagaggcaggagtcttggagatggggggtgggaaggcacaagggagagggctgatggcgtggagggatgagacagaacaaagagctgtcgtgtgcccacaattctcaccagccaaaggtggaaaaatctagatgctttggcagcaaagaacatgattttgttgttcactcagttgacaccatttcttcctaagctttgccatcaatatccagtcttccacacagagcagtggagttggctctgtgtctgctgaaagcctgaccattagggagacagggaacagaaaattggtatctgtttcctatattgtgaaacctccaaaattggttcttaatctatttgtacttaaatatcatctcttttcatccacactggttattagccaagattccaggcagaaagaaccttacgaaaataggtaagtaactatgcaggctctctagttgccggtcactatacatccctagagaagtttttataaaatgttctcttttttttgagacagagtcttgctctgtaacccaggctggagtgcagtggtgcaatcttggctcactgcaacctccgcctcctgggttcaaacaattctcccacctcaggcttctgaggagctgggactacaggcacacgccaccacacctggctaattttttgtatttttagtagagacgcagttccaccatgttggccaggctggtctcaaactcccctgacctcaagtgatccacccacctcggcctcccaaagtgctgggattacaggcatgagccaccgcacccagccttataaaatatttttatttgtaccttaatgtaactgattgacttatgactcctggtcagtggtacacagatcatctctatgatatcatgtgacttagaccagaaagaaggaggccagagctgactcaggacaagaactaacaatatgaagccagggtgggttacctactgagcatgcccaggaactcagaggatggaagtgttttaatgcataaaatatcatcgacaaatcatgaaggttgccccagcacctgggaatatagctgggataagccattatgttttggagtcaactccatgggtggatatttaagcttctgaagatcttcccctatatacaactctgcgagtaaattcatgaatgaagcccatgtgtgacaagtggctctccattatagctcacttacaaatttagtagccaactgattcaatgaaaggaaaaagtcctgcgggctttttcaatacccctgaacccccctgttcccatttctgttgaatcagaaatcactttacctatctttgttgcattagcagaaacccagtctaaggtgacttcctataactgtaaactttacagatgttccctcaagctggaggagaaggggttgacaaaacagagtgttttgtggctccttaaaagtcagcctgcctttgaagctttgaggcaaggtcctaagcctgcaggaaaatcagcctcaggtcaagagtttataagagctcagttgcatggaatcagtactgcatgaggggaggagcctgcagagttctcagggtctcagcaatagctttttgaaaaacatctctgtgctggccaggcgcggtggctcacgcctgtaatctcagcactttgggaggccgaggcgggcggatcacgaggtcaagagatcaagaccatcttggctaacactgtgaaacactgtctctactaaaaatacaaaaaaaaaataaaaattagccaggcgtggtggtgggcacctgtagtcctagctactcgggaggctgaggcaggagaatggcatgaacccgggaggcggagcttgcagtgagccgagatcgcaccactgcactccagcctcggcgacagagcaagactctgtcttaaaaaaaaaaacaaagaaaagaaaagaaaaacatctctgattccagtaattaaaaattctatttcattccacgaatatttatcagtgccacatgtgacactatgcagcccagcagggatatagataagcgtgaggaagacacagttgctaacatttaaggacagataaactaaggcaggggttggcacactggtacccacagtccaaacctagcttgccaccagtttttgttaacaaaattttattgacacacagccatgctcattcatttatgtattgtctgtggctgctttcacaatacaacagccaagtcgagtagttgtgtcagataccatacagcctggaaatactatctcatcctcgataaagtaactttgccccaacctctgctctaggggcaggatgggcaagtgtcccaatggcaatatcaccaatagggccagaagtgacaagcacagagcagacgttcgcagggctgtggagcggggagggagaagccttcatatctttgaaggaaaccaggaaaacttcatggaccaaggcttcaaagtgggcctcaaaagatgggtaaaatttctgcagataattgtttagagattgggtttcaggaagagaatatggcaaggacacgtggtcactgtataagggaggcaatctaagatgtgtcctagaaactggagaatgggctacaaagaaagcagcactaaggaacaatgctgcagagggaaactgttgcagaatattgagggtgtcagtgagtttgtatgtaactgcaagcagagagtcactggaggttgggtagtaacaaaataggaggtggctcagacatttccacatgcaaatagattcagtagttcctttttagttcaaatgaaccttctattgcccttattagtgattctataaagtaaaatctacacagtgcagagggtggccttagaggctaacgagcctggtttcctgcctcagctgccctcactgagtgtaggggtgctttctttaatctctggaaacctccactgtctcatctgtaaaatggagataatactaacaccttgatgtgatgtcatgaagagaaattaagagaggcagtgtaagtaaagtccccacatagagcctgggacatacaagccacttcataagtgtcaattcttattgaacctttttattaagaaactaacaatattctatcattctggacctacaaaagggcaatttcatgtggctcaacttaaggtttaggggaagcagtgagagaaatgacaacttgatgcttgtccattgtgacatgacagacctcttgacaagctaagactcccattgtgatgagcctctcacacctggccattccaatggaacagacagggtaaggaccaatctggactgtgttatcttttccaggtgcaagtatgtgctatgggtaagtgccagtttggagaactcccttagccacaggaaatgaaaattcatgtgattgtttgaaggattcagcttctctttgctgctaatccttgggttttgtgcacctagaatgtggtctcctgcaggccctgaaagccttgaattcctggcatctttgctgtgaaggtctccctggctgctgctggaggaaggggctggaaggagtgagtgtgtgcacaggttcagagttcagtcttcagacaaaaggagtgagataaattgaagacaagctgccgatggtagtgcatggaactgctcaatgaccagcttccttagcgaaaacattagcaacacattcaggcaaagggatgcgagaagttaagtactttgcagaaatatttgacaggccctgcaaacactgagcaagaaaccataggttctccccaattgcagggatgcaagtaacgtgaacactttcctttcggtcatcttccttggtggtcaggcatcatctggatcactttcatctggcatcgggttataactacctgaccctctcagactggggtgaatgtatcatctttccaaggtgtttgccgttcccaacaaagagaggaagccagttcgctattggcctgttagctttacaaacggatggtagagcttatgcttaccaaggaagagtgaaaggggattatcgaccacttgttgacagggaaaatagtttaatcaaactgtaactcagctactcatggccactgagaaatctgagaaagcctctgtcataataacacacataataatcctagtattagaaagccctgcgctctggctaagactctactatacttttcagtaacttatttccccagaatctccatagggatgcaattccttcacccctgctttaagttacttctctctcctcgcctcagtgatgtcatc

SEQ ID NO: 1314 - DNA, 6000 bp, Homo sapiens
tttaaaaaaaatattttggcaattaaaaaaatgtacactcatagatttaagggggaccagagcagatttcttactaatacatatttaatatactgtacagtggtgaagtctgggctttagtgtatctatcacctgaatagtgaacatggtacccaataggtaatttttcaatccttatccccctcctactctcccacctttcaaagtctccaatgcctattattccaccctgtatgtccatctgtaccactgtttagctcccagttataagtaaaaacatgcagcatttgactttctgagtcatttcacttagataatggcctcaagtttcatccattttgctgcaaaagacgacttaactcttatggctgagtagtattccatggtatacatataccacattttctttttttctccctctctttttgagacagggtttcactctgctgcccaggctggagtgcagtggcatgatcatagctcactgaagcctcaaattcctaggttcaagcgatcctcctacctcagcgttctgagtagctaggactacagggtgccccaccatgcccagctaattttttaaaatttgtttttagcagacggctcttactcttttgtacagactggtcttgaactcctgggctcaagcaatcttcctgcctcagcctccttaagtgtcagaattacaagctgtaattacaagcccggccataccacattttctttatccaaacctctgctgatggacatttggatgatcaattgctaattattcaccagattctgaccttgtaatcagatttgtatagattgtatgaaatcatactttttattttctctgtcatcttacaggggtccaaaaggtatacttcgggaggagtagatgatagaggaaaaattatataacatataacttgaaatgagcttaaaggagaatataataaaataattaaatgctagagtgaaagggatacttttaccattatcataaatattccaaaggtccaccttttgttttaatacatgaggttgttttacttgctatgagcattagctgtcttcttcacctcaattttcagtagttaagtgctcctcaaatttaaatcaacctatttattcaccggatggcattttgtgcattctttccaatgagggttgctggaaaattcagtctttttgtatattacacgtactttctcaattttaaaacataatttgccttgcctgttaagagtgttttctgttgccattgttgtcattgaataattagccccagacagactatggcaatataaagcacagaggttttggaattaaaattctcataataataattataatgcatggcttcctgcagtttgtttcaagagatttcactagaagcttgttccattaagagtgcacataatgttactctttaccctttgtctatgccatttcttttgagagttgaagtagttgaggatctactatgtggtctccaactgtcttatctggtttgggtaatttcatcatatttgaggaccaaaaagttgaatagcaataaaaacagactctacttgggaggctgaggcaggaggattgtttgagcctggaagtcaaggctgccatgagccatgatcttaccgtgagccatggccgtaagccatggccgtgagccacgatctactgagcctaggctgagtagtcaagtcaaaacttgagacttttgacttgccaagacaatggtttgtgtgactgtgtaaatgacacagcatctcttaaggtcacttacctgatttctaaaatgaaaacttcagactaaatgatctttttcatcttgcagacaccttattctaagaatctacctggtcctccaaatgcagaaactctttagatctgaaattgcctcacggacaatgctgcaaacatacctagggccttggacccacatctcataggttcccagctctcccattaatgatgtagcttggtagtttggtccataattgaagacctttctcctacatcacatagagagtaacatattaagaatggctggtttgagagtgcttttggcattgttgtcacacccacactccccaccatcctgaacttttcattaggttaccgaaaagataaaccataggaataacgcaaggcaagcgtggcttgtgggattgcccttacttcccctgaagaggctgaaattggagaatttgttttcagtagggaatttggttaaaccagaaggaggtctgtctaaaaattcttgttggtttttaatgtaagccaaataatacattcaatcctcagctgcttaagttatgggggtcaaagttaacataaatagttttctacaatccatcaactccagtctttatcagtctttaaaaccagtgtttactgaatgtccattgcatagacctattttcactgataatttaattccataaccacttcatgaagaagtaggtaagtactacaagttattcacatttatagatggagaatctggggcacaaagacagtcatgtaggaaaattcctttcgtatttttctctctcttttttttttttttgatatggagtctcattctatcatctaggctggagtgcaatggtgcgatcacggctcactgcaacctcagcctcccaggttcaagtgattctcctccctcagcctcctgagtagctgggattataggtgcccaccacaacgcctggcaaatttttttgtatttttagttgagacgaggtttcaccatgttggccagcctggtctcgaactcctgacctaaggtgatctgcccacctcagcctccccaagtgttgggattacaggcttgagccaccatgcctagtcagaaaattcctgtacataatatagatatggaattcaaatccaagactgtcacattgaagagtctagaacctcagcttttaggcactgaactacattgcttccttaaaaaataaccatatatgtgtagtcaaggggattgcataaaaacccatcttcctgtgcatgaacctcactaaggtacttcctggccaaactgtgaaactgcatcatatgcttttatttcagaaaaagagactaaatatttgttcttgttacagtaggttatgtgtcagggttaaaagcagaaaaaaaagtcacatagatgagtgtgaatatgacacgtaagttcgttctatgaaatggccttttccattttttaaaaaaatattcaaacactaacgtgatgcagtttgtaattctcctttatgcttgttcagggtttctaatattagttctctattattattttttgagacagggcatcactctgttgcctaggctggaggacagtggtaagatcatggctcacggcagccttgacttccaggctcaagcaatcctcctgcctcagcctcccgagtagagtctatttttattgctattcaactttttggtcctcaaatatgatgaaattacccaaaccagataagacagttggagaccacatagtagatcctcaactacttcaactctcaaaagaaatggcaaagacaaagggtaaagagtaacattatgtgcactcttaatggaacaagcttctagtgaaatttcttgaaacaaacttcaggaagccatgcattataatcattattattagaattttaatattttgtctgctaatgaaaacttatagcccatgattcatataactgtgcttcaggaagtaaaggctttttctgaaaaatgcacacgctagcttccttttctcagtttacctttctactttagagcagaggtgttgcaaggattagaaccaagggtgatccagaagaagaaactgcagaactatgggcattgcaaggaaaatagggttgtgctcaatttttagttttgtattaagctccgggaggacattccttagaagtcctccataattacgttggctattctttccgctctctctatctttgttttgttactgagctggcactccttggttgtgtcaattcttgattctttacccacgagagtggaaagaagtcttgatctaacggagtagccatcaaaagaaagagcagtcagtttcctattcccgcaccctccccccagctgtcttcttgcttgaggaagtacttactgtaaagcattccaattttcctaagcagatcttttcccctcacaatcctttttcctcttttttaattccagtaagttttttggctctttcattggtcatatatgactgccatccgaatccaaccctcctgaattctgtccctgtccattctaaatccgtattctgcacaaataagatatattaggtctcaatactggtctggaagttagagtcacgcctatttcattctgcctccatcaagaagcgcccgtaggaaaaaataacaacaaaaacaaaaacaaaaacaaaaaaacccagaagctggccttcctcagcgccagccccaggactggtttcccagcaataggcgcaaggtacagcccttgccggaaactcccagtcttactcaggggggaaaaatggggttttccggagacctgttcccctagggtttaaaagcgcgtcccgtgggagcttcgctttcacttctctagggagttctgagctgcaagagcccagctactcgccgaacccgggccgcctgcgtgagtaacttggggcggccaggagcacgggaagggcgccagacagagagcctttggctgcttctgagaccggctgtgggctgccaccgctgagcggcgcggaggctgcagcgttccctctcaggacagaaagcaggcgttggggactgttactcgcagcctgccaggggcagcagccgccccaggttcaagtggctatgtgccaggatactcaggcgcggctgttggctgcccatgggagagccagtgctctccgcaggtccaaagtgcaaggccgggctattcccggacttgcctaggagcaggggcccccagcgcgtctgggattgccccggcgcgtcgggcgcgcgaacttgtgcgcaagggagaagagcgcttaccatggaacatggtctgcgggaggcgggcgtagtcatgatgaccgcaactggagcaggagcaagctctcaccgcccatagtcactcccaggaccctggtcttccgcggagttgccgagtctgtgttgggcagggtgatctctgcagctggttcctcttacccacgccgcgactgcagtttcatccatcccaaggggggcggcacacactacggcgtggctctgcgctttgccttttccataacttccgtaggatccgccagcagtgtactttcagtttctactttgcgcttggtctgcaggttcaatctttgggatcatcagcatggaatcttcattatcccctctctcctgggcacctgcttcccgcgcacctggatgaggaccagaggaattcgcgaatttccgaatcaccgcaggaaaaaccagctggcctgaatcaaagcaattctgggtaaaagacttcccagatgatctctcaacgccttggcaacgcttggcgactgggagctagaaccatgagttgttaatgtgtgcacggaagccacaagtgtgcaggacgcaagctgggttattggaagcggacgacaccaaggaggcgttgccgcggatgtggtggacgatgccaagtcgtcttttaaaaaaggaagtgaagaatgattaagagggtcacgccctctaccactccaacctctctaatcagtctctttctgctccgtctgctgtacatgcacctgctcaggtgagacctcaaggaaaaataatcctgtgggtccacctaatctggtaagtgttgtatttggaaaatcaaaccccaaattaaacgcaggacgtggaaactgacgataatatttaactatgacttccacgtgcacatttatctgaattggctaataaatcaaactattcgtcttgaatgcatgccactgaaatgttaactttttcctgggcttgaattatgtagcttatttgctacatt

SEQ ID NO: 1315 - DNA, 6000 bp, Homo sapiens
ccttccagtgggacaagatgtggagatggaagacagtgatgatgatcctgaccccgtgtaggcctaagctaatatgtgtgtttgtgtcttagtttctaacaaaaaagtttaaaaagtaagaaaaaagcatatagaataaggatataaagaaagaaaatattttcaacagctgtacaatgtgtttgtgttttaagctaaatgttatgacaagagtcaaaaagttggaaaaaaataaaagtttataaagtaaaaatagttagagtaagcaaaggttaatttatcatttctcggaatatattgttaaatgatgcaagactgtatataaaagaaagccctgattgccaacaatgcaacattagcatataaagggattggataatgcaaatctatgtaaaagctacagcggccctctctgaaaggcgatttgggaaatattagacttctttcttagacaagccaatactcaatccagaattagatgagtgccgatgggaacatttcagtaaggaacataaatttagaccccagatagagagtggattctgattgtttagaattatagaattttgggactgaaattaaagaggagggagaaatggagagaaaataagaaaagaaatcaacagagtatcttgggtttcttggttccatgctttccccgttctgcagaacctaattttatccattaatatataaatatgctcaagtgtttctaataattgaaaataaaaacttccatgcctttcaaatcattaccctatcccttttattattaccaaacattttgtaaaagttatattctcttactttatttctttcttctctcaacccctgcaagctagtatattatttgcatctacactgctcttctcaaactgttgccatgaggatcatggacaatctctgctctgccaaatttaatagacacacttttcagtctctatcttattcaacctctttgtgacatttggaaatactggctacttactctatcttgaaattctattttccgttgccttctgagacactgacttctgactttcccactttgctgcctactatgtattcgtctgttttgttgatgggcacccctttctccagctactttttagggttgctcatgcctcaagattcctgctagcattagttctctcttctgtcttctaacatgcaggttgagtaattgcattcatttccatggctctggccatcactgatatgctaacatacccatctccagcaaagttctgacagtctgacatggctattttgattcagccttcaaaataaacccttcttcattttctcacttgtaatgctcaaaactgacagtctcgtcctattcctgggcttcatccacggaatcaagtaagttttattgttgaactctagtaagtctgccagaaacaaatagttcacatgtttaacagttgacagttttagaaaacaatagaatttccaatttattttatgaaactagcataactggacaaaactagcccagtatcagttgaatataaaattaaaaataaacataacccaattatgactataactgtaaaattctaggttaaatattaccaatttgaacgttgcattatgttaaatttatggtttatttaggaattcagcaaaaaaaccatgaccatgtaaatagacgctcattagtcatttggtaaaatttaaattttatcaaattacaggtcatcctctcatagctgcttgtttattggacagataaattaacctttattgatcctcatttaactatgaaaatgggcctatactactttaaacttctgattcaaataatatatcatgtttctcttttaatgatatttttcatctttgaaattagatatttaacatctgtttttcccaccaaactgaaatcacctcaaagacatacactgctatccacaatgtgtaacttaacatgtgtgagtgtgcatgaccattatagaattttgaaacccagtgcaaaatgaaaataagagtccctttatctaaaaatgaggaatttcaatacagtgacagcagagcatcaaatgaagtacaaggccctgtgccaattacacagatcatatatccataatgttggctgtgtggcgctgtgtgtgtgttttaaatatgttgaatgttattactggaaagttaaataaaaagaacttcatactacccatagatagaatgatagatagaattcatatcacagactacaaaaagtagtcatattaagttgggtaaaaatagttcagatattaatcaaaaaatattttctggtttacaataattgactattctgactgaagactgtagaacattaaaagatattggttaatgttcaataattttctctttaaattgacatcatataattttatttgaacttcttctaatacattatattgatcattctgagaatgttgtcttctcttttaaaatttatttaccataattcataaaatgtatttactattttctcccttaaaggcttttctgtccagttcattgagtctatgagcaaacataatagtaaccattccatttctttaatcataaaacattagcattttaaaaatttataaacattttattcttgtccatctatcttataaaaaataatattcagtttatcaaaatatcaaaagctaatttaagacttcattttggatttttttctaaatggtattaattatctcacagacagaaaaaaaaaatcattacttgatgttgttagaatgtgcccatttcatataaccctaacaattcccaaagctttatgaatattctcttcagaaagattctttatagttgggggcagaatccagtgtaacatttacattgcctttcctgcagctctgaataacttcctttcatgcttcccaaaagttcagatatgtacaacccttattctacctggatttatggtgattgtgataaaaggaagacggatttccttttgtgcaaagtattgatggatgctcttttactttgttcctggaaagttaaaaaaagaaaaaggtgcaggctatgaacagttacatacttcaatgctgctgtcagggatttaaaataaataaataaataaataaataaataaataaataaataaatccccaacctaggcgtgtttcattatagaaatcatttttaaaactcactccagtgtcatgtctgtcctcctccccacctcccactctaggttccagtcaaatggaaatatgtggcttttctcactccattctgtctctcttttccatttgcttacccccttcgcttcctctttcattctatttccttctgctttcatgaactttctctttcacacatattcactgatgcattcccactcacctgttctctcttactctgtcaccccccagtacttactgaatgccagccatgggctaaagaccatagtaagtggacgctgggcaggaagagaaaggccattgtggctggaggatagtgatgtggtaccacgaaacgtcagagagggcagtggggcccagatcaccagggcactgagggcctggtacccagtgggaagtgaccagaaggtggggcacaaaatagaatcagatatcctgctgctctgagaagaatgaaggggttgtgggcaaaagtgaaagctggaagatcccttagacagtctctatagtcaccttagggttaattttggaggtggggcagacaggacttgtctatggatttgatgtgggaaatgagaccaaaaaaggaatcagagacccaagtttcaggcttgagcaactctgttctccctagttcattgccatccttttttttcctttctccttccctcctcttccttgttcacgctatagcagaatgtgacatactccttaccagccccaagttcattcctcttcaagtgtcagtttagaagtcacagactccaggaaactttcctgaagtccccacactggggcaaagccacacacgtactgtcatctccctcccggcatcagtgtgcacattattactttattcacaggagttccaagcaggagtttctacagcccaaatgcagcaagtctgtgtctaagctcagttagctaagtgaaatttggaaagttacttaaggaagtctcagtccccacatctgtaaagtgcagataagaaaatggtctacctcacacaaagttttgcatgagatgatatacataaaatgcttagcacaaaactggcagagagcaaatgctagataaatgatagtcgttattattatcgctgttgttactggtttacattatccaccttcatctaagcagggtttctgcagaatagcagaaaccaaactaatgtagcaaataagctacataattcaagcccaggaaaaagttaacatttcagtggcatgcattcaagacgaatagtttgatttattagccaattcagataaatgtgcacgtggaagtcatagttaaatattatcgtcagtttccacgtcctgcgtttaatttggggtttgattttccaaatacaacacttaccagattaggtggacccacaggattatttttccttgaggtctcacctgagcaggtgcatgtacagcagacggagcagaaagagactgattagagaggttggagtggtagagggcgtgaccctcttaatcattcttcacttccttttttaaaagacgacttggcatcgtccaccacatccgcggcaacgcctccttggtgtcgtccgcttccaataacccagcttgcgtcctgcacacttgtggcttccgtgcacacattaacaactcatggttctagctcccagtcgccaagcgttgccaaggcgttgagagatcatctgggaagtcttttacccagaattgctttgattcaggccagctggtttttcctgcggtgattcggaaattcgcgaattcctctggtcctcatccaggtgcgcgggaagcaggtgcccaggagagaggggataatgaagattccatgctgatgatcccaaagattgaacctgcagaccaagcgcaaagtagaaactgaaagtacactgctggcggatcctacggaagttatggaaaaggcaaagcgcagagccacgccgtagtgtgtgccgccccccttgggatggatgaaactgcagtcgcggcgtgggtaagaggaaccagctgcagagatcaccctgcccaacacagactcggcaactccgcggaagaccagggtcctgggagtgactatgggcggtgagagcttgctcctgctccagttgcggtcatcatgactacgcccgcctcccgcagaccatgttccatggtaagcgctcttctcccttgcgcacaagttcgcgcgcccgacgcgccggggcaatcccagacgcgctgggggcccctgctcctaggcaagtccgggaatagcccggccttgcactttggacctgcggagagcactggctctcccatgggcagccaacagccgcgcctgagtatcctggcacatagccacttgaacctggggcggctgctgcccctggcaggctgcgagtaacagtccccaacgcctgctttctgtcctgagagggaacgctgcagcctccgcgccgctcagcggtggcagcccacagccggtctcagaagcagccaaaggctctctgtctggcgcccttcccgtgctcctggccgccccaagttactcacgcaggcggcccgggttcggcgagtagctgggctcttgcagctcagaactccctagagaagtgaaagcgaagctcccacgggacgcgcttttaaaccctaggggaacaggtctccggaaaaccccatttttcccccctgagtaagactgggagtttccggcaagggctgtaccttgcgcctattgctgggaaaccagtcctggggctggcgctgaggaaggccagcttctgggtttttttgtttttgtttttgtttttgttgttattttttcctacgggcgcttcttgatggaggcagaatgaaataggcgtgactctaac

SEQ ID NO: 1316 - DNA, 6000 bp, Homo sapiens
gtctgtttagagaccaaactaacttctataagccattgacaggtaaaagtgctaaacacaggtttattattattgtacttatcccaggaatgggaaagaacatagtattaaatttataaagtctatctatgttagaacaattggtgcttgaactaattacatgattaagtttacattgtattcaaatgagcatgttttattagaatattatattaaattttatggttgcataccatataaacattttccaaatatcctgaatattaaaacctttaaatgttatagattcaatagctgcataaaagtcagtaatatttataaattatataccagaactcaggaaaagatcactgagaacaggtaaatgctcaataatattaatagactgctggggtaactggctcccaggttcatttgtttattcatatgtaaaacaaatatatatttaactatttttttttctatttttctttgtcaccctggctagagtgcagtggtgtgatcacagctcactatagcctcaaactcctggattcaagccatcctcccaccttagcctccccagcagccagctagctccacaggcatgcaaccgtgcctattttttttttgtagagacaaggtctcactatgttattcagggtggcctcaaactcctgggctcaattgtatcagacgtccaataggtaggtatcaaatgatttcaaggaaattaaagggaaggctaaagttgggaaattgtgaattgtttaatgcactccttttatgtaatataaaaggagtgaaggtgaataagacaggttagggacatatctcagtcttaaagcctggttagggtggtgaaacttcacttagcagtcactaagtgattgacggtttgtttgctttttttaacatacagaatacacactggaaacttttttttttttttaacagaccagatcttgctatgtcgcccagactggccctccctactctgcctcttgagtagctgggactacaggggtgtgccaatgtacctggtgtgactgaaagtttttgagttggggaatgacagtagaatacaattttaagatgatcaatttggcaacaagatgtaggattagtagaaagtggtagagtttgaaagtcaggtgttaggagattttaataccagttaatacatgaacctaaaactacaaaggtagcagtggaaatggaaagaaaaacactaagtgaatagaatgcccgcgttgtagtgactgactgtagggggttaaaaaaaaaatgaaaaggaattggagatgtcattatttttttaccctgagtgactggatgttggctgcagcaatgacagaaatagaaatgtttccaggagaagcctattaggtaagtaatgatgataagttagttcttacacctcccaagctctgaatgaatggctgttgaaatatgaatagcaacagacattctagaccagactaagaggactacttttaaaaacaaacaaaaaaacaaagcaaaagaatcttcgtcatttattttttgaataggtcatatatttatatgtcttaaaattcaagagtaacaagaaggcataaagtgaaaagcttctctcattctctgtccttcaatcacttaatactccaactgctaggaaaccagtatcagtttgtgagacccattttaattaaatgtttattccctagatggaaatagttccatatctgccccaagagatttaggccaacaatagaggatgaccctgaagattcctggatactaagaacaatagagagtgcatgctgcagaagtctcagtgacacttcacacactctttcctcctcccattaagaggcattcttctttccactgtgaccctattacatgtcagtcactttatatgcactagcatcttaagatcaccctctaaacatagtttcattagctccactttataaatgagggcactaaggctcagaaaaattaatacttttctaatggtcacactaataagtggcagggttggcgtcagatttgaattgcaatcatgggacattaaagcctgcattctttctaccctattgcttgatcaaagaatatagtaggaaagttcttgaaggtagatttttggcaagattgagtgagtgggaaattttttttaaagccaaaagattttaaaaattgatttttacattttgaaaataaaggtgtaaagtacagcttccatagtcacatcaccaaaattaactcaaaaatttaatcagaaaagttatgtcatctacagggtatttgaacaaccaattggactcattactcataaggggtgggaagattgttggggaaggtccactcatcggatagaagtcaggttatggagactgattcaccagtcattaaaataagagcatgtaacattgcataaacttatttttctttcaggtcatcccaaagaacaatgcaaacattgttctccatagtccgagaaacacatgtatttattattcgtattttataagtgaggaaagagacaccagtgagtcaactgcatagcctcatctaatgctcagactacataaatactgcaatgataagatcttaagtaacaaattggagaaaagaatgtgatgcagtaaatgccagagtgtttcgctggtcttatggcttcctcgaagacagaattaatttcctacccaattcagtgaagaattttagactatgaaaattgttcatgagtatgggaaggaaactccctcttcacttcttggtccccaaactgcacaaagcttagataaatcaaaatcctgagaagcagcacccaaagtgggaggatcaattggcttttcaatacctaatgggtccatcagtgctacatttccatatagtgtttgcataactggttctaacatatatccaccctctctaaccaaccaccacccttaaaagttgactacagacacatatacacacttgtccagcacttgctccacagaatataaggcctggagtaaacagacaccacaccttgtatatcactgaatctggattatgatagacaagaagtggaaacaagctctagaagtgtcccaaatctcctgtgccatttaggccatcgaagcctgacagtgagagacaatgaagaaaagccacaggcaggtgaaaatccagtaactttggcagggcggaagctgaggaatttatctgatgctggatactcacagcttctggccaatcaggcatcggggatgacgtattttcacattagatataggaggaggagaagagaatgttgtaatcatggatgttaactcactaagaactgaatgctgggcctagttaaatccctgtaggaagtaaaatacacaagactagtgacccattgactaatacacagtcacaggtctatggcacgcggttgtaatgttcttctgaaaacagaaactaatgctaaccttcccttaaaacctgtacaaaccaataagtgaaagccatttacaatttctggccatttaacagtcttttggttcaatttattgtggcaaaaatagcacacatttcctctacttaatcttccctgtgagagaaactgagactgggagaaactgaactgctagtattgagtttgatataaaacgttcctgacaacacataataaaccaaaaccaaaataaaaacaataagaagcaaaacatccttgattctaaagcagtgcggtccaataaacatataatgtgaacaccaccacatacaatttaaaattttctcgtggccacataaagtaaaaagaaacacataaaatgaattttaatcttatatttaacccaagatatcaaaaatgttatttcagcatataatcaataaacaaataataaaatattataagttctttttttaataaatactaagcattcgaactctggtattttacacttaggtcacacttcaattcggacgggcacatttcaagtgctcaatagccacctgtggctaagagctacctactggacagtgcagccctacagcccaatttcaaaaataaggaaaaaacaaagcaaacaaaacccacacccactatatataaacacacatcaatttcagtaaacccagcgtttagagttaggcagtgattgctgatttttggagtacggagccagaacgcctaggagtaagagggaaggagagaaagggtaatggagagatgtgtggaggaatgcaactgctgcatctccagagaagcctgtgctccctacggtgccagagcttgaagggtgggtgctccctatctcccaagcttgaagggctccctagaggtgacgaggtgaggccggccccaagcggtcactgccatttgggctctagagcccgcttgtcagggggcttgaggggatgcaggagttgagggctcttccagggaaccccagtgactgcctacctgtcgagcagcggagtgtggatgtgcaggtgcttcacggccacctggacgcgccagtctgcgtggcgggcggacgacacagtgccagaggcgccgcggctcaggtagcgcaggtcggcgagtttgtggtagggaatggtgggcagggcgctgcagatggcctccccgttcatggtcccgggcgctcaggccggttccgggtgtgccccctgctgcggcggctcccaaggctcccacgccgcgctcaggcgcccagatacgcccctgcacgagcgaggccggcaagaccctttttgccccgcaacactaggtcacgagggcgcccattccccggatggcccacgccagccgctgcttctccgaaccagagctgacttcttttctagagactggtgccaacgcggtagcgccgcgaaagagcttcctctctcgcagccccggccctccccccggcgcgcgcagcgaccagctccggccgcccgagctcctccctccccaaacttcgcaggttacgtcagcggcggacggcaaggcggggagaggggcagcccgctcgcggccctcccgcctggctctcgcctcggcctgcggccgggatcctccgcccgggtcgcgcagcggaggccgagggctgggacgggcggctgggaagtgggaaagggagccagaggcgctccttttgtcttctcttcccatcccccaggtttgggaaagttttccttttgggaaagcccctctcttcagcctgctggcgggtgtcggattggttagcgaccaccggcccccgcctcccccaacaggattctcctttgggccacaggtcttccggaagttgccaaaccccggtagcggcagcgtccggctgggggctttattagggggcaccggggtctgctttccgactcccttccgactccgcgcctgcgcaggaagcgatttggggagtgttgtgaattccgagggctccacacttaagaggttgtacactcacctgtctacctggactccaatttccatatttccagccacttgaggactgagaggtggatgataaaccctgtcatagtggagcaagttcaggtgtttaaccgctgttatgggggatctgccttttctccctcttctttcttacttccataagtatgtatgtgcagagattgaaaaataaccttgagagagtccatccatctaactccaggtaagactgcaaatatttctttcttataaatctgggaggaatgcagtcagtgtttcatgccaaccaaaaaagactgcaaacgtttttccatccttctgccttgaatacctttctacttagatgactattttgtaagacgtgagtgcaaatgttatatacaataccaactccatactagatgtttaattaattctagggattcagtaataaggaatgactcgaacagatttctgcctacagacagctaatgcttcttgtatttttgcattacctgaaatgaaagtagcaatgttagattttacagtagtgggaggttgtaaacaatagtatgttaaacatttttgatcatttataataaaatgttcagcactaaacatatggtctgatactc

SEQ ID NO: 1317 - DNA, 6000 bp, Homo sapiens
ttgtttagttgatgtatttcagcatcgatatcccttaaactttctatctttagccaattaattgtgggaattgaactatatgtatatgaagaaatatataatttaattaattcccatatatgactaataatatatgtttttaaaactgtatactggtaaaacctatcatgaaagctaaaggtttaaggtggtgattaaaaaatatttagaaggcttgtgataaaaagaatcttagcatttacatgaatttagaagcaccgaacacttcaggaatcagcagaccaacaacgtactatccatctttaaaaggaaggaaagtaagtgtgtggagaaatagctattttcatcatctacaggaaaagaaaattagtataacttcaatgaagaacaattcaatgacatcaaccaaagttacaaaccaacatactctgatcctgcaatttggcttctggaatacgtagatatatatgtatgaaataacataagcaaaaattaactattgcagcattatctgtaatagcatatgtgtgaaaacaaagtaaatgcctatcaatgggggataaattatggtatatccatcagcgtctagaaaataaaaaagataagagagctttttatgcattcatatggaaagatatccaagatacattaagtgaaaagtaagcaaagtagacgagtatatagtgttataataattacataaaagggacagatattttatatatatattttatatataatttatatataattaaatgtaaacatgcacacatagtatatatatatattaatatataaatatatatttatatatacatatttatatatatttaaaatatatatttatatatttaaaatatatatatttatatatttaaaatatatatttaaaataaatatatatatttaaaatatatatttaaaataaatatatatattttaaatatatttatatattttaaatatataaatataaacagaagtaatataatatataaatctatatttatatatgcatatacaatatatgcctatatatatgtgcatgtttattttatatttaaaccaattaactttttattgaagtactatattcagaaaagtgaatgtgagtgtaatctccaagaattttcataaactgaacacacccatgcaactggcacctacagcctaggtcctgaatcaaaaaatagaacattaccatcatcctaaatacctcatgattcccttctaatcaatgcctctcccctactagagagaagatttctataagcataagttagttttatttatttttgtactttatacaaatggactcatgcaatatgtactcttctgtatctggcttttttcatccaacattatatttgtacactgtttaatttcattcccatttagtattatattgcataaatgtgccaaaatgtatttatctattctactatttatggatatctgggtaatttccagtttgaggctattataaacaccactgctatgaacattctagtagatgcatacacatgtccacataccgaagcaaggaattactgggtcataggatctgcatatctacaattttaatagatactgacatacaatttacaaaattgattgaaccaatcaacactcccatgagcagtgtacaagagctcctgttgctccaaatcctcactcacacttggtatattctgtctttttaattttattcattctactgtttggatagtagtgttgcaatgtgaataaaatttgtgattccctgataattaatgatgttgagaaccttttcacctctttttcaaggtatctaagtcctcttctcaatttttctattgcattatgagtccttattgttttaaattttaaaccatgtgatatggttttaaaaagtaaatttaaaagtaatgtaattaacaatacaaataaattccatgaagttctatgcttcatgctctctccttcttagagatgcatattagcatttcaaaagttctgaaaagttctacatttttcaccaccacaaaacagtttagagaaatgttgtctcccttctgatgtaattttcatggaattaacaattgtctcctttttttacttgtatttttttttacaattcattctccaattttatcccatagttcattagatctatcaaacatctatcaatataatttctcaaatactcaaaattagataatctatcatttcaattactgtaactactgttttctcttgaagtctgccatctccctgttcagtgaaaatgggttgctctccaattctgccatatttctctcatcctggagtttcccttcttaatttcctggtccggttttctggatctcatgtctttctttttcttgggctactcccatgttttgctgaacacattctctaggagctttctttaaaaaaaaaaaatgacatggaaagaaagtatttcattcttgtatatgtgaaaatgtttttattctgcccttacatttgacggaaagtttgactatagaattctaagttggaagttactgtccttcagaatattggaaaaatttcacttcattatatttcaggataacaatgacttagtaacattgttaagaaattcaatgccattctaattcccatctctttaatttttgtttccgccctctgaaaacgtttagaatcttccctttagtgttagtgttctcacccttttaatgatgtatgtgccttaatgtaggtctttttacttggtgggccctttaaatatgaagactcctgccctagcaaaaatttttaaattattattttgatcatttcttccctgtttattttttgttctctttttctaggactcaggtttttaattaattgactggataaacatgtcaggcctctgagcccaagctaagccatcatataccctgtgacctgcacgtatacatccagatggcctgaagccactgaagaaccacaaaagtgaaaatagccagttcctaccttaactgatgacattccacgattgcgatttgttcctgcccttccctaactgatcaatggaccttgtgacactccttctcctggacaatgagtctcaggagctccccactgagcaccttgtgacccccacccctgcccgcaagagaaaaaccccctttaactgtaattttccactacctacccaaatcctataaagactgcctcacccctatctccctttgctgactcctttttcgaactaagtcggcctacacccacatgattaaaagctttattgctcacccaaagcctgtttggtggtctcttcacactgacgcgcgttaacagaatgaatggatagaaaagtcttctgagtactttttaagaaaaaagcttattggccgggcgcggtggctcacgcctgtaatcccagcactttgggaggacaaggtgggcggatcacgaggtcaggagttcgagaccagcttggccaacacggtgaaaccccgtctctactaaaaatacaaaaattagctgggtgtggtggcgggcgcctgtaatccaagctacttgggaggctgaggcagaagaattgcttgaaccagggaggcagaggttgcaatgagcagagcagagatcgcgccactacactccagcctgggtgacagagcacgactccctctcgaaaagaaaaaaaaaagcttattaagcaataaagcacagagtatcagaccatatgtttagtgctgaacattttattataaatgatcaaaaatgtttaacatactattgtttacaacctcccactactgtaaaatctaacattgctactttcatttcaggtaatgcaaaaatacaagaagcattagctgtctgtaggcagaaatctgttcgagtcattccttattactgaatccctagaattaattaaacatctagtatggagttggtattgtatataacatttgcactcacgtcttacaaaatagtcatctaagtagaaaggtattcaaggcagaaggatggaaaaacgtttgcagtcttttttggttggcatgaaacactgactgcattcctcccagatttataagaaagaaatatttgcagtcttacctggagttagatggatggactctctcaaggttatttttcaatctctgcacatacatacttatggaagtaagaaagaagagggagaaaaggcagatcccccataacagcggttaaacacctgaacttgctccactatgacagggtttatcatccacctctcagtcctcaagtggctggaaatatggaaattggagtccaggtagacaggtgagtgtacaacctcttaagtgtggagccctcggaattcacaacactccccaaatcgcttcctgcgcaggcgcggagtcggaagggagtcggaaagcagaccccggtgccccctaataaagcccccagccggacgctgccgctaccggggtttggcaacttccggaagacctgtggcccaaaggagaatcctgttgggggaggcgggggccggtggtcgctaaccaatccgacacccgccagcaggctgaagagaggggctttcccaaaaggaaaactttcccaaacctgggggatgggaagagaagacaaaaggagcgcctctggctccctttcccacttcccagccgcccgtcccagccctcggcctccgctgcgcgacccgggcggaggatcccggccgcaggccgaggcgagagccaggcgggagggccgcgagcgggctgcccctctccccgccttgccgtccgccgctgacgtaacctgcgaagtttggggagggaggagctcgggcggccggagctggtcgctgcgcgcgccggggggagggccggggctgcgagagaggaagctctttcgcggcgctaccgcgttggcaccagtctctagaaaagaagtcagctctggttcggagaagcagcggctggcgtgggccatccggggaatgggcgccctcgtgacctagtgttgcggggcaaaaagggtcttgccggcctcgctcgtgcaggggcgtatctgggcgcctgagcgcggcgtgggagccttgggagccgccgcagcagggggcacacccggaaccggcctgagcgcccgggaccatgaacggggaggccatctgcagcgccctgcccaccattccctaccacaaactcgccgacctgcgctacctgagccgcggcgcctctggcactgtgtcgtccgcccgccacgcagactggcgcgtccaggtggccgtgaagcacctgcacatccacactccgctgctcgacaggtaggcagtcactggggttccctggaagagccctcaactcctgcatcccctcaagccccctgacaagcgggctctagagcccaaatggcagtgaccgcttggggccggcctcacctcgtcacctctagggagcccttcaagcttgggagatagggagcacccacccttcaagctctggcaccgtagggagcacaggcttctctggagatgcagcagttgcattcctccacacatctctccattaccctttctctccttccctcttactcctaggcgttctggctccgtactccaaaaatcagcaatcactgcctaactctaaacgctgggtttactgaaattgatgtgtgtttatatatagtgggtgtgggttttgtttgctttgttttttccttatttttgaaattgggctgtagggctgcactgtccagtaggtagctcttagccacaggtggctattgagcacttgaaatgtgcccgtccgaattgaagtgtgacctaagtgtaaaataccagagttcgaatgcttagtatttattaaaaaaagaacttataatattttattatttgtttattgattatatgctgaaataacatttttgatatcttgggttaaatataagattaaaattcattttatgtgtttctttttactttatgtggccacgagaaaattttaaattgtatgtggtggtgttcacattatatgtttattggaccgcact

SEQ ID NO: 1318 - DNA, 6000 bp, Homo sapiens
ccttacctgtatctcaaatgttcctgcagctttcctttgttcatgaatgctgctgcctcttatttgcagtttgaatggtgacttctatgctttcttcctggaatcttcaggttggttttcaacagacaaagtaaaacagaagcttgaagcatttttttttcttcttctaagtaattcaggagaaaaacaattcctttattgagtaacacacaacacaccaggcacagtcctgcctctgggccttagcacttattgttcccttggcctcacattctaacattcccttggcctcacattcatgctatctgcatggctctggcctccacttccttagtcactctctcgttgaggccttcctttgccatcctacctgaatttcatcccttcccctccactttatttttatttactttttatttttttgaggcagagttttgctctgttgtccaggctggggtgcagtggcgcaatcttggctcactgcaacctctgcctcccaggttcacgcattctcctgccttgacctcctgagtagctgggactacaggtgcccaccaccacacccagctaatttttgtatttttttagtagagacggggtttcaccatgttggccaagctggtctcaaactgctgacctcaagtgatccgcccaccttggcctcccaaagtgctgggattataggcatgagccaccacgtccggcctcttcccctccactttatattccctttttccatttcacttttcttccttaccagttttcaatctctaacatgacccattaggtacttttttatcttattatgtttccccaaccagaatgtaaatcccctgaaggcagggatttttgtctatttgtctcttttctttactgatgaatatccagcacctagaacagtgcctggcatacttaagtgctcaataaatatttgttgactgatctacagtggaataagttccagctttggagtcttaaaggcctggattagaacacagacattctgtttatcctagggtaactcctttcacacttttgaacctcagttttctcacctataaaatggaaataactacttcacaaggttgttttcagggtttaatgagaaaatggaggcctagtgtctgatcctattggagtcgtatgataattattagtcttctcccttttcaagttgaggaaagacctcagaaatttattttctgatagtattcctcctacttccacaattctttatgggtgtatcagtcaagatcataagccctttagaaggtgcaatcaaattagtgtcaattgaaaagagtttaatttacaaagcatcagttgaggattgaggttaggggaacataggacatagagaagaaacccagggaatagcagagcagccatgatactcaggcccaaagggtcaaggggaaggaggaataattaggtagagtagtttgccttgcaaagagccatgattctctggaacacagctagccctaggtcacctcacaggaagggaaccagggcatccaatagtctgacctcaccctcctttctccctcagatgatctcttgctgggtctatcatcagacccaaccataagccaaggggcttctgatgtcagccatacatattagctctcagagcagagagcagatggaaaaggatggagaatgaatctgcaggaccaaaaggatgctatccagcccagtgcccttacgatttatcaggcacttgctatgcaaggtatagagaataaagatatggctcaactttcaatcaactcatagttgggttgggatgacagcctaataaacagaacttcaatatagtgtgacaagtttcatacaaaagccaacacagggtactacggacatatatacaagacagtatctctatcacaacttaaatgtgacagatagtgggtgatgatgctggtggtttgactgggaaaggctccctggagattgctgttggtaaaacaattcagggatcatttattttctttctttctttctctctttccttccttcctccctccctccctctctctctctttctttctttcttttctttcttttgaaacagggtctcactctattgctcaggctggagtgcagtggcttgatcatggctcactgaagcctagtagttgggactacaggtgcatgccaccatgcccagctatttcttttgttttttttttttttttttttttttttttgtagagatgggtttcaccatgtttcccaggctggtctcgaactcatgggctcaagctatctgcctgccttggattcccaaagtgttggggttgaaggtgtgagccacctcgcccagccttcctcaagaggtttctctgatgaaacacaaaaagatgggagtgagcctggcatagtggctcatgcctgtaatcacagcactttgggtggctgaggtgggtggattgcccgaggtcacgagttcaagaccagcttggccaacatagtgaaaccctgtctctactaaaaacacgaaaaattagctgggcgtggtggcgggtgcctgtaatcccagctattagggaggctgaggcaggataatctcttgaaccagggaggcagaggttgcagtgacctgagatcacggcattgcactcaagcctgggcaacaagagtgaaagaaaaaaaaaaaaagctgggagtatggcatggaagtgaagatgagagttgggggggttagagtggagtaatttcaaagattcttctcagctttaacattttaaatatttaggttttaaaattgttgttgtcctgttatttctgaacagtcagactgtggatctttaataaatgcaaacaagtataaaattttgtagccgggcattgtagtcctagctacttgggaggcagaggtgggaagattgcttgagcccgggaggttgaggctgcagtgaggcatgatcacaccactgcactccagcctggggaacagtgagaacctgtctcaaaaaaacaaaacaaaaaaaaccctttttcttgttctcagaattagagtttcaaaaatgaatggtcttaaaataactaaatttaggaaagaatataatggtttgaaaatagtgtaagtttattacatagtgaaacttaaaataatgcaaaaagaggactaaactaaacttgtattagctgctaatagtcaagtttaatttgggcaaatattcacattattcaacattctcttcaaattggtttcctttatttaacattctcttcatatttattgttctaacctccaagaaaattctatgtaactctacatcttgacaatttctttctttctttttcttttttgagacaaggtctgctctgtcacccaggctggagtgcagtggcgcgatctcggatcactgcaacctctgcctcccgggttcaagtgattctcttgcctcagcctcccaagcagctgggagtacaggcgcatcaccaggcccggctaacttttgtatttttagtagagacgaggtttcaccatgttggccaggctggtcttgaactcctgagctcaagtgatccgcccgccttggcctcccaaagtattgggattacaggcgtgagccaccgcgcccggcccatcttgacaatttctgacaaaaacaagtaaactcatgtagcagctgtatattgttatgtgaaaggtatatatggaatttaaggttaaaagcaacctctgcctcccgggttcaagtgattctcttgcctcagcctcccaagcagctgggagtacaggcgcatcaccaggcccggctaacttttgtatttttagtagagacgaggtttcaccatgttggccaggctggtcttgaactcctgagctcaagtgatccgcccgccttggcctcccaaagtattgggattacaggcgtgagccaccgcgcccggcccatcttgacaatttctgacaaaaacaagtaaactcatgtagcagctgtatattgttatgtgaaaggtatatatggaatttaaggttaaaagtatacccacaatatggatgcatgcagtggtcagattacaatgggatgagggctgctggaatcaggttgggggagaggaccaaagaggggaggaaacaaacttttcttgagtattcttcctggcagcataatttgtgacaggcttgccaggttacccaatgggacagctgcaagggcccagtgcaactgaatttggtgtaccgagagatctcactgtacgaattattttctcggtaattagatgtaattattgtgaaatgtagcgaggagcttgtccacaataaaaatcaaacaagaatttccagaagtatccctagtactgtggcctacacatgtcaaatggctgggggaaaacataaccgataattataaacagaactagagagggaagcgtgggcagtgagaaagtaatacttcaaacggattcacacgatgttaggatgtgtcgttgggaaagccaaagaaatgagtcaaattggatcagggcaaaccgtagtgagggcaggctaggggcggagctctgggccagctcagagggacttgcccttccccagcctagagcggctccggcctcgccccctagctctagcggaaccttctccttttcccggtcacggggctctggggccagccaggccttcgtccccggccccgcccacccgccgcggcaccggccccgcccgccaacccaggccgcggcaggctccgccccccgccgcggtgcccggctccgtccaccttctctgggccgccgccgcaggctggcggccggcgcggccgggggcggggcggggcggccgggggcggggcggggcggccgggggcggggcggggcggccgggggcggggcggggcggccgggggcggggcggggcggccgggggcggggcggggcggccgggggcggggcggggcggccgggggcggggcggggcgggaggagccgcgctcctaagcgggagggagatccgccgcggagttacgggaaagttggtccgagttcccagagtttccctctgtggtgccctaggctcggccggccggtgccccggctcctttcctcctttcggccttcgccgtccaccaggtccctctctctgtccccggccgccatggagcagccgccggcgcctaagaggtaacgaatcggggagcgggaagaaggagggaagcggcgccggcggccgcggggcgggggtggctaggccaggccctgctgcgagcctctccccgcccgccgggccccgagccgggcgcgctgaggtcgggaggcgggtccgagtgtcccgccgcgtctgtccacgggcgaggggacctgaggggagcgggagccggagcctcccctgcggccggcaggcctggcgcgtggaaagtcgggtgggcagcgccgggctccctgcggcctgacctcccggggcgggaggaattaaatattaatagctacacagtctgtaaaacattgtggatgtgctgctctgacaggtgttcttcccccttccccctcaagttcaaaagtatttatggatgcaagacagtgggaagtttaaattagaaccccctcccccaatatagttttgcgtgtaaaaatagtgctgctttggtatggtatttactgttattaatagtttatatttaatctttgacacctgtgttggaaatgtatgcatacaagagtgggatgtgtttgagctaatatttgcaatgatcttaggaagccaaatctaggttgtccattgacagaagttcataatatgtattcctctctccccaagaatgaattaacgaattgtttgatgttgctaaaatatttaacctcagtctttcatttttaacttataaaataaggatagtaatctctcagatagtgctgttgtgaagattaaagagttcgtatgctttgacagctagagatctttagatgaaaggtgtgttcaagaacatgggataattgaaaagttaggaactttgggagctattgtgaattgtgtgactagacatgtga

SEQ ID NO: 1319 - DNA, 6000 bp, Homo sapiens
ttttagaaaggagttctgccagttcgggggaccagggccttccctctgagggcagacccccaggtgtaggagtcacgtttcccagtctgtgccaccaaccgccaagcctggcatttgaacccagcaggaaggcaggagagactccagccttcccttcccacccaaccccttcctgcgtctgacttgtcctctccagcgcgttatgaagtattgcctatggttccatctgtgagcagacttagggggctacgctaatgacagagcgctctggcaaggcaggatctggctgcctctgcggggcccacaccttcctctggaagggctcgggacagagatttattaacgaatcgcttctgcttggtggtatgcggtctgggagttcaggctaagagttaatgagaggtgggtaacagtcagagggtctcagtcagaccattcaaccgcaactgcaaacccccattagtaatcaactttcccaccacaaatcacgattcatttttgctcggtggcaagtctcttagggaggcaggggaaaaggattctactaacattcctggtaatctacctgattatttccctttcaattaaaaataataatttatacctttatttccttctctttgcgtaatgaggattttccagagattcaaaatattatttttcccttcgtgttgaaaagcaacctctttcccatagagaggaaaccgaaattattatttgggtgtattcccagactagatttcttagaaataaatacaggaggcaaagcacaactcccaccacagggtgtatgcgttggggaggggggagcgggcatgtgggggagtggtgttggctaaagtactgttgtgacctgtgatttctataccaaaggcacagcgaactctgccataaaggttacactgccacaaagttgagtgccatcttctttcccttttctctgaatggtttataatacagaaattaacgactaatataattcaggttcatgttagtaaaaaaaaaaagtgctatttcatagtacctgtttgttttaatttgtagggcagatagtttcttcatagaggaagagcaaaccattggtccttttgaaacccttttacaaacagaacaaccttaaatatccaccaatggctcttgccacaaataattaggaaggttaaatttccacactcccattgagttgctggaaatgtatgtcaaaagaagtattttaagtgaatgcagagatcctaaagtactttcgttttgtctagagctgagccttgtagttcccacactccctttcaggaaataacagcgatcatcatctgctgtcatttctccaccgtcccgtttcagaccactggttacttttaatcttgcaaggaaagaaacttaaaccaatgaaaagtcataaatatgttggtggagctgaggctacttttctttcatcagtcttcttcacaggaatttccaggcatgtggagaaattttgtaaaatttacttgactggctgtcaccaaggaagatgtgtacacacttatttcagttcagtgaagctttcaaaacattggagaaaaaaattaagaagtaacttgataaggagtttcgctctttggtaatggtaatattacactgaattatctaaaaataatatacagtcagggttcatctgctaaaacctgtgcactggtatatgagataaatgactgatggtcggataggtaggctcactgaatttcagcccaaaccacagcagaattttatataaattagagagctatagactaagtagatcaaagaagatcattaaaaagaaaaaaaattgttaaaggacagattgttagggccagactgtatcaggtgaatagagaaacggctgcgaagttcctgccccttcagagcgcctctgccttcccaaggagttaattaaattaagatgccttccgcataatctaggttctgtttctctgtgctccccttgctccccctgcgtgagtaattttcttgttctgcccaggactgcagtttgtttagcagagaaagtggctgtctgcgccctttcgcttcgggaaacgccagcccccttttgttctcggctaacaggtaggaagacagatccggggctccctccacaaacaccttttcctcgctccttcttcgtacaactgcaactcctttctcacttgccgtttctcaggaatccgagcgtttaagcccccggggagtttgcttttgggccccctcagtcaggactagaaggtgggaggagaattttaaagccagcacgaggttgacaaattaccgaggactgaactatttccctcttgaaatgtgccttcagcgtcgctggctgggcaggcaccgggtgtccgggcccgtccacgctgcgctgccgcggctgccccgggacaagtcgacccaggcttgctagggcaggagcagaaacaccatgggattgtggggtttgatctcagtgtacgtagaccagcttttataagaagtcttgctgaccgcttagattaaatatcccaaaacaaaattaagaaacagtatgtagaaatgtgtgtggttgggtgttagctgggagtcgcgtgccagggacccaaggaagtgagaaatacagtgccctgggattgcatccccatgatctattttcacatctgaatttggggcacaccagaccgagaatctgaacgcctcttacacccccaaacccttccttccaaagggcagctacagccccttcccagagcgaacactcacctcccgcagaaaggtcaacctgggcagccgcgctcagacccggtccaggcagcgaggcgcacagcttggaaaggtcattgagtccacgcctggcaaacttttttttccgcgcggagtcgcaggagtcgcggacatgatctggaggaccgcgagcagctaaagcgagagcagatccacgtcttcgtcagagtctgtggacgcggactgtgtaaagacccggggtgcttggggccggcgttcagcgctcgcccagaacctcgctcttcggcgaacctctcgctgtcgactcccggtgaggtcggagcccacagccttgcagggccatcaccctccagcagcaagcacgccgagctccgtccccgcccgcgtccctccccaggctgccccaggccgggagtcttgggctttagtagcggccccgcctccccttcgggcgggcgtcccgccgccgcgcggggccctcagcgccctggctccgcctccgcgcccggcgtctgctaatggtccactctgtttacttctgtttggatagcaactgagtcttaaaggcacaggtttgctcgaggtttccctgttatagagacgcagccgtaggtgactcagttcaaaactcacacacaaacacaatacccaccccctttcttctcgttgccacttttccttataccattagaaactcaacaactgcttctctgcctctcaaagactccacagagaatcccaaagggcatttagtatttttatttggttcgctcgccggcttaatttgcacatcttaacacattcaatacaactaccttcaccgtaaagtaaaataattcaggtctagactgcattctccagcataaatcactctttccccaattttaaacagttttgtacatacttttggtcaattatgactacatgtgtagtctgctttcgcctgctgttttctaaacgaagtttgtttacagaggtggcaattgactaatttagtaattattgcaaagacgcgtggaatgccccaggagaaatttcttccaatatttaagctttaatcggcaaatgttcatttcatacgcagtaaaccaacttggttaaaacagtgggcatctgcaacccattggcaaagaataaagaatccatctggaattggtgaagaacaatcatttttaaaatttaggaaaatgcgattctagtttttcaaaacatttacatcttcattcccagcaaaaattgagttcaatgttcagtctccaggaaagttaatagaattcaaagtgcagtgatacatttttcaggtccttctaaaggtttggtcttgtgtgagtgtaactgcaaaaagcacttcaacctctctggaataggggtgaccgagtgacaggaagggaatgatacacacccattttaagcagcttcttttcagatgtgatttgcgtgatcaacactaagcaaaaacgcccttcgtcccagacgagttgccagaggggatctgtgttactccacggcaagcccgcactttgaggacgtagatcttcaaccaagaggctgtacaattcaaaagtgttccgtcgaaagatggttttgaatgagacgccccaaaggacaattcaaaaaatctcaatcgtgcggggaagtagataaatacaagcagaggctaaaaactgtcaaaaggttaagcagtaattggggagtcaagcagaagctcccagatattattttattaagataaaattctttctattttatttatgccgaggtggagagaatttttcgttcctttggtaaaacataacaggggtcgcagattttttttctgtctttccaattttaagttcgcaaagattaaaaagtgagcttgaaacggagattcgagtgtttaatatcctgcagtacttaactgcttcaaagtagatttgacacacagaatggaagcagcagaatgcctaagcattcagattttttttttttttaacgttttgcctggtgggtcccataggggtgctttcattttagagctcagtcctgagcctcagctgcgggatgcctgcggtcctctctctccaactgcctcattcctcctgcagcttttctcagtttgggagatttggagggagctttctcttccttcagactccccaagcctcccactcacggggtggtgacctgaagagcgttcctacgcttcgcacttccttttcatcaaaggggaggcaactccccagcagcgggcttcacacctttcccgcccttaagtatgtgtacgttgggtgcagaaccgtttggttttcccgaggggtaggcagaatttccaaccccacgagctgctccctctttccgcaaacctcctaaccccggggtttttccataaatgtgtttacttcgtccacgccagcctgcgaagttccaaaatggagtctgggccacgccggcgttctgggcacgactacggtctcttgaaaaggtagggaagagtcggcgagctccagctttgggggatgccgcgtggcccggccgcgcctaggccgcctgctggccctgccgcctcgatgggcaggtgcgcgccgaacgcggggagcggcccggaggctgagcgcagcgcagcaccgtccgcgggccctcctgggccacctctgcgcccactgggggctgacccttgtgtttctccaggctcagacccagccagcccctcgtcccggccggcgtctagggcgcaggcattgcggggcccacccaagagcaggtcacccgccaggctcgccgcccgcccccagcagccctcggcgcagaaaggccacgcggcccacgggcgagttgtgggtttcgggtgtgcggagagggaagtcccggagtctgcagtggcccggctgtgcccccgaggctgtctccgcggagccgttccattcctgccgcggccccggggacctgagctgctggctggctctgaaatttccgctgacccggtcatctgctgtcctcgcggctctggacttgcgacaccaaggacgctctcagggaaatggctaactgacgaggggcgcgcgagcagcggctgcctgaaccccaaccgctgcaagtttacgccccgggaggccgggatgaaggccagggacaggaaacgcggaggaggaggtggaggaggagggggcgcgcagcgcaggcccctgccccccggcccacccaggaggctctgccagctaagcagcgagcaggtgtcagacacagacttccctggagttgactctcagcctctcccactcggaccgcgcg

SEQ ID NO: 1320 - DNA, 6000 bp, Homo sapiens
attacagtaacttatgcatttaggcagatgatcctttatatatgtaaacgctataaattcttaggaagaaaataaatttattaagtttttcacatcaaaaatttctagtatgattatgagttcaattttcaagtgaaagtaatccttaaaggatttaatttcaaataagaactacgtacaaaatatagatttaaattaattttcactgtatgaaatgtacagtatacatagaccaactcctttaacaagaatttctggtatgtcttaaagggcatgggtggttagagggagatccccaaacaaacaattcaaaattaagagtttaaaaagcaacaatcaagacacatatcctcctaagtgaatttgaattagacactggaaaatttaaaaaggtcagttactatgaagaaggtgtaacaatatttatattaatcagacagcaaagtaacaaactgacttagaggaaggaaaatagtaaaatacaaaagactaagttagcagatcattttgatatccagatgtgctgaaatgatggacactgagaagaaagaatagacaaaacttggcaacagatcttggtatgaaataaatatcccatgagtagtacataaaagcctggagagagaggggaaggattgtaagtgtcatagttctgacagctgctctttcatcctatgcctttaaaacaaagggaacaaagaagggaacaaagaaggtagaagcgggggtatggagggttgacttctggctgtccctccctgtttccctttgttaatatattgctagtagacatgtctacttctggttgctgatgacataaaattcacctctatttcttggaagcactattccatgttgtgagctaaaggggattgtactgatcttgaagataacaaatctgcctgcttcaaaggtttcaccgattttattgctgtgtttccaacacatttccacatatggtatgatatttaatttgcaaaataaatccgtaaagcaggaattactaacctaattttgcagatgagaaaactgaggcttaaagttgttcaaggtcaaagtcacgatgtccatcatgctgtagctcaatgaatgagtctcacattgtttcatgttgttttatttctactttctcaatccatgtacaagatagatttacaaactactgttttatgttggttgtatgaatttcaatacatttactgttagaaataacaaaaggtcttagactgccagatgctgttcccatcaactctacttaattcataatatagctgaactctgtcataaatctaataacgatgtggacattagccagaagtatgatgtggctgaacctcaccactgaacacaaaatgagaattcacctcatcttttcatttgaatttatttctactaaaatatatgtattatttttcttgatttctaaccaggccccttctgaagaaaactggttaactctaaattgttactaaattttgaatcttcctgtatttagcaataaaagttactgctaattgtaataacaattatgaggaaaaatttatttaaatgcttcatagaaagttaattttcatttaatagaaaagaaataaaaaatctgcttcagactgtttgatttctctattaggcaattgaccctaactagtatatggtgattttgagtattaaaaaagaagttataattttccagaatattaatgtttattattttgaaagcaagtaaaattctccagtaggaagattaataaaacaattcattaaaattctcatcagaaaatcctatgctttcaaatgtatctgctcaaagatgtcactctatgtgcggcaaagctttgttttacttgatcaagaaatgaatgtgactttatgatcttgtattcaactgtgaacagctgctcattaataaaaagccattaaagtccaagtcagaacagcaggtctaaaattgtgtttgagggaaaaaaaacccaccctttgatgaaaagccagggaactgggttgggaaagatctggaagcagagggctgtgtttgcagtctgctcctacctcctgggccaggtcaggtgacaaggccagagttagccccagctggagaagtcagaacaaagcctatgtaggctttgaaaggggagagtaagtggtgggctggaggttgatagtgtgaataaatcaagctggtaattgggcagaggctgatcagaagcgttaaagtgagcaaaatggtttggacacagagcagacagaatttactatattccattgagtaaaagaaattcatatgccaggttctatcccttatgttcctcccatttgacatctggtggtttcctacccccgtcccacacaagctttggggagaggacaggacttaaagttccctgttcccaagaggtggtccctaaacccaatcccaaattattgacttgtgatcccaattatgggcttactatttaacaagtaaagatgattttaaaatattattttataggtattactaaagtaaattttaaatttgcagtctttagcgagctttgttttctgttttgctattgtgttgggaaacaagtactcagtaactagctgtttctggaaaagtatatacatttcgttttgtttcatttggaaatggcaaatttaataaagaaaactgaagaatcaggaaaaagaagaaaatatccttgggcataataaattgtctaaagcaatcaactctttaagaaaaaaaatttaaacacgtttatatccgaatataggttattttggattttttttttttttttttttgagtcagggtcctgctctgtctcccaggctggagtgcagggcccaatcatggctcactgtagtctcgacctcccaggctcaggtgattcttcccacctcagccttctgagtagctgggactacaggcatgcgccaccaaacctggctaatttttaaattatttgtagaaacggagtttcgcccgttgcctgggctggtcttaaattcctgggctcaagcgttcctcctgcctcggcctcccaaagtgctgagattacaggcatgagttaccgtgcccagctagataactcgattttttaaatccaaaaaaaatttagaaattttatattgaaatttaggcattagaattctagagattaaagttagagcaggtgtttaagggactgaaaggggttgcatggcctttgggaaatgcaattaccggaaatgatactgtagtaatgcaatagtaatgcagtagtagtagtagctgcagcaacaactgttatctatgaatgtttgctatgtgccaggctctgtgctaagagagctttgcaagcattactactgcatgaagtaggcactattatggccattttactgatgaggaaattgaggtgaacagattaaataattttacccaactttacacagaaccattccagagcacgagccataaacacatctttcccgtcttggaaattaaattattaataaaaaacgtggtgcaaattggaaagaggacggttgtggtagattatcacaaagttaagtgggtaggtggttgctgggtcagggtgggagaacaaaggcagctgtaataaaaaaaaaaattaaaggcatataaagaaaaaggcttgttgagaacaatttgcataaactgattttggccttagaccctattcacttctccctcaccagtcactttgcaactgtggagcatagtattctgagggtcccctgcacataacaacccctttcatagcatacaagataaaaagaagaatcaggctgcaaagagagaagcactgaaggaaagaacatctcaggttgaaagaagggcaagtccagggtgcatgtgaggaacaaatgcatggacacggtgaagtgccacttcttcatttctagttcaacacaattcaattaaaaattactgggaggaggctacgtcttgaattaaactcagcattccacatctttgaggtggcggaatgactgaggggagggggtctgtctagccacatccaaatcttcctgagacagagggagatccctcatttgttgcagtgtattttccttggtcgcatctgacacaggggttctgtgggttgaacagaaagggactttgctggaggggaggcactctgcatagaaggaaagtagggacatctggcagaagcaggcgctccgagaataaacagtcaaagcagctcgcaatagtcccaaaaagctacccctcaccgaacctggcgtgcctgtcgccgcttgccccgctcccagggctcattggctcccagtctcgacgtcagacccgtagcctctcacctattgggccagccaggacctgaggcggagtgcagaagcgagggcctggagacagccgagagccgccttcaaggagggctgggggcggggctagaggaggggctgggggcgggtttcccgatgaaggggcggccatggcagctgcgcagaggcaacgcaggctgctacggagcgcgcgcccggctttgaatgagcggggctgggagtgagcgggcggagcgcgagctcgaggaagagacaggcagcgcgcgtgagcgcgccttgtgtgcgcgcgcggcccgcggcagctcggagcctccgccgggcgggcggggagggggaggggcaggtgagtgtgtgcggttcgcgcgtgcctgggaggggctttcctctccctacccccatcccgaccccagccctagcctctggggcattgtctgcccttcgccgtcggccctccgcctagccgcgcacttcccgccctcccaccttcctttcgcccttccaccagacctccctcgacgcccgacagctgctctgggtactgtttccgggtcagggtgacctctggggtgaggaaactgcgactgggagcgggacccaggcgtgcagcattcgccatgctccgctcacgcgtgggagactgggctgtggggtaccggcccggaaagcacgcagcctccaaagccgccttcctcagggaaatttgcgtgaccttactgccctccgtctacaggccttgtacctctccaggccgatttttccacaatttaaatctcagttcacctggtatccagctccagcaacttagagcgtttcacgtcacgccgggcgccaggcgtcggcttgtataacctgaaaacgctcctgtttttctcatctgtgcagtgggtatgatttttttttcatcaacaaatttcacgtgggtaatctgaaatgaaaccacttaagttatgaaactctttccttttgagttattctggagaccttactccgccttcggaaccgccccagtggtgtcacatacttgagggcctgactctcggttgccagacatggcacagaatgttcgattttactaccagctctcacactccgcttctgtttccccttctcttacgggccgctgctcaaacctttatttatcaaatttaagtgagttcaggtaaattttattttgggagctttgtaatattttctaacccacttcagagagttatagtttgaggatattctggactgtactagatcatatggttttcaaattttggtatgaaaagattcgtaaatagagttttagaaatacagcacctgtttagtatgtaccgaacatagattttggctttgcttgttttgtgaattgtgatgtattgaggctacttgaaaggacctctagcagtttaccgagaatttcaacaagaaaagatataatacatttgatctatcagtttctaatgtagcattctttttttaattgtattttttttccgttaacatggcagagctctcattcttgatttcctagagttgtcatttcttcaaaaagccttaatgaggatacattgcctcatagttttgaatctcattctgatatacctcaaatttttgtctttgtaatttttaaggaaatttaatgttaagattagattatattaacattgttccgttctagaaagtgttttaaagcaactaaagtgtaaagtagcgtaagat

SEQ ID NO: 1321 - DNA, 6000 bp, Homo sapiens
cttgttgtctaaaaggcattcagtctatggtgttttgttagagcagccccaagagacttaagagggaacaagagggcgatttctgttgtgttgataatgtttagtttgtggttacaaaagagtgcagacgtttttattttataacaattcattgagctatatacttaagatgtatgcgtaattttctatgtatattattgttttataaactttttcttaaaagaggaaatgggaattctcccttttatgtattaatctcttatgaaagagtttgttggcttcccaagatatttctgaaagattgcttttggcttcatttatgttctgccactgcttatgcacctctcaataactcttcatcttgtataatttatcattctttgatagggaccctcttccttgaaaaataattgaagatataaggaggaggaagagaagacaactaaaatgtttatttctagatacatagtagtcctgcatagataattatattcaaaagaggaggacaaattggctcctatctctgaaatttatagaaaagcatttccacattaaagtgatttcaaatgactagaaatgtcattcaagttttactttctaaatgtcactctgtctctccaaacctcattaaccacaaggaactggtgcagggactggaagtagttttctcatacaacggaaagttaacgaggggaggaaaggatgtgtgcaaaaataacgtccacagaagggacaaataacaaagggaaagatgacaggaaagggttcgggcactaacccttacaatgcagatacacactgggctggtctaagaaataggtttccctggtagacagaaggttaaataaattttcctggttattctgatacaactctaataaaagaagagaaatgaagctaaaacttaaaatgatgtatttaaaaggaagaaattttaacccattcataggtgagcttctgccaagattactactaatcctcaggagaaggggtagaggagaaactccataaaggcaactggaagtggagtattaggaagcacctcaagaacacaatagcaggaagtagctagagaacaaagagaagaaaccagaaaaaaaaaatccctttttatttttctgtttccattcctttggctccatttccacagctatggcctttattttcaccctccacagccatgagagcctctgggcaggagttctcctcgcctctccctgttccaatcacctctaacatttctgcctattgttctgcccagggaaaaaactccagtctcttctctgtcaaagacctcttgaattaagtccaaatgctacactctggcattcaagactccgtaatacagctcaacctgacttttccaccctcagcctccttgattcctaaaatgaagcctgtccacaattgaagctccttgtctttgctcctgcaaacttgttcattctcctggctgtgtttgtgctggtctctgtctatctagagctgtggatatcatggtatctattgtctatcatgctagccatgaaccacatgtggctggtgagcattttatatggtactagtctaaattgacatctactgtgagtgtaaaaatgtgcattatgttttgaagactgtacacaaaatttaattatctcatgaataattttagattggttatatgttgaaattataatattttggatatactatgctaaataaaacatattattaaaattaacttcacctgtttcttttcctctttcaatatggctactagagctttttaaattgcattatgtgactttattggacagtaccgattgaatgccctcaaccacatcacctcaccacagccacctctacctgtagtgatcataccacttctttaggcacactgcctgcattaagggcaatgaatgccttttcatcttctccactagatgtagtttcttttttctttgagagccatcatcaccatcatggttgacaccatgaacctatctgaagatgtcagccatagactgcttgatattctacaggaaagatcacagttttaagtgcaatctacccatgttattagcagtgtgtatctttcacacattacacagcctctctaagcctcatttctctcctctgtaagatggggatgataataacccatctcaaatgtttactatgaggattattcaaagaatggcaaatagcaagtgcttaataaatgataactagtactaccgccactactgttgtttttattgtattagattatgaactctctaaggaccatttccggatggaggataagagaccatttgatgtgggcagtgatgaggccttctgttgcacctggaaaggtcaactatatacaagcctgcaagtcattctataggagcaggccccagtgaccagactctatagactgtctcctctttcctgagagggacagccatctctaggttgactaacctctgaagctccttgcattggcttttgtgctatgagccatggatgattccagactaatccgagaatgctcgtcaaaaccccaaggaattactcaaatactgacataacagacatttttgagtggaagagccgagttttttttaatattctgaaactcattgtttttaaaatgcatgagatggccaaggtcttgctaagagctggcctgcaaaggccaaaaggccagagagaatgaaacccatagagaggcagaataaccagaaaggttgggactcgtttattttataatgtaaattagtctattatgaaacaatacttgtttactggtggaaaattggaaaatacaaagaataaaaggaggaaaaaaatcactctttagtttcacaagccaaatcaagccactattaaaatggtggtttacttccttttattaattttctctacatatttttgcataatcatgttgtatgtacaattttatgttctatttttcaatattaactggtgtctttcaaatttcctaatgacaaaaataatatatgctcataatagaacattttaaatgcaaataaaacaaaataaatgttaaaatttagtaatatttattaaattttctccaagtgcacgaaattacaaatgtaacaacctaattccctagtggcctaataaccctatttcccagacctcttctcattacaaggaaaaactcatatgcagatagttctaaaggtatgaagtgaaaagataaagatttttcttccttgctgcatcctcaccccatcagcattattccccagggtaactactattaatagatagtaattctacccaaaggaaaaaatcatatgcatataacagcatcatatgtatacctttctagtaacttacaaaacaaatgataatatcatatcctttcttatgtgtattgctcttttcactaaatgtatctgtgatatgtgtctatatcagctgattgtcctttttgatggctgaataatattccatcttgtccacgtgatagtattacttgacaagctccctgctgatggacatttgtctttgttactatgatagtaatataatcaacatttatatatgttttgtatgtatctataatacacatgcacatacacatgcatatttctgcagggatagccatagtaaataactagtaacggtattgcaagttaaaggaacaatctcattgcttgaaattttaaattttgaaatacactgccaattttcatggtctctccttgtaagctagtttgggctttctcacagcatgacaggctcagggcagtcagaccatcctggccaaagagcagagtgccacagaccacaactgcttctaatcagccatcttcccaaagccttctcttttttctattaataactttgtatgagattccatcttaatacttttctgttgtttggtcttgtaagagcttatttttcctgaaccaggaagtggttcagggcggtttttctaacttcacagagctccctcttctgttagcttttgtgaaatggtcaaaaacatagcagcctgccttctgagttctccatcccaccctggttgggccttctctatccttgtctgtgttgtttatatcctgctgaagtgtgattccacttgtggcagtttctcctctgtgtaggatcaaaagggctgtgactggttggtttgaaaatttcttataccctagactattccagtgcctttcagaagtttccaaggccctctcacactaatctattatcatattgggcaaaactccttgcagtttcagctactattccctgattgacttttcagtaaatctatctctcagtctttcagtatccaaagaagattggttctaggaccaccatcccgctgcctccacagataccaaaatcagaggatgctcaattccctcttataaaacgttgcagtatttgcatataatctgcacatgtatttctgtatattttaaatcatccctagattacttataatacctgatacaatataaatgctaaatagctgtaacactgtatctttaaaatttacattattttttgttgttgtattattatttttattgtatttttaaaaaatattttccatctacagtcagtagaatccacggatacagaacctatggataggaaggaccaactgtatcttttagtgttttgaggttcttgaattctcaggtcgtttgctttcctttgctttctcccaagtcttgttttacaatttgctttagtcattcactgaaactttaaaaaacattagaaaacctcacagtttgtaaatctttttccctattatatatatcataagataggagcttaaataaagagttttagaaactactaaaatgtaaatgacataggaaaactgaaagggagaagtgaaagtgggaaattcctctgaatagagagaggaccatctcatataaataggccatacccatggagaaaggacattctaactgcaacctttcgaagcctttgctctggcacaacaggtagtaggcgacactgttcgtgttgtcaacatgaccaacaagtgtctcctccaaattgctctcctgttgtgcttctccactacagctctttccatgagctacaacttgcttggattcctacaaagaagcagcaattttcagtgtcagaagctcctgtggcaattgaatgggaggcttgaatactgcctcaaggacaggatgaactttgacatccctgaggagattaagcagctgcagcagttccagaaggaggacgccgcattgaccatctatgagatgctccagaacatctttgctattttcagacaagattcatctagcactggctggaatgagactattgttgagaacctcctggctaatgtctatcatcagataaaccatctgaagacagtcctggaagaaaaactggagaaagaagatttcaccaggggaaaactcatgagcagtctgcacctgaaaagatattatgggaggattctgcattacctgaaggccaaggagtacagtcactgtgcctggaccatagtcagagtggaaatcctaaggaacttttacttcattaacagacttacaggttacctccgaaactgaagatctcctagcctgtgcctctgggactggacaattgcttcaagcattcttcaaccagcagatgctgtttaagtgactgatggctaatgtactgcatatgaaaggacactagaagattttgaaatttttattaaattatgagttatttttatttatttaaattttattttggaaaataaattatttttggtgcaaaagtcaacatggcagttttaatttcgatttgatttatataaccatccatattataaaattgccaagtacctattagttgttctttttaaaatatacctgcaaagtagtatactttctggcccctgcctttaaggaatttaaaattcaagaaagccatgtggaatatataaggtaagagacaataaggggacctgaaccttatgggggaataaatatggcatgaactgctgtgggattaaaa

SEQ ID NO: 1322 - DNA, 6000 bp, Homo sapiens
gtaaaatgctttttcagcatcaattgagactattacagtttctctcccttcgttctgttaatgaagtatatgacattcactgggtttttttaaaaaaatgttgaaccatctttgtataccaggagtaaatcccaattagtcataatgcataatccttttaatgtgctattaaatctgagttccaagttttttgttaagaacttttgcatcaatatcagtagggatgttggtctttagtagtttttgtgtcatgtccttgtctggctttgatatgaggataatgctagactcataaaattagtttgaaagagtaccttcctcatcaatattatgaaagggctgagaaagactagtgtaaatttttctttaaatgttcagcagaattctccagtgaaaccatgtgtccctgggtttttctttgttcagaagtttttacttattgatttagtctccttaccagttataggtctgcttagatttttttgtttcttcacgattcagccttagcagattttatgtatatgtttctagaaatttatccatttcctgtacaatattaaatttgttgacatttaattgttctaattgtctcttatcttttttatttctatagcatcagctctaatgtctcctcttttgtttctgatttttgttctttgagtcttctctcttttttcttaatcaatctagttaggggtttgacaatttttaaaaacttatcaaaaaaccaactattactttgctaatttttaaattactttttctctattttgtttatctttgctccaatttttataatttcctgccttgtgccagctttgggtttagtttgcactccttcttctagctacataagatataaaattgggtagtttatttgagctctttcttcctcttttttagtgtaagcttttataggtgtaaattttccacttagtactgcttttgtaatgttgtctttttattttcatttatctcaagatgttttctaatttctcttgacttccttcttaaattcttacctcatgtagacatacatttttggccctatgcattgggatgcaaaaccagactaatttactttgtacaaaaagaaaaatgagaaagaaatatatttggtcttgtgagcactatatggaaatactttatattccatttgtttcatcatattcatatatccctttactaacataaagctgaaggtgaataaaaaaatcagggttagccaaacaaattttcatggtcaaataccacataaaaagtaaatatacttaagttcccagcaaaatctgaattgaacgtagacaaaatgctcatttctcagtgtttgacagacttaacagtttgagccaataaaaatgtactgactagataaactactaaaagttgttaatttttgcaatgtatatttctgaaaagaaagtttatctattatagaaattcctgtgcccatttaagaactttgagcattttaattgtttaataatatagtttaattgcatcatgaaaataatcaataatacaatttatttggtttatttaaaaaaactgattctttctgctctctctatatatagactgattttatactaatgttgcctaaagatcaccaaattgtttgaagcctaggtttctgagggatggaaaatgatgtcacaactatttacagttcacacacacattctggggatttaatacatcctttacaagtgcaggaaaggtggaagattgatgatttgggggaattagagctaccacaccccagagggtggtatggtatgttgtctgttgtgagctgtgtgaatcagagagtttgaatttagacatatatttagaaagaggaaaagatgaaccaatcaaaaataataactataatgacttttcaagatatagacaatacagttaagatataaatggaaacaaaaaaagttaaaagtggggagatgaagtctgattttttggtttttttttttttttgcttttttgtttgtttatgtaatcagtgttaccagtttaaaataatgggttataagacactatatgcaagcctcatggtaacctccaatctaaaacatacaacaaatacacacaaaataaaaaggagaaattaaaacacaccaccagagaaaatcacctacattaaaagaaagacaaataggaagaaaataagaaagagaaggccatcaaataatcagaaaatgaataacaaaatgacaggaataagtcctcataaataataacattgaatgtaaatggactaagctctccaatgaaaagacagggagtggctgaatgtattttaaaaaaaatattacaccgagctgtgcgtggtgtctcacacctataatcccagcattttgggagactgagccgggtggatcacttgagcccaggagttcgagaccagcctggccaacatggcaaaaccctgtctctactaaaaatacaaaaaattagctgaacatggtggcacatgcctgtggttccagctactagagaggctgaggcagaagaattgcttgaacttgggaggtggaggttgcagtgagctaagattgatggagccactgcaccccagcctaggtgacagaataagactctgcctcaaaaaaaaaaagcaaaacaaaacaaaacaaaaaacccttagacccaatgattcattgcctacaagaagtatgcttcacctttaaagacacatatagactgaaggtaaagggatggaaaaatattctatgcctatggaaacaaacaaaaagaagcagaagctacatttatatcagacaaaatagactgcaagacaaaaactatgaaaagagagaaagaaggtcattatatagtgataaaggggtccatttagcaagagcatttaacaattctaaatatatattcacccaatactggagtactcaggtatataaagcaaatattattagagccaaagagagagatagacagacccccatacaataataactggagacttcaacaccccactttcagcattggacagatcatccagacagaaaattaacaaacatcaaatttcatctgcaccataggccaaatggacctagtagatatttacagaacatttgatccaacagctgtagaatacacattcttctcctcagcacatggataattctcaaggatataccaaatgctaggtcacaaaacaaatcttaaaatttagaaaaaaagtgaaataatatcaaacgttttctctcaccacagactaagaaaaaaagaagtcccaaataaatacaatctgagataaaaaaggagacatgacaaccaataccacaaaaaattaaaggatcattagaagatactatgaaactatatgctaataaattggaaaacctgaacaaaatagataattcctagaaacatacaacatactggtctgttcaggttttgtattttttcatagtaccatgaagaaatacaagaattgtttctagaaccattcttgtatttcttcatggtttttgtatttcttcatggaaccatgaagaaatacaaaatgtgaacaggccaataacaagtaatgagacagaagccatactaaaaagtatcccagaaaagaactcaggatctgatggcttcactgatgaattttgccaaatatttaaaaaactaataccaatccaactcaaattattaaaaaaatagaggtggacagaatctttccaaatgtattctatgaggccagtgttttttctgattgaatctcccattatattttaatcacatataaaaccagagaaagacacattaaaaagaaagaaaactgtaggccaatatctctgatgaacattgatgcagaaatcctcaacaacaaattagcaaactgaattcaagaacacattaaaacaatcattcatcatgaccaagtggaatttgtcctagagattcaagtgtggttaggtatgtgcagatcaatgggtttaatgttgtccaatgaacataatgtcctccagctccatccatgttcttgcaaatgacaggatctcattcttttttatggctaagtagtactccattgtgtataagtgccatattttctttatccattcatctgttagacacctaagttgcttccaaatcttagctattgtgaatagtgctgcaataaacatgggagtgtaaatattttgttgacatactgatttcatttcctttggataaatacccagtagtgggattgctggatcatatgggggaaaatggagatggctaacgggcacaaaaatatagttagaaaaaatgaatatgatttagtattcgatagcacaataggatgactactgttaatgataatttattatatattataaaataactaaaatagtataaatgggatgtatgtagcagagagaaatgataaatgtttgaagcattggatactccattcaccctgctgtgattattatgaattgtctgcctatataaaaatatttcacttattccataaacacagacgcctcttatgtacccacaaaaatctattttcaaaaaagttgctctaagaatatagttatcaagttaagtaaaatgtcaatagccttttaatttaatttttaattgttttatcattctttgcaataataaaacattaactttatactttttaatttaatgtatagaatagagatatacataggatatgtaaatagatacacagtgtatatgtgattaaaatataatgggagattcaatcagaaaaaagtttctaaaaaggctctggggtaaaagaggaaggaaacaataatgaaaaaaatgtggtgagaaaaacagctgaaaacccatgtaaagagtgcataaagaaagcaaaaagagaagtagaaagtaacacaggggcatttggaaaatgtaaacgagtatgttccctatttaaggctaggcacaaagcaaggtcttcagagaacctggagcctaaggtttaggctcacccatttcaaccagtctagcagcatctgcaacatctacaatggccttgacctttgctttactggtggccctcctggtgctcagctgcaagtcaagctgctctgtgggctgtgatctgcctcaaacccacagcctgggtagcaggaggaccttgatgctcctggcacagatgaggagaatctctcttttctcctgcttgaaggacagacatgactttggatttccccaggaggagtttggcaaccagttccaaaaggctgaaaccatccctgtcctccatgagatgatccagcagatcttcaatctcttcagcacaaaggactcatctgctgcttgggatgagaccctcctagacaaattctacactgaactctaccagcagctgaatgacctggaagcctgtgtgatacagggggtgggggtgacagagactcccctgatgaaggaggactccattctggctgtgaggaaatacttccaaagaatcactctctatctgaaagagaagaaatacagcccttgtgcctgggaggttgtcagagcagaaatcatgagatctttttctttgtcaacaaacttgcaagaaagtttaagaagtaaggaatgaaaactggttcaacatggaaatgattttcattgattcgtatgccagctcacctttttatgatctgccatttcaaagactcatgtttctgctatgaccatgacacgatttaaatcttttcaaatgtttttaggagtattaatcaacattgtattcagctcttaaggcactagtcccttacagaggaccatgctgactgatccattatctatttaaatatttttaaaatattatttatttaactatttataaaacaacttatttttgttcatattatgtcatgtgcacctttgcacagtggttaatgtaataaaatatgttctttgtatttggtaaatttattttgtgttgttcattgaacttttgctatggaaacttttgtacttgtttattctttaaaatgaaattccaagcctaattgtgcaacctgattacagaataac

SEQ ID NO: 1323 - DNA, 6000 bp, Homo sapiens
gggctgggtgaggtgagaggatcaaggcgagagcgagtggacgggcaatgggcatcaaaacgggttgggtgctggcagggcaaggcagtgatggggttaggggttccctggtttgtggcgttaggaatgacttgggtaacagggatgaaggggagaaggtgagatagagagggacgacgtgtaaggggcccaggacccgaaatgaagtggaagaatatgggcccggggctgggggtgggcggggtcgggtgtgtcagaggtcctgagcctacttatgcatgatcaaatgcccaccgtgccaatgcagtcagtcaggctgggcggcggagccttgggtttcgctttcccgaagagtcggttcatcttgagcagccgcgaagaaacccaaacactagagcaaaaccagaaacggaagcagagtcactcccgcctcgacttccggcccctccgtgcgcaagcgcaatatgcctcctggcgtttcccgattctttttccggattttcagccgggtcttccggggatggagagcaaaaggacttggtgctctcggagagagcctgcagggggcggggtgttggtagaaggagtgggaggggttttactgtagcaaggcggggcctcagttgagtgggtggggcctggaggcaactaacgcggcatagggcgagggcggggccggcaggccggggcggggctgggaagtagtcgggcggggttgtgagacgccgcgctcagcttccatcgctgggcggtcaacaagtgcgggcctggctcagcgcgggggggcgcggagaccgcgaggcgaccgggagcggctgggttcccggctgcgcgcccttcggccaggccgggagccgcgccagtcggagcccccggcccagcgtggtccgcctccctctgggcgtccacctgcccggagtactgccagcgggcatgaccgacccaccaggggcgccgccgccggcgctcgcaggccgcggatgaagaagaaaacccggcgccgctcgacccggagcgaggagttgacccggagcgaggagttgaccctgagtgaggaagcgacctggagtgaagaggcgacccagagtgaggaggcgacccagggcgaagagatgaatcggagccaggaggtgacccgggacgaggagtcgacccggagcgaggaggtgaccagggaggaaatggcggcagctgggctcaccgtgactgtcacccacagtgagtgtcgggcgccaggtgggctccatgcaggtcccgaaagcccggcggggtctgtgggtttagtcacgtgtcctccagaagcgtgtgaccttgcgcttgtcctggcgtccggaagcgtgggttattggttgtgtccgtggaactgtcttttgtcccgggcttgtgtctgtacacttttccatgtggccggtgtattttgtctctggtcatttgtgcgatcctgggtgtttgagcttctccgtgctttacgtcgtgggcctggttgtgtttgtgtgcccgcgcagttattgtgccctttgtgtcaggcatatattgggccatgtggtctacgactgctccgtgtgtgataagtcagaacttcgtgcatgccggggtgctcctcgtgtgctgagtgccttctccgtgtgcgccgcttgagttggccgtgggtccaagcgttgtactctgggcaccctttgggtctgcctactgttggagttgacacaccaccaaatgaagtcagtacaccggagagctgagtccatgaggtttctctagaaccagctaggggaggcccaagggtctgggaatctggagacctggattctagatcctgcggttttgagtgaccttgggatggacggcttcttctaagaatccggtttctcctctgtgaagtagatttggtaaccctggctcctgctgacctcacggagctgttgggggaaccaaaccttggtgtaatgtactgtacacaggctccctccttgctgtccgcatccctggaaaagaattggcgtctcttcttcagaaagaaaggctctgctgttcgtatgcatttgtctgtttacttagcacaaatcatggatgcactcaagtgtgttcagtgggagagacttggaggaaaacagtcacttgcccattacagcaagcgagacgagaccaatacaatacagggtacagggcagtcaagccacaggaagcagatggcttgtgatgaaaaaggtgggcttgggaatcagctagatctgatatcaacttctgattccaacagttgagtctccataggcagtccttaacttgcctgaagtcacagtttgctcatctgtgaaataagaagtaataggtagatctacttcgtggggtttatctgaggattaaattagattatgcatgaaatgcttaaaatgttagcagatatcattcatattgttagttattataatagaggaaacagagatacttgaggaggtcaccagaggaaagctgggtggcatgggggcaggctctgtggagtaggtggcatatgagctgggccttgaaggctgggtaaataaatgtgataaagtgtcatcctatattggtgtatgtgaaagaatcatattcgtcaaatgcttttctttctccccaggcaatgagaagcacgaccttcatgttacctcccagcagggcagcagtgaaccagttgtccaagacctggcccaggttgttgaagaggtcataggggttccacagtcttttcagaaactcatatttaagggtaagcatttctttttctttctttctttttctttttttttttttgagacgaagtttcactcttgtcgcccaggctggagtgcaatggcacgatctaggctcactgcaacctccgcctcccggattcaagtgattctcctgcctcagcctctcaagtagctgggattacaggtgcataccaccatgcccggctaatttttgtatttttagtagagacagggtttcaccatgttggccaggctggtctcgaactcctgatctcaggtgatccacccgcctcggcctcccaaagtgctgggattacaggtgtgagccactgcacctggccaagggtaagcatttcttttccggcttttccttatggccaaaggacagttttaaaactgctgaacttttcctaatagtcactctgttttcaaactgggacaatttttatttatttgtttattcattcagttcttcaacagatatttattgaggacctgctaggtattggacactctcaaacacctggacaggtgtcagatttgaagtcttatgatgatggcagaaatctcaccattttcgatgaagctcatgggcagtcttccctcgctaggttagatcatcttcccattatatgttaccatggtactccctgctatttttgcatcacttctatgaaattactattaaataatcattttcttagttgcttaacatctgatttctctgttaaaataacagcctccgtgagggtggagatactgctgtgtttccagtgcctcccattgttctgactcaaaggaggttttgagcaaacttacctgaggcctggatgtggcgggctcagtggatgcatgatgctcatttctgccaggacccacaccctcctggcccctgccctctgtcttcccacccccctgagaatctatcattctggtatccactggggaaagacttaccccattgggtgtcagtcattataaagaatttagtaataggaggcatttttatttatatttcatagtgtaacatattgtctttaatttttaaaaatattttatttctgaattataaagacaatagaaattcatgtttcaaaatagaggaatgcatgaaaaagaaaatgttcccctggataaaacccctcataataacactgtgtcatcagcattcattgtggtattggggtttcctgcaaaaaatgagctttaatggctactgtagaccttaatgcctactgaagactttaaagtcttctgtagtgtggttcgttggtccctgattcctgaatatttggctctttccagtttctcactattatgaaaaggttgcactgaatattatcgtatagtagttactgtggagtcgcatgtccaattatttgtttaggataaatatctggaaatgaaattactgggtcatgacaccctctaaaaagataccagttctcattagtgaacacacttgtctatttcctgtatcctgctgaaatttattttcagtgttgtacaattattacaacttggcctacctttctcctctttttaggaaaatctctgaaggaaatggaaacaccgttgtcagcacttggaatacaagatggttgccgggtcatgttaattgggaaaaaggtaaattgctttttccatcagaaatcctcagaatcaaatgactgaagtcttttatacatgtttctgtttagaagaccaaactggggacccagattctgcattgataaaacacctctctaaacaaatacaatctttattggttttacaggattaccagttttgttgttctcataccctcctgctcctgttggttagaacttttgctctaggaattaggagcggttgtgctgccttaataatatgttttttgttttggtggtggaatcttggtctggttaaaatggtgcctgggacaggtctcattcacttggagtagaatttgcaagagtcttttgttaaaataaacttgtagatattaagaataatcactctgttccagttcaggagcctctctccctttaaccaaccttttaactaaaatctcccacaagggaaaaccttcgactggaaaggaaggttcagactaaagaactgaggggaaaaaaagacagatgaggtcagcaacccttaaggtgatgagagagggctgtggccagccctgcattgtgacacagcagaattatgagcatatgaagttcccttattgtgagttaggtggctgagtagagagagggcagataaacaaagtgaaggcaaaaaaaatctaatccagacttggaactgccaggagactggaactcaggacttgccacaaagagaagtgaataatttgggatagcataactaagcagaaagctgctagacctatctatcaattgtttacctgagagaagagggaaatattctaaatttcttgcttcagggtcagggagaatggtgatgggcaacaggcagaaccaaagagtcaagtttgaagaaactataggacttttacttggagctgacacagagcgtatggagcgaagtgtgaactcaaggaaggcaccatggcacatgcctattgtcccagcaagttgggagtctgagacaggaggatcacttgagtccaggggtttgaggctgcagtgagttatgatcatgcctgtaaacagccactgcactccaacctgggaaccgtagtgagaccctatctcaaaaaagaaaaaagtctgaacttaagtctaatctacctcttttggactgtgtgatctcatgttactttactacattaagcctcagtttcatcatctgtaaaacagcagtacttccctgatggagttgtggtaaggcttaaaaaataggtaaggtgcttaggatagtgtgtggcatgtaggaagtgttcaataaaagtattcatcgttgttaaccagcatcacattaaacaggagcgctcaattggaggctgccatttaggaattccatttaaaggaatggtagaattccacctttcttgccattctggactcctcacaagtgtttactgaaatgtgattaccctccaggcttcagtcttggttgttgatcagtatagggctgagactgaatctggcacttggattgtctccattctctgcacccaagctgtcagggccctcaccagaatgtttacctaacaccttctctctagtctggagtctttgtagatggaaaacttgatgtataaccctttgacttgatttccaagaagcaacagagttaaaactgttatttctaggtgagtggcttc

SEQ ID NO: 1324 - DNA, 6000 bp, Homo sapiens
catggtgaaacactgtctctactaaaaaaacaaaaaaattagccaggcatgctggcgtgcacctgtagtcctagctactcgggaggctgaggcaggagtatagcttgaacctgggaggtggaggtttgtagtgagctgagatcgtgcacctgtactccagccagggtgacagagcgagactgtctcaaaaaaaaaaaagaaaaaagaaaaagcaatcaacaagaacagcagcctctgtcaggaaaaatacctgaccacacctgcatgaagccactcacctagaaataacagttttaactctgttgcttcttggaaatcaagtcaaagggttatacatcaagttttccatctacaaagactccagactagagagaaggtgttaggtaaacattctggtgagggccctgacagcttgggtgcagagaatggagacaatccaagtgccagattcagtctcagccctatactgatcaacaaccaagactgaagcctggagggtaatcacatttcagtaaacacttgtgaggagtccagaatggcaagaaaggtggaattctaccattcctttaaatggaattcctaaatggcagcctccaattgagcgctcctgtttaatgtgatgctggttaacaacgatgaatacttttattgaacacttcctacatgccacacactatcctaagcaccttacctattttttaagccttaccacaactccatcagggaagtactgctgttttacagatgatgaaactgaggcttaatgtagtaaagtaacatgagatcacacagtccaaaagaggtagattagacttaagttcagacttttttcttttttgagatagggtctcactacggttcccaggttggagtgcagtggctgtttacaggcatgatcataactcactgcagcctcaaacccctggactcaagtgatcctcctgtctcagactcccaacttgctgggacaataggcatgtgccatggtgccttccttgagttcacacttcgctccatacgctctgtgtcagctccaagtaaaagtcctatagtttcttcaaacttgactctttggttctgcctgttgcccatcaccattctccctgaccctgaagcaagaaatttagaatatttccctcttctctcaggtaaacaattgatagataggtctagcagctttctgcttagttatgctatcccaaattattcacttctctttgtggcaagtcctgagttccagtctcctggcagttccaagtctggattagattttttttgccttcactttgtttatctgccctctctctactcagccacctaactcacaataagggaacttcatatgctcataattctgctgtgtcacaatgcagggctggccacagccctctctcatcaccttaagggttgctgacctcatctgtctttttttcccctcagttctttagtctgaaccttcctttccagtcgaaggttttcccttgtgggagattttagttaaaaggttggttaaagggagagaggctcctgaactggaacagagtgattattcttaatatctacaagtttattttaacaaaagactcttgcaaattctactccaagtgaatgagacctgtcccaggcaccattttaaccagaccaagattccaccaccaaaacaaaaaacatattattaaggcagcacaaccgctcctaattcctagagcaaaagttctaaccaacaggagcaggagggtatgagaacaacaaaactggtaatcctgtaaaaccaataaagattgtatttgtttagagaggtgttttatcaatgcagaatctgggtccccagtttggtcttctaaacagaaacatgtataaaagacttcagtcatttgattctgaggatttctgatggaaaaagcaatttacctttttcccaattaacatgacccggcaaccatcttgtattccaagtgctgacaacggtgtttccatttccttcagagattttcctaaaaagaggagaaaggtaggccaagttgtaataattgtacaacactgaaaataaatttcagcaggatacaggaaatagacaagtgtgttcactaatgagaactggtatctttttagagggtgtcatgacccagtaatttcatttccagatatttatcctaaacaaataattggacatgcgactccacagtaactactatacgataatattcagtgcaaccttttcataatagtgagaaactggaaagagccaaatattcaggaatcagggaccaacgaaccacactacagaagactttaaagtcttcagtaggcattaaggtctacagtagccattaaagctcattttttgcaggaaaccccaataccacaatgaatgctgatgacacagtgttattatgaggggttttatccaggggaacattttctttttcatgcattcctctattttgaaacatgaatttctattgtctttataattcagaaataaaatatttttaaaaattaaagacaatatgttacactatgaaatataaataaaaatgcctcctattactaaattctttataatgactgacacccaatggggtaagtctttccccagtggataccagaatgatagattctcaggggggtgggaagacagagggcaggggccaggagggtgtgggtcctggcagaaatgagcatcatgcatccactgagcccgccacatccaggcctcaggtaagtttgctcaaaacctcctttgagtcagaacaatgggaggcactggaaacacagcagtatctccaccctcacggaggctgttattttaacagagaaatcagatgttaagcaactaagaaaatgattatttaatagtaatttcatagaagtgatgcaaaaatagcagggagtaccatggtaacatataatgggaagatgatctaacctagcgagggaagactgcccatgagcttcatcgaaaatggtgagatttctgccatcatcataagacttcaaatctgacacctgtccaggtgtttgagagtgtccaatacctagcaggtcctcaataaatatctgttgaagaactgaatgaataaacaaataaataaaaattgtcccagtttgaaaacagagtgactattaggaaaagttcagcagttttaaaactgtcctttggccataaggaaaagccggaaaagaaatgcttacccttggccaggtgcagtggctcacacctgtaatcccagcactttgggaggccgaggcgggtggatcacctgagatcaggagttcgagaccagcctggccaacatggtgaaaccctgtctctactaaaaatacaaaaattagccgggcatggtggtatgcacctgtaatcccagctacttgagaggctgaggcaggagaatcacttgaatccgggaggcggaggttgcagtgagcctagatcgtgccattgcactccagcctgggcgacaagagtgaaacttcgtctcaaaaaaaaaaaaagaaaaagaaagaaagaaaaagaaatgcttacccttaaatatgagtttctgaaaagactgtggaacccctatgacctcttcaacaacctgggccaggtcttggacaactggttcactgctgccctgctgggaggtaacatgaaggtcgtgcttctcattgcctggggagaaagaaaagcatttgacgaatatgattctttcacatacaccaatataggatgacactttatcacatttatttacccagccttcaaggcccagctcatatgccacctactccacagagcctgcccccatgccacccagctttcctctggtgacctcctcaagtatctctgtttcctctattataataactaacaatatgaatgatatctgctaacattttaagcatttcatgcataatctaatttaatcctcagataaaccccacgaagtagatctacctattacttcttatttcacagatgagcaaactgtgacttcaggcaagttaaggactgcctatggagactcaactgttggaatcagaagttgatatcagatctagctgattcccaagcccacctttttcatcacaagccatctgcttcctgtggcttgactgccctgtaccctgtattgtattggtctcgtctcgcttgctgtaatgggcaagtgactgttttcctccaagtctctcccactgaacacacttgagtgcatccatgatttgtgctaagtaaacagacaaatgcatacgaacagcagagcctttctttctgaagaagagacgccaattcttttccagggatgcggacagcaaggagggagcctgtgtacagtacattacaccaaggtttggttcccccaacagctccgtgaggtcagcaggagccagggttaccaaatctacttcacagaggagaaaccggattcttagaagaagccgtccatcccaaggtcactcaaaaccgcaggatctagaatccaggtctccagattcccagacccttgggcctcccctagctggttctagagaaacctcatggactcagctctccggtgtactgacttcatttggtggtgtgtcaactccaacagtaggcagacccaaagggtgcccagagtacaacgcttggacccacggccaactcaagcggcgcacacggagaaggcactcagcacacgaggagcaccccggcatgcacgaagttctgacttatcacacacggagcagtcgtagaccacatggcccaatatatgcctgacacaaagggcacaataactgcgcgggcacacaaacacaaccaggcccacgacgtaaagcacggagaagctcaaacacccaggatcgcacaaatgaccagagacaaaatacaccggccacatggaaaagtgtacagacacaagcccgggacaaaagacagttccacggacacaaccaataacccacgcttccggacgccaggacaagcgcaaggtcacacgcttctggaggacacgtgactaaacccacagaccccgccgggctttcgggacctgcatggagcccacctggcgcccgacactcactgtgggtgacagtcacggtgagcccagctgccgccatttcctccctggtcacctcctcgctccgggtcgactcctcgtcccgggtcacctcctggctccgattcatctcttcgccctgggtcgcctcctcactctgggtcgcctcttcactccaggtcgcttcctcactcagggtcaactcctcgctccgggtcaactcctcgctccgggtcgagcggcgccgggttttcttcttcatccgcggcctgcgagcgccggcggcggcgcccctggtgggtcggtcatgcccgctggcagtactccgggcaggtggacgcccagagggaggcggaccacgctgggccgggggctccgactggcgcggctcccggcctggccgaagggcgcgcagccgggaacccagccgctcccggtcgcctcgcggtctccgcgcccccccgcgctgagccaggcccgcacttgttgaccgcccagcgatggaagctgagcgcggcgtctcacaaccccgcccgactacttcccagccccgccccggcctgccggccccgccctcgccctatgccgcgttagttgcctccaggccccacccactcaactgaggccccgccttgctacagtaaaacccctcccactccttctaccaacaccccgccccctgcaggctctctccgagagcaccaagtccttttgctctccatccccggaagacccggctgaaaatccggaaaaagaatcgggaaacgccaggaggcatattgcgcttgcgcacggaggggccggaagtcgaggcgggagtgactctgcttccgtttctggttttgctctagtgtttgggtttcttcgcggctgctcaagatgaaccgactcttcgggaaagcgaaacccaaggctccgccgcccagcctgactgactgcattggcacggtgggcatttgatcatgcataagtaggc

SEQ ID NO: 1325 - DNA, 6000 bp, Homo sapiens
atagctaaatggttttccagaattttgaactccttgaagacaggcatattttattttgtttatttatttacttatttatttgtttagagccagtcttgctctgttgcccaggctggagtatagtggtgccatctcagctcactgtaacctctgcctcctgggttcaagcgattctcctgcctcagcctcccaagtaggtgggattacaagcgcatgcaaacacgcccagctaatttttgtatttttagtggagatggggtttcaccatgttggccaggcttatctccaactcctgacctcaagtgagcttctgtcttggcctcccaaagtgctgggattataggtgtgagccactgtgcccagccccaggtgttttattaattttgcacccataattaggtaatccatctgacctaatgtgtggtgttcaaaatgtttttaaaatacagttttatatcaaattataatattacctcaaagacttatgtcactatgttctttatacaatattggaaacaatctaactatccaactagaaaaagaatggtccgttcatggtgcaagcaaatggtagaatattataatctcattaaaaagtgtaaagtttccaaagaatatttaaaagaacagggagatgctcatgatataacattaagtggaaaaggaaaacctacatatacacactacaatttcatttcttctaaaaagttatatgcacacataccacgtatgcagaagcagaggaaagaaactggaagaaattagcattttaaaggtggttatttctagtagtaagaatctaggtaaattttattttcttctgttcatatttatgtattttccaagtttctacaatgaacctatattctttttataacaaaaaaggttacttaaaactagcaatgccaccaattaagaaggtaaatcatttcaccacaccctcaccagtctaggcattacaatttctttttccaatttgatctaatctaaaaggaggaagatggcatctggtatcttataaaaagtcattttaatataggaagagagacactgacaatctttctggctcctcgatagctaattatacctgacctctataaccctgcagaggatctcatcagctgaacagtctacagaggtaggcaccaaagatactagttagcttctgctcaaaattgggacatagtcacctaaaacaaattaaggatctttaaatttattctggtgggagggaacaaacatttaggattcctaacttcacaaacaaaaacaaaaaaggtacactctaaaataaataataggaaaaccaaaccctacagatctggtcagtccaaaacagtagtcactaaccatataaggctacttaaattatttaaattgaataaaatttaaacttcatttccttagtcacactagccacatttcaagtgctcaatagccacatgttgctaatagctactgtattgaacacacagatatagagcatctccatcatggcaaaaagttctatttagatggaagttgttacaacagataacaacccagctaactgtatttaattacacgtcaatgaaaatttgtaattaaatcaagagtgcttagaaaatagtatgaaaacctgaaggaatggaagaccatttctcttttagttaaacctgctagaggtagaaattgtgtgtgtaacttacatcctcttttgctttaaaactcgcaaggctttctgcttgaccatattctggagagaaaaacagatttaataaaaataaggtggaaaacacatatacggtaaaagaaatttcccatagcctcaaactcacatgcctacttcctctcttcttcaaagtagtaggcataatggctcctggattctgtacttcccctcccaaaaacaggtatctctaaggtccagtctttaagcctttgctcctatctgtctttgcatcccacatcccagagtcctcaactactttctcttttcctaatgcatattatctctgcctctagccccaaaagtgctgagtctgtatatccagttgccttagggagattcttcacttgtacagcccatcaacttaacctcaacaattccaaactcctgaaccttatctcacctttgaaataagtaacaatggcccaccaatctctcacctctctaggttgaaaacctttttatcaaccttatctttcctctttctgttgtttcttcatgcacagtcatcctgttagctgatttcagaactcactttcaaactgattctttggtttcctaccaccatggtttgggctttcattgtctcaaatctaaatgggctttcctacctctggttgctcttcattccacaccatccactaagatggctgggaaaagccttccttttctatagaattctgtagatcattttatttgtcttctccagtgaggaaggaaaaacaggtattattacttcacagatgatcataactcatatttactgagtactactttatcctagacatagtggtacacaggtcacatcaattacctcatttaatcctcatactgtaaggtgggtattatctctgttttacagatggggaaagagaggttcagtgatacccaggctcacatggttaataagttatggatctggaaaaaacaaggtagttctatatccacagtccatgtgcttaaacacagtattttatgtttctacctaacaggagtggaaaataagtgactttatcaaggtcacaactagaaggcagtgacagtgtattagaacactggtcccagatgcctagttcagtttttcccagcaggccactccttaagcagtctaatataccaacctaacctgaccagcttagcaagtcattgatcttgagcacagcctagtcttcctctccagattaccaccttctcagtataatatgctaattctcatgtacatgcttttagacgtgtgaccagcatctctttccaccagatcaatccccagcctcccttccatatttgattgcaaactctcctccctaaaggatacaccctcacatgttttctccttaccagactgtaagcatctcttctgtagggatgctcacagcccctgcactaggtcctatttcacttattttttgagacggagtctcacactgtcacttgggctagagtgctatggtgtggtctctgctcactgcaacctccgcctcccaggttcaagcgattctcctgcctcagcctcctgagtagctgggattacaggcgcctgccaccatgcccagctaagtttttgtattttcagtagagacagggtttcgctatgttggccaggctagtctcaaatgcctgacctcgtgatccacccgcctcagcctcccaaagtgctgggattacatgcatgagccactgcgcccagccgaactaggccctatttctataggtgctaaaactaggctctgccagcaccttgtgcagcagttgctgcccaccttacctttgcaggaccctctctcatcttcttgatctgatccttatacttcactagctcagcatccaatcgagaaatcttcttgtcaatggattctgctctactgtccaccttaggggaaaatatcaaatgcactggtagttactgcaatacacttattccagaaggggcaggtagagaggaaggaatacagaggaagaaaagaggagcttaaggggaagggtgaaaaacagtggttcacaaagaagggtattcccaaccagaaaccctgggctttataaattattctcttaccccccgccacactgccccgattctgatataccaggtagccttcaagtgggttggggcagaaaataatttgagaatcactgagttgagttggaatttccctagaatcagagactagccaggctgagagttcctccaagaggcacatgaaatgggccagtgccaagtgaaaccagctgattgtagatctaatgccattccctaaatcggggatggtggcttaatctgaggggctagggttctgagttttgtgttactgagatccaggacgaaggcacagatatgttgacctaggatatcaagctgagtcctgatgtggactggggatgacagatggaagaagggtaagggatcaggcaggatgaggtgggaagggtgtatgggcctagggctgggtgaggtgagaggatcaaggcgagagcgagtggacgggcaatgggcatcaaaacgggttgggtgctggcagggcaaggcagtgatggggttaggggttccctggtttgtggcgttaggaatgacttgggtaacagggatgaaggggagaaggtgagatagagagggacgacgtgtaaggggcccaggacccgaaatgaagtggaagaatatgggcccggggctgggggtgggcggggtcgggtgtgtcagaggtcctgagcctacttatgcatgatcaaatgcccaccgtgccaatgcagtcagtcaggctgggcggcggagccttgggtttcgctttcccgaagagtcggttcatcttgagcagccgcgaagaaacccaaacactagagcaaaaccagaaacggaagcagagtcactcccgcctcgacttccggcccctccgtgcgcaagcgcaatatgcctcctggcgtttcccgattctttttccggattttcagccgggtcttccggggatggagagcaaaaggacttggtgctctcggagagagcctgcagggggcggggtgttggtagaaggagtgggaggggttttactgtagcaaggcggggcctcagttgagtgggtggggcctggaggcaactaacgcggcatagggcgagggcggggccggcaggccggggcggggctgggaagtagtcgggcggggttgtgagacgccgcgctcagcttccatcgctgggcggtcaacaagtgcgggcctggctcagcgcgggggggcgcggagaccgcgaggcgaccgggagcggctgggttcccggctgcgcgcccttcggccaggccgggagccgcgccagtcggagcccccggcccagcgtggtccgcctccctctgggcgtccacctgcccggagtactgccagcgggcatgaccgacccaccaggggcgccgccgccggcgctcgcaggccgcggatgaagaagaaaacccggcgccgctcgacccggagcgaggagttgacccggagcgaggagttgaccctgagtgaggaagcgacctggagtgaagaggcgacccagagtgaggaggcgacccagggcgaagagatgaatcggagccaggaggtgacccgggacgaggagtcgacccggagcgaggaggtgaccagggaggaaatggcggcagctgggctcaccgtgactgtcacccacagtgagtgtcgggcgccaggtgggctccatgcaggtcccgaaagcccggcggggtctgtgggtttagtcacgtgtcctccagaagcgtgtgaccttgcgcttgtcctggcgtccggaagcgtgggttattggttgtgtccgtggaactgtcttttgtcccgggcttgtgtctgtacacttttccatgtggccggtgtattttgtctctggtcatttgtgcgatcctgggtgtttgagcttctccgtgctttacgtcgtgggcctggttgtgtttgtgtgcccgcgcagttattgtgccctttgtgtcaggcatatattgggccatgtggtctacgactgctccgtgtgtgataagtcagaacttcgtgcatgccggggtgctcctcgtgtgctgagtgccttctccgtgtgcgccgcttgagttggccgtgggtccaagcgttgtactctgggcaccctttgggtctgcctactgttggagttgacacaccaccaaatgaagtcagtacaccggagagctgagtccatgaggtttctctagaaccagctaggggaggcccaagggtctgggaatctggagacctggattctagatcctgcggttttgagtgaccttgggatggacggcttcttctaa

SEQ ID NO: 1326 - DNA, 6000 bp, Homo sapiens
ctcactgcagcctcaaacccctggactcaagtgatcctcctgtctcagactcccaacttgctgggacaataggcatgtgccatggtgccttccttgagttcacacttcgctccatacgctctgtgtcagctccaagtaaaagtcctatagtttcttcaaacttgactctttggttctgcctgttgcccatcaccattctccctgaccctgaagcaagaaatttagaatatttccctcttctctcaggtaaacaattgatagataggtctagcagctttctgcttagttatgctatcccaaattattcacttctctttgtggcaagtcctgagttccagtctcctggcagttccaagtctggattagattttttttgccttcactttgtttatctgccctctctctactcagccacctaactcacaataagggaacttcatatgctcataattctgctgtgtcacaatgcagggctggccacagccctctctcatcaccttaagggttgctgacctcatctgtctttttttcccctcagttctttagtctgaaccttcctttccagtcgaaggttttcccttgtgggagattttagttaaaaggttggttaaagggagagaggctcctgaactggaacagagtgattattcttaatatctacaagtttattttaacaaaagactcttgcaaattctactccaagtgaatgagacctgtcccaggcaccattttaaccagaccaagattccaccaccaaaacaaaaaacatattattaaggcagcacaaccgctcctaattcctagagcaaaagttctaaccaacaggagcaggagggtatgagaacaacaaaactggtaatcctgtaaaaccaataaagattgtatttgtttagagaggtgttttatcaatgcagaatctgggtccccagtttggtcttctaaacagaaacatgtataaaagacttcagtcatttgattctgaggatttctgatggaaaaagcaatttacctttttcccaattaacatgacccggcaaccatcttgtattccaagtgctgacaacggtgtttccatttccttcagagattttcctaaaaagaggagaaaggtaggccaagttgtaataattgtacaacactgaaaataaatttcagcaggatacaggaaatagacaagtgtgttcactaatgagaactggtatctttttagagggtgtcatgacccagtaatttcatttccagatatttatcctaaacaaataattggacatgcgactccacagtaactactatacgataatattcagtgcaaccttttcataatagtgagaaactggaaagagccaaatattcaggaatcagggaccaacgaaccacactacagaagactttaaagtcttcagtaggcattaaggtctacagtagccattaaagctcattttttgcaggaaaccccaataccacaatgaatgctgatgacacagtgttattatgaggggttttatccaggggaacattttctttttcatgcattcctctattttgaaacatgaatttctattgtctttataattcagaaataaaatatttttaaaaattaaagacaatatgttacactatgaaatataaataaaaatgcctcctattactaaattctttataatgactgacacccaatggggtaagtctttccccagtggataccagaatgatagattctcaggggggtgggaagacagagggcaggggccaggagggtgtgggtcctggcagaaatgagcatcatgcatccactgagcccgccacatccaggcctcaggtaagtttgctcaaaacctcctttgagtcagaacaatgggaggcactggaaacacagcagtatctccaccctcacggaggctgttattttaacagagaaatcagatgttaagcaactaagaaaatgattatttaatagtaatttcatagaagtgatgcaaaaatagcagggagtaccatggtaacatataatgggaagatgatctaacctagcgagggaagactgcccatgagcttcatcgaaaatggtgagatttctgccatcatcataagacttcaaatctgacacctgtccaggtgtttgagagtgtccaatacctagcaggtcctcaataaatatctgttgaagaactgaatgaataaacaaataaataaaaattgtcccagtttgaaaacagagtgactattaggaaaagttcagcagttttaaaactgtcctttggccataaggaaaagccggaaaagaaatgcttacccttggccaggtgcagtggctcacacctgtaatcccagcactttgggaggccgaggcgggtggatcacctgagatcaggagttcgagaccagcctggccaacatggtgaaaccctgtctctactaaaaatacaaaaattagccgggcatggtggtatgcacctgtaatcccagctacttgagaggctgaggcaggagaatcacttgaatccgggaggcggaggttgcagtgagcctagatcgtgccattgcactccagcctgggcgacaagagtgaaacttcgtctcaaaaaaaaaaaaagaaaaagaaagaaagaaaaagaaatgcttacccttaaatatgagtttctgaaaagactgtggaacccctatgacctcttcaacaacctgggccaggtcttggacaactggttcactgctgccctgctgggaggtaacatgaaggtcgtgcttctcattgcctggggagaaagaaaagcatttgacgaatatgattctttcacatacaccaatataggatgacactttatcacatttatttacccagccttcaaggcccagctcatatgccacctactccacagagcctgcccccatgccacccagctttcctctggtgacctcctcaagtatctctgtttcctctattataataactaacaatatgaatgatatctgctaacattttaagcatttcatgcataatctaatttaatcctcagataaaccccacgaagtagatctacctattacttcttatttcacagatgagcaaactgtgacttcaggcaagttaaggactgcctatggagactcaactgttggaatcagaagttgatatcagatctagctgattcccaagcccacctttttcatcacaagccatctgcttcctgtggcttgactgccctgtaccctgtattgtattggtctcgtctcgcttgctgtaatgggcaagtgactgttttcctccaagtctctcccactgaacacacttgagtgcatccatgatttgtgctaagtaaacagacaaatgcatacgaacagcagagcctttctttctgaagaagagacgccaattcttttccagggatgcggacagcaaggagggagcctgtgtacagtacattacaccaaggtttggttcccccaacagctccgtgaggtcagcaggagccagggttaccaaatctacttcacagaggagaaaccggattcttagaagaagccgtccatcccaaggtcactcaaaaccgcaggatctagaatccaggtctccagattcccagacccttgggcctcccctagctggttctagagaaacctcatggactcagctctccggtgtactgacttcatttggtggtgtgtcaactccaacagtaggcagacccaaagggtgcccagagtacaacgcttggacccacggccaactcaagcggcgcacacggagaaggcactcagcacacgaggagcaccccggcatgcacgaagttctgacttatcacacacggagcagtcgtagaccacatggcccaatatatgcctgacacaaagggcacaataactgcgcgggcacacaaacacaaccaggcccacgacgtaaagcacggagaagctcaaacacccaggatcgcacaaatgaccagagacaaaatacaccggccacatggaaaagtgtacagacacaagcccgggacaaaagacagttccacggacacaaccaataacccacgcttccggacgccaggacaagcgcaaggtcacacgcttctggaggacacgtgactaaacccacagaccccgccgggctttcgggacctgcatggagcccacctggcgcccgacactcactgtgggtgacagtcacggtgagcccagctgccgccatttcctccctggtcacctcctcgctccgggtcgactcctcgtcccgggtcacctcctggctccgattcatctcttcgccctgggtcgcctcctcactctgggtcgcctcttcactccaggtcgcttcctcactcagggtcaactcctcgctccgggtcaactcctcgctccgggtcgagcggcgccgggttttcttcttcatccgcggcctgcgagcgccggcggcggcgcccctggtgggtcggtcatgcccgctggcagtactccgggcaggtggacgcccagagggaggcggaccacgctgggccgggggctccgactggcgcggctcccggcctggccgaagggcgcgcagccgggaacccagccgctcccggtcgcctcgcggtctccgcgcccccccgcgctgagccaggcccgcacttgttgaccgcccagcgatggaagctgagcgcggcgtctcacaaccccgcccgactacttcccagccccgccccggcctgccggccccgccctcgccctatgccgcgttagttgcctccaggccccacccactcaactgaggccccgccttgctacagtaaaacccctcccactccttctaccaacaccccgccccctgcaggctctctccgagagcaccaagtccttttgctctccatccccggaagacccggctgaaaatccggaaaaagaatcgggaaacgccaggaggcatattgcgcttgcgcacggaggggccggaagtcgaggcgggagtgactctgcttccgtttctggttttgctctagtgtttgggtttcttcgcggctgctcaagatgaaccgactcttcgggaaagcgaaacccaaggctccgccgcccagcctgactgactgcattggcacggtgggcatttgatcatgcataagtaggctcaggacctctgacacacccgaccccgcccacccccagccccgggcccatattcttccacttcatttcgggtcctgggccccttacacgtcgtccctctctatctcaccttctccccttcatccctgttacccaagtcattcctaacgccacaaaccagggaacccctaaccccatcactgccttgccctgccagcacccaacccgttttgatgcccattgcccgtccactcgctctcgccttgatcctctcacctcacccagccctaggcccatacacccttcccacctcatcctgcctgatcccttacccttcttccatctgtcatccccagtccacatcaggactcagcttgatatcctaggtcaacatatctgtgccttcgtcctggatctcagtaacacaaaactcagaaccctagcccctcagattaagccaccatccccgatttagggaatggcattagatctacaatcagctggtttcacttggcactggcccatttcatgtgcctcttggaggaactctcagcctggctagtctctgattctagggaaattccaactcaactcagtgattctcaaattattttctgccccaacccacttgaaggctacctggtatatcagaatcggggcagtgtggcggggggtaagagaataatttataaagcccagggtttctggttgggaatacccttctttgtgaaccactgtttttcacccttccccttaagctcctcttttcttcctctgtattccttcctctctacctgccccttctggaataagtgtattgcagtaactaccagtgcatttgatattttcccctaaggtggacagtagagcagaatccattgacaagaagatttctcgattggatgctgagctagtgaagtataa

SEQ ID NO: 1327 - DNA, 6000 bp, Homo sapiens
atgagtgaccccaggtgagatcaggaaaaaacaacccaaatatctgggcaaagcccagcccaaatatctgactcacagaactctgagcaaataaaatgataattgttttaagccactaagttttgagggtaatttgctacacagcagtagataactgcaatatctctctttaaataataataattttttaaaacaagttttttagaaattattattattattattattattatttttagagatagggtctttggactcaaacttgtaggcacaagtgatcctctcatctcagcctcccaagtaactgggactataggtgtgagccaccatgcccagattaaaattattttttattaaactctattttctagagcaattttaggttcacagcaaaaataagtgaaaggtataaaaacttcccatatatcccctgcctctcacatgtatagcttcccccgttatctgtttttttttttttgtttttttttttttgagggatggtcttgctctgttgcccaggctggagtgcagtggtgtgatcatggttcactgcagcctcaacctgctgggctcaagtgatcctcccacctcagcctcccaactagctgggactacaggtgcgcaccaccacatgtggctaatttttacatttttttttttttgtagagaaagggtctccctgtgttgcccgggctagtctcaaacccctggggctcaagtgaccctcctgcctcagcctcccaaagcggtgggattacaggtataagccaccgagccaagcctaaatatgcttctgcgtaccacattccattttacaatgttgagcctctcctctttcttctgagataaacatcagaatcactctagacacttgggtttttttgttgttgttgtttattgtttgttttttgagacagtctcgctctgttgctcaggctggagtgcagtggtgcaatcttggctcactgcaacctccgcctcccgagttcaagcaattcccatgcctcagcctcccaaatagctgggagtacaggcgcgcgccaccacgcccggctaatttttttgtatgtttagtagagaggaggtttcaccatgttggccaggttggtctcgaactcctgacctcgagtgatccacccacctcagactcccaaagcgctggggttacaggcatgagccaccatgcccagcccagtttagacactttaaaatatatagatacctgagccccatcccagatctatagaaaaccaaaaaacaacaagaaataactcccaggttttaggaaaggcagacataacaacttcagaaaagttccctaggtgattatgattgcatgccactgatttatatctatcaaaattacaaatgcaaatgcactgatccagcaattctacctctaggaacctatccttatccttcagataatacgtacaagtacaaaatgacgttaactataatgttattcattacagcacagcttgtaatagcaaagtcatggaatagagactggtgaaataaattatgatagtccatttaatgaaataatgctatgagacaattacaaagagtaagtaaactgtaaaatgttatttaaaaaagaaagctgtccaatatattgttaataaagcaaggtacagaacagtttgtaaaagagagagataaatgatctataataaatctatatctttgcttatcagacaaaaaacgtcacttgcaggatgcacaataatagtggtcttgaggaggtgaggggaagtaggtggtagagggtgattatgggaaggaaactactgtatacttttaaatgctggtagttattattacctttcctattgtcatttctatgtcactggtgtctctatcacccagggcaagacctaaaacagtttattttttaaattttgaaactatgtgactgtattatttattttaaacatatatttctaaataaaaaattatatatatttctaatttcacctcccttcctccctctcagcctccccaaattgacctgatacaattgtttcttaagatcttggtgtctttctagccttttaaaaaattgtatataacactgtactcataactatattgcaatctatgttttaatttaacataaacattttcatatgctatatgttacagccataaaaacaatccatactattataaatatttgactagattaatacctcagggaaatgtgacttctctctaaactcctgcagagttttgatgataaaactgatacggcatttatgacatacatactcatttttaaaaaaaattattgccagtcttgttccagagataatgtaagatggttctgccttgtactactgtgtgaattattaaagacaaaagcagtatgatcccactcagtcaagcattgtgctagataggtgtgcaacaaatattttaagtgaatagtatctgcttagattctgttcatttaaaatatttagaaatgggcctggcacagtggctcatgcctgtaatcccagcactttgggaggccaaggccaggggatcacttgaggtcaggagtttgagaacagtctggccaacatggcaaaaccctgtctctactaaaaacgcaaaaagtagtcaggcatggtggtgtgcgcctgtaatcccagctactcaggaggctgaggtaggagaatcacttgaacccaggaggcagagggtgcagtgagctgagattgtgccattgcactccaacctgggtgacagagcaagactctgtcacccccccaaaaaaaaaaatttttttagaaatgttccattatcggccgggcgtgggggctcatgcctataatcccagcactttggcaggccaaggtgggtggatcacgaggtcaggagatcgagaccatcctggccaacatggtgaaaccgtctctactaaaaatacaaaaattagctgggtgtggtggcaagtgcctgtaatcccagctactcaggaggctgagtttcacctgaacctgggaggtggagggtgcagtaagccgagatcgtgtcactgcactccagtctggcaatagagcgagactctattaaaaaaaaaaaaaagttccattatgtctactgttttgcccaaggcaacgaagtgattaaaagattccatgacacctgcttatgtggccatagagccattttctctgagtttcctaattctttacgagtcccatcacccaaagtaatggcaacatcctcagggcccttacgactttaagaagccaaatatccacaatgttaccaacttcactctgaacacttcatatggtttaaaaaagcattttatataaaaggctaattccattatgtcagcagatagtccacatccatactactttgatgatctgattaaactaaaatgtattgagttctgttttatgccaagcactatgttagatgctttatataaaaaatgttatttattgttaagtcagaattctgtttttaaaaactctgttgaagcaaactcctaaagtaaaaatagtgcttactggctgggcgcggtggctcatgcctgtaatcccagcactttgggaggctgaggcgagtggatcacaaggtcaggagttcgagaccagcctggccagcctggtgaaaccccccgtctctattaaaaatacaaaaattggccgggcggctgagcacggtggctcacgcttgtaatcccagcactttgggaggctgaggcgggtggatcatctgaggtcaggagttcaagaccagcctggccaaaatagtgaaacgccgtctctgctaaaaatacaaaacaattagctgggcgtggttggcagacacccataatcccagctactcgggaggctgaggcaggagaatcacttgtaccgggaaagtggaggttgcggtgagctgagatcgcgccattgcactccagtctgggcaacaagagtgaaactctgtctcaaaaaaaaaaaagaaaaaaaaattggccaggcatggtggcacgcgcctgtaatcccagctactctggaggctgaggtaggagaatcacttgaccgtgggaggcggacattgcagtgagccaagatcacgccactgcactccagcctgggcgacagaaggagactgtcttaaaaaaaaaaaaaagtgcttatttactggttgttgtttttagattgacaatttcaatgtaagttacagtagtacctgtcctccaatttagctttctgccatttcagttacccttagacaaccagtccaaaaatattaagtgaaaaattccagaaaggaacaatttgtaagatttaaattgtgcaccattctgagtagcacgattaaaatctctcacaatactggctcccctttcctggaatgtcaatcatcccactgtccagcctatccacactgcataaactacccactcattagtcacttagtagccattttggttaccagatcaactgtggggtattgcaatgcttgtgttcatgtaaccttattttacttaaataacggccccaaagcaaaagagtagtaatgttggcaattcagatatgccaaagagaagccatagtgcttcctttaagtgaaagaatgaaagttctagacttaggaaaatgcataacctataataggggttggtactatccatggtttcaggcatccaccgggggtcttggaatatatcctccttgaataagggggcatactaccatacccttaaaatcttaattttttttaattcaaattgtattattggatttatttttcagtagttaggggagcatgggagcaaaggattgctttaagaatcctttcctcaacatgtagaagcctgattagaaaattagggaggagaacaaacaagtctaaagctggtggtttaacaagataaatacatgaataatgcagcctgggcaacatagtgagaccccgcccctaaaaaaaagacatgaataatgaacatataggtaaccctcagctataagttgtaaaagttacatagaaataggctatagaagagtagaatcgtgtcgcggctcgagagcgagactcccgtcttggagccagcccagcccaacccagcccaacccagcttgacctagccctgacaggtccatcgtggtgcacgcaaaccacctcccagccacgcgctccctcctgctcctcagcgccttctgcctcctggcggtggccttggcgaccgaggtgaagaaacctgcagccacagcagctcctggcaccgcagagaagctgagccccaaggcagccacgctggccgaacacagcgccggcctggccttcagcctgtaccaggccatggccaaggaccaggcggtggagaacatcctggtgtcgcccgtggtggtggcctcgtcgttggggctcgtgtcgctgggcggcaaggcgaccacggcgtcggaggccaaggcagtgctgagtgccaagcagctgagcgacgaggaggtgcacgccggcgtgggcgagccgctgcgttcactcagcaactccaccgcgcgcaacgtgacctggaagctgtgcagtcgcctgtagggacccagctcagtgagtttcgctgatgacttcgtgcgcagcagcaagcagcactacaactgcgagcactccaagatcaatttccatgacaagcgcagtgcgctgcagtccatccacgagtgggccgtgcagaccaccgacggcaagctgcccaaggtcaccaaggacatggagtgcatggatggcgccctgcttgtcaacaccatgttcttcaagccacactggaatgagaaattccaccacaagatggtggaaaaccgtggcttcatggtgactcggttctataccgtgggtgtcatggtgatgcaccagacaggcctctacaactactatgacaatgagaaggaaaagctgcaaatcgtggagatgcccctggcccacaagctctccagcctcatcatcctcatgccccaccacgtggagcccctcgaggccttaaaaagctggtaaccaaagagcagctga

SEQ ID NO: 1328 - DNA, 6000 bp, Homo sapiens
agagcctaggaggttcgggacctaggtaccaaaaaaagaatttacaaatacatggctatgctgtttgtttcaatattttcatcaaattaatcagagtaactgtaaaaagccctcagaaatgtaactttaggtacaggaagagctctccaaattttccctctgacctgttctccatattctaatatccctttagcagaaacagtgtttcatgccgcgttgtcaattaagcatctatatatactgtgccagctatactgtgcaagacttttgacaactattgtttctaaagctcaaaacaacctttcaagagaagcattattatatctaatttacaaggacactgatattatttcaaaaggttaaaatacttgcataagggcatagctggcctgtaaaggatgggatttcaatccaagtaagtctaactccaaagtctataatttttgtccctttcatagctctgttcaccatgaaagagtagggcttaggacacaaatggccctgagagaggacagacaagatttataaaatcatttccagtttcaaaattcccagtccttttttttttttttttttttttttttttgacaatgtctctctgtgtcatccagactggagggcaatggtatgatcacagctcactgcagcctcaagagctcactgcatcccttctgggctcaaggaattttcctgtcttagcctcctgggtagctaggactacaagcaggagccatcacatctggctaaatttaaaaaacactttttttgtagagatggggtcttgctatgctgaccaagctagtcttgaactcctggccttaagtgaccttcccactttggcctcccaaagtgctgggattacaggtgcaatctactgtgcctggccccaaattcccagtctttaatctatattcctttggaggttaagatgtctagctgggatcatttccaccaaaaaggttttagttggggggagagggccgtagatgttaaatcctggtatccgaagaagactctgaaggaggggtaaaatgtagcctcaggctcctaatagcacccatctcaaaagggtttctatgcctcctctgctcttttctgggaagtaggaacctaaaaccacatgttccacttaacttagggcactagtgtccagaaaatttgcccagaccctcctccagatgaggaggaaagccaactgtttgcctgcccacaagcaattctatgtgactgcaattctatgtgactactccctcacctcccacatcatcatcatcttttttccaatttgccagtttctttcttcccttttggagtggacagaaatgaggcacccacccatgagtaaagctctttcttgtaagaacaataacaaatggaagagaagaaaaaagaaagaaatgcaaaagaaaagccccaactaccatgaataaattgagacaaagaaaatattccctcaaatgcacctttccctggacatctgccactccattcttgcagagacgaagctgctgagtcattttgttatttttgctattggctgagggaggaaacaggagattttacctgtaatggcataaatattggcttctaggataaggccaaagtcagacaaggttgggacaaaaatcattcttagtgaaggggatttgttaagcagcctattagtgccatctgctgtacaattctagaaagctaactcggggaatttgtctgttgtgcgtatcccatgcgacagacagtgtgaaggattgacagatagatatgaagctgaatactaccaagcaccaacttcctagagatttacaggctagtgaaagtggaagacattccaacagacaagttacagtgtgttttgtgcaacgtaagatggaaaggcagcaaagaagcatctttaggttaacaaggtaccccataaggattctgatgggtcactagtttaccaggcagaagggaggcggatgcaaggcactgccagcaaagggaggagtgtgggcaacaccctcaagcacaaaatgacatctcattggtaaacagcttagtttatattctgtaggcaatgaagcctctgactggttttaggcaagggtataatttggtcagactgacattttacaaagatattctagctgcaagcaagctggggaacgaattaggacagattggaggcagagagattaaccagttacaagtctattgcaacagaccagttaacaaatgattccagttagatcaaggcagaggctgtgagaaaggaaaggaagggatgaatctgagagatatttcaaagtaaaatggacaatagtgatatttcattgtctaagggacagagagatgtttcataagccaagggaaagagaaaggctttggtttgagtgcctgggtggaggagggggtgcaagtgaagcatttgtttgggacaagttgaatttgaagtgctatagtctatccataagataaatgaacagatgggtctaaagttcagtgatcatctcatcctatctcttcatttcccaaggtgggaatttacttttttaaaattatttttattaaaacaatttttttctcctcccttctctaccaagaccacggtgaaaattttctattagagcaagatattgctcctaccataggtacctctgcagctcacattccctccaatttaggtaagtcaagctgtccaacctgcccctgcatctgtctggtattccaagcattttcatcctcctttagtcagaaacacagaaaagcatggctgtctatgcagtcagaaaggcctagctattgaagttaatagagcaagatacttagagcaagatacttaacttcctcatttgtaaaatgaagttaacacctactttgcatggttgttgtggagtttataaatgacatatatagagggtctgacattatcagaggtactaaatatatgagttactgttacccgtgtgtcataaaagatcatcaaaaagcttctctgttttaaagaaatgacttttcatcttgtctgttaaactgctcaacactgttcaccacagtatatatattccttataaggtcccacagcataaattccttttaatatagaaactagaaaaataatttatcttttgaagaatggatttgtttccttattagtaagaattaccttttttcccttaactgactaattttgggcaaaattgggtactcagttacaaaaagtacaccaacgcactgactagtgtatttgcctgttcttattataagaataatagctacctttttttttttgagacggagtctccctctgtcgcccaggctggagtgcagtggtgcgatctctgctctctgcaaactccgcctcccgggttcgtgccattctcctgcctcagcctcccgagtagctgggaccacaggcgcccgccaccacgcccggctaattttttgtgtttttagtagagacggggtttcaccgtgtcagccaggatggtctcgatctcctgacctcgtgatccgcccgcctcggcctcccaaagggctaggattacaggcgtgagccaccgcgcccggccgctaccattttttaagaagttactactcgccaggcgttgtgtcaagtgctttaccttcattatttcacttaatcttcacaacaacccgctgaggcattactgccatttttcagaagagtagaaagggaactatagctcagagatgtctgggtaagtgactcaaatgtaggtctgcctgactcctaacatcaatgatcttaaccttaactctataatagcgttttacatttgacaatttgattgcattcagtttttttttgttttgttttgtttttgagacggagtctcgctctgtcgcccaggctggagtgcagtggcgcgacctccgctcactgcaagctccgcctcctgggttcatgccattctcctgcctcagcctcccgagtagcagggactatacgtgcccgccacgacgcctggctaacttttgtattttgtttagtagagacggggtttcaccgtgttagccaggatggtctcgatctcctgacctcgtgatccgcccgccttggcctcccaaaatgctgggattacaggcgtgagccaccgcacccggcctgcattgtttacgctgtcccttttttgtttgtttgtttaaggcggtggggctcttgttcgactttctttacttctgctataactgccacgatattatccattcaataactgaagcaattagaaaacataaaatctcttttggaaagcaggcggggtttaatgggtagcaacaagtgaaactgaggcccagggaggggaaggttcggcgcctgggcctctgggccctaaacctggacctctcccgcctctgggatttggacgacccaccctatccccactccgacggggacaagcaaggctcagagtcagggaacctcccttctcccggtgcagacaggaaaactgaggtcctgagagcggatgggacctggcctgcccacacctcactgccaacttagaggagggcgcatccctctcgggccctgcagcgaccagaggtttgccagaggcagattcccatcgctccaaggctcatttcctccactgagaactaaaatcaagtgggcccttaagggtactcacccgaagcagaaggaggtaggaggcggaccttggacggaaactgaagtacaccggccaatcagaagagcctggttacgcttgggcccatcaatagaattcggcagaaggatcttcgacccgcctcaaaggtgcgcgtctcacactgaaacgtcgcgagatcttccctcaagcggaacgattggctgaaggtcggaaattgagagttacgcccacggtttcttcagacctctgattggtcttccagaggagaagtcaacgaacgtcaaccgattccttggatgcccattggtgggcggtgcgggactggcgacgcgcgggccacagcgcgggcgttcgaactggcgcttggcggcgttgccatggagatgcggcctggccgccgccggtggctcccgggttgacgggactgttaggttgcgggctttggggctcactcccgacggcattgtcttctcctcttctcagacagggcagaccgaggagtttggaccgaggtgagaaagggcggggagaatagaggaggggtaggtctggtccggaaccgtggcgcctgcccgcggacacgggtgcgcgtgacgtcggctgagcgcgggaggaaactggcagttgtgagggaaccgagagttggcccctcttggctcttcctaaagttcacctactttcctatctttcatccccatatctctgccttttcttcagcaattatcttgaacgccacttctctcactttgggagactaaactcttgagtcccaaagccttcttgcttttgaaccgataagcctgaccggcacctcttttagggcatttctattcgcccttgggttgtttacttccgggaagcccgttcgcttcccttttcccataaaattttgaagcctttgaggtaaggcaagcatcgttcacaatgtcttgcacatagtagattttcaggaaatatttgttgagttgaatttaatttacaagaaatagattggattcctcttcatgccctgccttgttgtctctctgcttcagagacgattttttatttcgaggctagggggaggccaccctaatcttcaatgcaaaaggacctaaaagtccacacacagtccacagctggcctttctactctttgtgaaaggctaaacttttttggattggttgctgcaactcttcctgcatctgtggcttttagccttggtctcccaataattttattagactccttttagtctttgcttaaaataaaccattctgttgctgtatgccaagataatttatctccctttagcttcttagtgaccggcagctattgtcacattttaagtgtgctttggaaaatgttttaaagcatcttctttgtacttgtattctacaagtagaga

SEQ ID NO: 1329 - DNA, 6000 bp, Homo sapiens
tgtagagccagatcactcttttgaaagcagttataacaatgctgctcccttattaaaaacccttcaatggtatcttatcatctacacatagtacaaagtccaaactcctaagcatgacccacaaatccttctgtaatctagccccttcctcactctacagtttagtcaacttcttagaccgttttatttctctgtgcattcattcacattgtgctcttaagtggcctcctccactatcatcaaacttccctttacctgtctacctcttactgattataacaacaaatgaggtcttttctggtctcccccaatgtgatcagatgtcccttccgtgtctgcatcataccttttgcatatctctattattacagttaattatattaataattattatatgataattatttgattatgtctatttcccctaatagagtataatttctttgtggtcaaggaatgtgtcttgcccaggcagagtggctcacacctgtaatcccagcactttgggaggctgaggcagaaagatcacttgagcccaggagtttaagaccagcctgggcaacatatggagaacccatctctataaataagtaaataaataaaaattaattgggcatggtggcacacacctgtggtcccagctacttgggaggctgagatgggaggatcacttgagcccaggaggttgaggctgcagtgaaccatgatgacaccactgcactccagcctgggcagtagggtgagacttcgtctcaaaaaaaaaaaaaaagcaatatgtcttattagtctttttatacccaggttctaaaacagtgcctggggccaggcacggtggctcatgcctgtaatcccagaactttgggaggctgaggtgggtggatcacttgaggccaaaagttcgagaccagcctggtcaacatggtgaaaccccatctccacaaaaaatacagaaattagctgggaatgttggcacacactttgtaatcccagctactcaggaggctgacatgagaatcgctggaacctgggaggaagaggttgcagtgagccaagattgcgccactgcactccagcctgggcaacagagtaagactatctcagaaaaaaatataaataaataaataaaagagtgattggaaataatattcaataattgtttaatgaataaatatccctacagtatattaaaactctataaaagcatttgatatcgtttgtggtaacgggtggtagaaactatttatcagggtaatttgattactcaggaaaattgtgacagagatgctggtgccctgagtcactgctcctggacaccaaaattatgcaagtttgtattactcaaatgaattgatatggacacagatatggttacagttccaagaggaaactttatccaatcttcaagaaatattttttgagagacttgtatgagataggccctgttttatgcaccaggaatataagtgaacaaaacagacaaggtcagccaggcacagtggctcatgcctgttatcccaacactttaggaggctgagggaggattgcttgagcccaggagtttgagatgagcctggacaacatagtgaggccttgtctctacaaataaacaaaattagctgggcatggtggtacatgcctgtggtcccagctacttggggggctgaggtgggaggattgcttgggcctgggagtcagaggctacagtgagccatgatcacaccactgcagttcagtgtgggcaacagggcgacagagtaagagcctgtctcaagaaaaccccccaaaaaacagataaggtccctgccctcatgacactattattttaatgggaagagataattaataatcaataagcggtagttttagatgatgataatcactaccgaagaataaagcccagtgcagggcttactttacattggatgatcagagaaggcttcattcagaagggaatatttgaggtgaaacctgaaataacatggagtcacttatgtaaaaatcaggaggaagagggttccacgtgagcacattagcccaaaggtggaaatgagcatggcaaaatcaagccatcaaacacggacaggttggctggcatagtaggtgagaaggagaatagtatgagaagaggagagaaaggtaggggccagattatgtagggtgtactgggccacataaaagtgtctgaattttacttttaagtgaagtaggaagtcattagaggatcttaagtggagaaagtatatgctatgattcgtcttcaaagttcactctcccagttctgtgaggaaatggatcacagcaggtgggcaaaagtggaaacagggagatcatttaggaagctactgcactgaactgacaaaaaaaaatgctgacttggaaaaaatgtttcctttcatgagggttaattagaataatgtaaattaactgctacattcagtgtctgatatataaacactcaacaatatattatactattattattagtttatacctacagaaaactcttcttattcaacacgatatgaacatcaaaacccttgagacagtaacttgggaggtatacaatgaccatacactcaaggtttaagaagtagaactctattatttatttaacaaaatgtgttgaggatctacactgtgcaaattataaactggtttgctgagccagcatagggaaactggattaatatatcaggcatcatagaatactagatctggaagggatctagaagagttcagcccctcactttacgacaaaagagcagcccagagaaagaaactgtggttctccctaaactaaaaactgagaggctcataccttaggttgccccaaggacacactctgaataactaaagattttcattaacaatataaaaccacaaattttaaataaaatgctatcttagcagtaatgtgctacactaagaaaaatgtaatatgcatataaagccctggatacagtgctttgtacggggtgaacactcaataaatggtaactactactttcagcagctaaaaaaaaagtctgtatggtctttggaaggctgagagtgtgtggtctacctgacatcaactacttgacttgagagtagagccacaggaattttaatctaattcaattctttgattttccagatggaaaaaatgaggtctaaaggggctagattcaggcgttcaaggctgcggtgagctattatcatgctagtgcactacagcctgggtgacagagcaagacattttctctaataaaaaaaaaataataataataataaagggactaaatgacttgcaaagccacccacagtgaattagagacagagacagagccaaagccaaacccacatgtagtgggtttccactacatgtcacagctataaggtagtgtttcaaacttttataaaagggtaacaagaacatagctgctgtactgaactttttcactccttttattaaggccaccagtgagctatgaatttgatataaggagcaatcacaccaacaatcaggctgtgaatatataatccatgagttaacaacgaaacagtcttaggaacgcaattctatcatagacacctgatgaatagatggagttcacctgagcagctgttatatgcacttcaatagagagactacaaagcctctctacttgtagaatacaagtacaaagaagatgctttaaaacattttccaaagcacacttaaaatgtgacaatagctgccggtcactaagaagctaaagggagataaattatcttggcatacagcaacagaatggtttattttaagcaaagactaaaaggagtctaataaaattattgggagaccaaggctaaaagccacagatgcaggaagagttgcagcaaccaatccaaaaaagtttagcctttcacaaagagtagaaaggccagctgtggactgtgtgtggacttttaggtccttttgcattgaagattagggtggcctccccctagcctcgaaataaaaaatcgtctctgaagcagagagacaacaaggcagggcatgaagaggaatccaatctatttcttgtaaattaaattcaactcaacaaatatttcctgaaaatctactatgtgcaagacattgtgaacgatgcttgccttacctcaaaggcttcaaaattttatgggaaaagggaagcgaacgggcttcccggaagtaaacaacccaagggcgaatagaaatgccctaaaagaggtgccggtcaggcttatcggttcaaaagcaagaaggctttgggactcaagagtttagtctcccaaagtgagagaagtggcgttcaagataattgctgaagaaaaggcagagatatggggatgaaagataggaaagtaggtgaactttaggaagagccaagaggggccaactctcggttccctcacaactgccagtttcctcccgcgctcagccgacgtcacgcgcacccgtgtccgcgggcaggcgccacggttccggaccagacctacccctcctctattctccccgccctttctcacctcggtccaaactcctcggtctgccctgtctgagaagaggagaagacaatgccgtcgggagtgagccccaaagcccgcaacctaacagtcccgtcaacccgggagccaccggcggcggccaggccgcatctccatggcaacgccgccaagcgccagttcgaacgcccgcgctgtggcccgcgcgtcgccagtcccgcaccgcccaccaatgggcatccaaggaatcggttgacgttcgttgacttctcctctggaagaccaatcagaggtctgaagaaaccgtgggcgtaactctcaatttccgaccttcagccaatcgttccgcttgagggaagatctcgcgacgtttcagtgtgagacgcgcacctttgaggcgggtcgaagatccttctgccgaattctattgatgggcccaagcgtaaccaggctcttctgattggccggtgtacttcagtttccgtccaaggtccgcctcctacctccttctgcttcgggtgagtacccttaagggcccacttgattttagttctcagtggaggaaatgagccttggagcgatgggaatctgcctctggcaaacctctggtcgctgcagggcccgagagggatgcgccctcctctaagttggcagtgaggtgtgggcaggccaggtcccatccgctctcaggacctcagttttcctgtctgcaccgggagaagggaggttccctgactctgagccttgcttgtccccgtcggagtggggatagggtgggtcgtccaaatcccagaggcgggagaggtccaggtttagggcccagaggcccaggcgccgaaccttcccctccctgggcctcagtttcacttgttgctacccattaaaccccgcctgctttccaaaagagattttatgttttctaattgcttcagttattgaatggataatatcgtggcagttatagcagaagtaaagaaagtcgaacaagagccccaccgccttaaacaaacaaacaaaaaagggacagcgtaaacaatgcaggccgggtgcggtggctcacgcctgtaatcccagcattttgggaggccaaggcgggcggatcacgaggtcaggagatcgagaccatcctggctaacacggtgaaaccccgtctctactaaacaaaatacaaaagttagccaggcgtcgtggcgggcacgtatagtccctgctactcgggaggctgaggcaggagaatggcatgaacccaggaggcggagcttgcagtgagcggaggtcgcgccactgcactccagcctgggcgacagagcgagactccgtctcaaaaacaaaacaaaacaaaaaaaaactgaatgcaatcaaattgtcaaatgtaaaacgctattatagagttaaggttaagatcattgatgttaggagtcaggcagacctacatttgagtcacttacccagacatctctgagctatagttccctttctactcttctgaaaaatggcagtaatgcctca

SEQ ID NO: 1330 - DNA, 6000 bp, Homo sapiens
ctgtcctctctcagggccatttgtgtcctaagccctactctttcatggtgaacagagctatgaaagggacaaaaattatagactttggagttagacttacttggattgaaatcccatcctttacaggccagctatgcccttatgcaagtattttaaccttttgaaataatatcagtgtccttgtaaattagatataataatgcttctcttgaaaggttgttttgagctttagaaacaatagttgtcaaaagtcttgcacagtatagctggcacagtatatatagatgcttaattgacaacgcggcatgaaacactgtttctgctaaagggatattagaatatggagaacaggtcagagggaaaatttggagagctcttcctgtacctaaagttacatttctgagggctttttacagttactctgattaatttgatgaaaatattgaaacaaacagcatagccatgtatttgtaaattctttttttggtacctaggtcccgaacctcctaggctctgagggaattgtatttatggagaaagccgagaatatttttccttagcttctagaaccttctaatgacattgaaggtttttttgttcaggttttttctaaccacctcaggcactctgccacttttttgaagtgtgaattgcctgctgtcagcctggagttctcacctccgcaatcctggctgcaggcatatttgcatattggatgctgtgttccttaaccccctgaggtttgaatccacttggagtctgtgtgtgaaagctggctactttcaaacccatgaacagtttcagctttgtggtctccagaaaaacagaaaacccccaacaatagttccattcacttttatgtaaatggcactcttcaggaaaacactgggctatttcccagggccccagaacatactcaaacatttgtttgagtgggaggtggggagagagttcttttgagtcaatgaacatctgttcagaactgctgtgctgggtcccaagaaaacagagcttataatctgtctcttccctgccagaggtaccagcagagatttactatactaggtatatgtgcttgtggtggcattgtactgtgtcagtttagctaagctggattcccagtatccttcctatctgcttccaggtgagggttgtccacaagaaaatttcgtgagagatttggaaagctgaattgaagtagcagccagtacactgtgaaggacagagcagggtctgtacgctgtgaaggacagagcagggtaccaggcatagtggcagtacctgtactttctctctgatctggctcaccttgttggtgaaggtcatcacacagcccccagcacccctagctcctactgaatttcctccttcagctcctctgagtcctgggccatgtgtgcagtcagctctgtagcagagggctccggcttctccagatcacctgagtcactgagcttgggaccagtgaaaggaagttgtgggtttcagtttgtcctcatgagttccagttgtccttgtagatcccagtttgttctcagaggttccagtttgtctttgttctcttccacctcacatccagttttcttcccaactgctggcctcacagacttcgggcccaacaccaggtgcagaggcagcagagttgcatggatttatccaccaacttccaaagatacacagtgtctactccttataataaatctttagttttctgtcactcatagcgtttgcttccctgattgaactttaaatttgttcaagccgtgttaaggatgcagagcatggaagtgattagaagccagaaagcttcacagaggaggtgacatctgagctgcttctgacgagtaggaggttgtgtgtatagagtgggtaggaggaattctagagaatagctggctcaagccaagcaattgaaagagcagtgaggagttctgtatttctagaagaactgttctttccatgggtccagaatatagatggagaatgagcatctgatcctagctcttctggcgccattgagattaactgttagctgatgtggttcttagatgtggtcatccctaatacactggcatccactgaaatacattcttgctagggtacacccttgtcactaccctaagattcctcccccaccccaccgctgctttcctctccccagtggttccatgtggctaacccaggcttgtctttcttggctccccatgcaggcatctttgcttgtccatgttgtgttgatggtggcagtggtatggagttcctgtcttaggcagggcactgtgccctctagtcttggatccctaagcttatttaggggttctaacattgattccatgggaccttctagtcttggatccctaagcttatttaggggttctaacattcattccatgggaccctctagtcttggatccctaagcttatttaggggttctaacattccatgggacctgaggcaggagcaaggtaccccacatctataactttctaatgctttttgagcatctttatagggagggcatgggatcagctacctgtttctgcctcaaccacggaccaataatatgagatctttgttcaccagttctacagtgatggggtgcttccttttggcttctggaatggggtaagttcttgacataaatagggagtccaggaaaatagaacaatgaaatagaatagaaaaatgaaagcctaccactttatatatgaatttgtaaactcaaacagggatttcattatacatgctattcagaactgtctccttttcatgtgtctaaaaatttttcttacaagcagtacattaggcttgacctaatttttttttctttttcttttgtttttgagacaaggtctcactgtattgcccaggctggagtgcattggtgcaaacatggctcactgtagcctcaaccttccaggctcaagcaatcttcccacgttggcctcccaagtagctggaagtacaggtgcatgccaccatacctggctaattttttttctattttttgagagacaaggtctcactgtgttgtccggactggtctcaaactcctgggctcaggcaatcctcctgcctcagcctcccagaatgctgggattaaaggctcgagccactgaacccagcctcgacctcattttttttaatgacttcatgctatttcatcatatagatatactgtactttttgcctattcccatattgatggatatttgtttctggctcttttcctttttgatattgcaaacaaagttgtagtgaacattgttatatgtacatcttttttttttttttttttttgagacagagtttcgctcttgttgcccaggctggaattcagtggccccgtctcggctcaccacaacctccacctcccgggttcaagtgattcttctgcctcagcctcccaagtagctgggattacaggcgtgtgccatcacgcctggataatttttgtatttttagtagagacggggtttctccatgttagtcaggctggtcttgaactcctgacctcaggtgatctacccgccttggcctcccaaagtgctgggattacaggcatgagccactgtgcccggcccgttgtgtgtacatcttaaacctatatttcttatgtgagagtggctagaaatggaattgctggctcttagggaatgtgcattttatgttttgataattattatcaaatggccctcctaaggggatatgctaatttacttttctaccaacagtatatgagagcacagaccatttcagaaatcccctttgagattatttccagtccttaaaaacttttgttacaggtttagaaaagcttggaaaggtcttggtgttgggtgtttggtttttggtgagaaaccgctattctctagagtaacattaccatctgttggcagtcttgagaattgccctggagtaggtttctgtttgggcctgatttttatgcctttgatagctgcaaattcatcttgattgagcaccagcaaagggactgtggaggatagcagctcctgctccagctgccctctctgcatcagctgtgcaacccccgggcaccagcaatgtcaggcaatggtggcatgtgcctgtattgccagctgctcaggaggctaaggggggaggaccacttctttttttgagacagagtctcactctgtcgccaagctggagtgcagtggcccgatctcggctcaccacaaccgtaacctccgcctcccgggttcaagcaattctcctgcctcagcctcccgagtagctgggattacaggtgtgtgccaccacacccggctaatttttgtatttttagtagagacagggtttcaccatgttggccaggatggtctcaatctcttgacctcgtgatccacccagggagaggaccacttctgtttgggagtttgaggccagtctaggcaacatagtaagtccctgtttcttaaaaaaaaaaaaaaaaaaaaaaaaaaggataaaataaaagactaaaaaaaatcagactgggcatggtggctcatgtctataatcccaacacattgggaggctgaggtaggtggatcacttcagcccagaagttcaggatcagcctgggcaatatagtgagaccctgtctctaaaaaaaaaaaaaaaaaaaaaaaaaaaaaattggccaggcatggtggtggcatgcctgtagtcccagctacttgagaggttgaggtgggaggtttgcttgagcctgggaggtcaaggctgcagtgagccatgatcacaccattgcactccagcctggtcaacagtgctagaccctgtctcaaaaaaaaaaaaaaactcaacgaaatatttttttctatatgaagttactctctgtagatgacctctctgcattgtcagaaaccacactgctggggggttctgtgcttcaggggctcaggatatgggctgggggaaatggggttacaggtttgacgataaaacttgtactgcctctctcccattcccaacatctctcttgtttcagtgcgtttgcttctgaggatctccagtgtcacaacaaacacatgccagccctgttttacagggagccctggaggagttgggatagaggccacattgactgagggtagttgccagggtcctgcagttatacacaaaggtcagtctctgattcctggatgccttccattggtcctgggcatgctgcctttttctgtgggctatgagatcacagttagctagtctgcattactgtccatcaccagattgctaccccccagtatggagcttcctattttgtgtaacttcccaatattctgtatcttctttgttaagtccttaggataagaccatggccttgagagcatgtggcttgatcatcttccgaagatgcctcattcccaaagtggacaacaatgcaattgagtttttactgctgcaggcatcagatggcattcatcactggactcctcccaaaggtagaggccagaggggccagctcttgggaaactgccaaccactgctcagaaatctaccctgccaggccctccccaaggcttaattcccagtgactgtgtagcaaaaaggggtagggaaggtaggagctcttgaccctttctacatacaaggtctccagaccaggccagagtagagctgagaattctgtgactgaattccagggtagaaacagcacctggtgtttttatgagtatcattcgccagctctccaacctctgtggtgaatggctgggtaagagaaaaaacagtgggcagggaattggggaccttgaggttgactgagctatgtgcccacctctcagctttgagtttttcatctgtcaaacaagggcttgactagaaaatcctgttttcagccaggcacagtggcacacgcctataatcccagcacttttggaggtcgaggtgggcagattgcttgagcccaggagctcgagaccagcctgggcaaaatggcaaaaccatgtctctacaaaaaatacaaaaattagccaggtgtggtggtgcac

SEQ ID NO: 1331 - DNA, 6000 bp, Homo sapiens
cttgcttaggtcctacttctctccttcatctaagtcacctaatcctcttgaagcccttcacagtgattgggtccaggggtctttttcctttaccctacgtcctgtctagagtgaccaaccaccctggttttcctgagactgaaaggtttcccagagcttgagacttttttagtgctggcattaggacaatcctgtgctggctgagatggttggtcaccctaggcctgtctcttacctctggactagagatgagccctgtttatgtttgtgtactgtcccacaggtcgctttgacagggaggtagatattggaattcctgatgctacaggacgcttagagattcttcagatccataccaagaacatgaagctggcagatgatgtggacctggaacaggtgaagtgatgatgatggctgaccaggcgttacagtgtctctaggcagttgctgggaactggctagagacataaggttaagatgtgaggagatgggttttgatttctggacaggggaaaggaagtaatctgagattgaatccaggaaatgggagttggcatttttcatagttgacgctgcatttagagtaaatcagaattgttggagcagccttatttctaggtcccaagtccagaattaagtacttaaaacccagcccataaaggtattgatagtatatattcaaggaaatgagaggacccagggatagcagtcaggggaaggattctattgtctctgagcctcctgcagcagctgggtctttgaggcagcatagtaagtagatctttctctgcaggtagccaatgagactcacgggcatgtgggtgctgacttagcagccctgtgctcagaggctgctctgcaagccatccgcaagaagatggatctcattgacctagaggatgagaccattgatgccgaggtcatgaactctctagcagttactatggatgacttccgggtaaggaccacacccgtgcctcaggtacacacatacgtgctttgacccctcccttgataagtctcatccccagttttccctccttttctagtgggccttgagccagagtaacccatcagcactgcgggaaaccgtggtagaggtgccacaggtaacctgggaagacatcgggggcctagaggatgtcaaacgtgagctacaggagctggtccaggtagggcaacttggtccagggtgagtcactgtctcagtacattgtaattgatctgggtgatctcagggtgtcaacacatttgctgcaagagttgtgagagcacgacttaggaacctactgttcttaggtttgaggcactaaggagtcttcttctagagaacctggatctgataccattgggtacaccatgaaataatggaggggatgcttctgtttagttaggtttctttcaaaatgtggaggtagccttgaaccctctttccttttcctcctagtatcctgtggagcacccagacaaattcctgaagtttggcatgacaccttccaagggagttctgttctatggacctcctggctgtgggaaaactttgttggccaaagccattgctaatgaatgccaggccaacttcatctccatcaagggtcctgagctgctcaccatgtggtttggggagtctgaggccaatgtcagagaaatctttgacaaggtgagctacaataggctgaactatgtattgatttgcctgagggcaaggaatagaggctgtttttctttaagagggttgaaatattcttagtgctggctgctcaactgcacagtaagtcacttgattttctttctgaggtctgagagacctagtgttattttttttttctctctctctctcttgagacagggtctggctctgttgcccaggttggagggcagtggtacagtcatggctcactgtaaccttgaaacctgggcttaagcaattctcctacttcagcctcctgagtagctgggactataggcatgcgtcaccacatctggctaattttttattttttgtagagacaaagtctcagtatgttgcccatgctggtttcggatttctggcctcaagtgatcctcccaccttggcctcccaaagtgctgggaatacaggtgtgagccaccacgtttgcctagagacatctagttttgttagtgcttgaatcaatccattcctcctacaggcccgccaagctgccccctgtgtgctattctttgatgagctggattcgattgccaaggctcgtggaggtaacattggagatggtggtggggctgctgaccgagtcatcaaccagatcctgacagaaatggatggcatgtccacaaaaaaaaatgtgttcatcattggcgctaccaaccggcctgacatcattgatcctgccatcctcagacctggccgtcttgatcagctcatctacatcccacttcctgatgagaagtcccgtgttgccatcctcaaggctaacctgcgcaagtccccagttgccaaggcaggtgcaagatcatgggctgtgggagacttgcatgagtcctcaggctggtacggagtgctctttagtttctggacaagattccactggggttagggttggtctaaagggaaggtagaatttttgaggatatcaagataatctagaatcaggaataaaatggggtggccaaagaaggggcaaactgtagttgggagtgctcgggtagcccaaagatctgcgtatctcgagaggagaggctaaatgctaaggtacctctgctgctgcttttaggatgtggacttggagttcctggctaaaatgactaatggcttctctggagctgacctgacagagatttgccagcgtgcttgcaagctggccatccgtgaatccatcgagagtgagattaggcgagaacgagagaggcagacaaacccatcagccatggtgagtctgcatcctttccccagatgtgccaatcatggagagccaggcagcagccaccaccatgccctggagttgagagtagaagctgttggaaagatcatctaactgagaagaattttaatagggcatcaaagataaagaatgctgaggtgaatccattcaatttggaataaggccgagaagagatggtcaggctccattctcagtctgaaccaagctccatgagggaaatcaaagtatgagagtgcagcaaacacagcaaggttttttttgttttttgttttttgttttttttttgagacgaagtctcactctgttgcccagactggagtgcagtggcacgatcttggctcactgcaacttctgcctcccaggttcaagcgattctcctgcctcagcctcccgagtagctgggactacaggcacatgccaccatgtccggctagttttttgtattttttttttagtagaaacgtggtttcaccacgttagccaggatggtctcgatctcctgaccttgtgatgtgcccacctcggcctcccaaagtgctgggattacaggcgtgaaccacagagcaaggttttgagctgagatgagactcatatacttatccctgatggttggggaagggatagggtccacagacctcccaaaatgaaaaggcaaattcatgtgtttgtaagttccataaaggtaagatctctgtcatctcacttgttttccactatgtcttgtgttacccttaattaattcattaagttccaaacatgggacttaatgagcaaataaatggctttctttcccttttgaagggtctgtgacatcccttctctctcccataaaagcttaacaactactgatgaactaatcctaggaggtagtcacataagtcacagaaattggcctctcaatggaagagataggttttgagctgggctgtgaagagagtagaatttgaataaagggaataagcagcccaaataatgtgctctagtagtaggattgcaatcattgggaaaccctgggtagatttaagagtatatatgtcactggaagtgagaccgctaggtaggatgtaatccaaatgtggtaagcactgaaagccattggcatttccttttaaagtattaaggtttattaaggtatgatataaatacaataaaattcactctttctatataccatttccatgctttatgacaagtgtgtgtaagttctataactactaccacagttgagacttaaaatttctactatctcaaaaagtttccttagccacttcagtcaacatctcccctccttaagccccatcactgatgtgatttctgtccctacagttttcccttttccagagtgcattgacaagtttttaagcagagcagtgactcaattttaggaagcatggcctagcatcttacctcaggttggattggaagggcaaggagaccaataaactgcagtaatgggaggcctgggatgaaatccaggctgggctttaactagccctagtgatctgtgtttaccaactataggaggtagaagaggatgatccagtgcctgagatccgtcgagatcactttgaagaagccatgcgctttgcgcgccgttctgtcagtgacaatgacattcggaagtatgagatgtttgcccagacccttcagcagagtcggggctttggcagcttcaggtaagttggttgggagcattagacagtgcttaagttactttggggacctacaccaaaagggatgggagtcctaaggaagctagaggggtagttgtggaaatcttacacaggccctgtcctaaccctcttttttggctttgctcttgtacacagattcccttcagggaaccagggtggagctggccccagtcagggcagtggaggcggcacaggtggcagtgtatacacagaagacaatgatgatgacctgtatggctaagtggtggtggccagcgtgcagtgagctggcctgcctggaccttgttccctgggggtgggggcgcttgcccaggagagggaccaggggtgcgcccacagcctgctccattctccagtctgaacagttcagctacagtctgactctggacagggggtttctgttgcaaaaatacaaaacaaaagcgataaaataaaagcgattttcatttggtaggcggagagtgaattaccaacagggaattgggccttgggcctatgccatttctgttgtagtttggggcagtgcaggggacctgtgtggggtgtgaaccaaggcactactgccacctgccacagtaaagcatctgcacttgactcaatgctgcccgagccctcccttccccctatccaacctgggtaggtgggtaggggccacagttgctggatgtttatatagagagtaggttgatttattttacatgcttttgagttaatgttggaaaactaatcacaagcagtttctaaaccaaaaaatgacatgttgtaaaaggacaataaacgttgggtcaaaatggagcctgagtcctgggccctgtgcctgcttcttttcctgggaacagccttgggctacccaccactcccaaggcattcttccaaatgtgaaatcctggaagtaagattgcaccttcttcctctcctgatcaacatcggtatgatgtctcctgttgcctcaccctttgtctgcagtatcactggataggactggtggaaagggagcagcctgacagagctccaaatgtggagaatatggcatccctccacctatatttgatgtggacggtaaggctaggcctgcaggatcccttatcctgaccaaagactgtgttggggtgccatttgaaaatcgcagggttgcaaaagaatacaatcttacttgcaggtggatattctctatactctcttttaatgcatctaaaaatcccaaacatcccctggttggtgatcacttacagttgtgtccacctttattttatgtactttgattaaaaaaaaaaaactttttgttaatataaaattttagtattgaattttttttttttccaaacagaaaatagactatcctcttcaacagtaatcacttagtgcttctagggtcagtacagtga

SEQ ID NO: 1332 - DNA, 6000 bp, Homo sapiens
cttggcctctagtgtgttgataagcattggaagagtctgcctactcagcagcattgtgcctggagtggcagacttttggaatgggggaagcaaatttgagcagaggaaactgtcgttagaaactagtttagaggcagtggttaaaaatgcagcctatgtgtgagggttagcagaaggcctaccattttgttagatgaatggggtttgtttttctcttgggtgtatcaggacccaaagatgtaagaaccccatggcttcctagctgagcacagcatttttctttgtctcttgcaaattgtgaggatatttccaatgggaatactattttgtcttgttttgttgacttcagtatccccagcccttagaacaatgcctggtacataatagagactcatgaatttgttgaatgaagaaattcgttttaaaaatttattttctttgcttccttcattgtctggccttcctactttggttaatgcttatgttttcctgagccttactaacacgaggccgctcttaaaaaagagagagcgctgggtgctgtggctcacgcctgtaatcccagtactttgggaggccgaggtgggcagatcacctgaggtcaggagttcgagaccagcctgaccaccatggtgaaaccccatctctagtaaaaatgcaaaattagccaggtgtggtggcgcatgcctgtaatcccagctactcgggaggctgaggcaggagaatcacttgaacccgggaggtggaggttgcagttagctgagatcgcagcattgcattccagcctggacaacaaaagcgaaactccatctcaaaaaaaaaaaaaaaaaaaaaaaaagggagagggagcttgctgagtctagtaagtgacagctggaaacgggctaggtaataagttggtgtcactgtctggtgaatgatcctagcttctaggaaataacactgagtgtagacccagtcgactttgatttgggtgagagggatttggatttgccccatgtctcagcatttcttggttttgattttttgagccaactttatggaattgtgtacttttgcagatattactgtgaagttccttttgaccttgagcctctttctggcggtttgatgtctgttagtgttttttccaaatatgatggtctttatgcttggcattcctttggtactatggaatgccctggcatcagtaggtttagcctataaggagggtagcaccaatgattctgcttcgttgtccccaggcttgcttggtagaacttaaggcctccctgagcctcaagggaggttgtctggcttacttaattccctggaaagttagcttatgctttactctatactgttaatcatggtgaccattaataccatgtgccaggtattatgttaagcattttacattcattatctcccttaagacaataagcctctgagataagtattatattccttcttttatagaggaggacatcaaagttcagaggttaggtaacttgcccaagatcacaattaagcagtggcataattggaattcagacccaatgggtctgactatagagttcctgctcttaaccactcttctgtaagtctaagactatttttatttctctaacaactattcagcctccatttctattatgtcttcttcttaggccattattttctgaccctggggcaggatcactcacttggggccttatagctgggacactgacgctcaaaataccaggagctgctggaatgggtattgtaatatgtatggtagatactgctcctcgtgaccttggctgcctttccttcatctgagctttctggtctagggacagcttcatctattcactgtttctttcctaagtatgagttttagagactggcgaggcgcttggggcaggagtatctactgactccatttcctccttctagttcaaaaggtgatgacctatcaacagccattctcaaacagaagaaccgtcccaatcggttaattgttgatgaagccatcaatgaggacaacagtgtggtgtccttgtcccaggtaagctgtggccacagactagtctttccttactgcacttacttgagggattttcccaggtttcttttctcatttttcttgcagtgactgcagatagagtggggtttactgggaatcccaatctccagggctgctgcttactccccgtcagcccaatgacccaaaggccttaactttctttcctcagcccaagatggatgaattgcagttgttccgaggtgacacagtgttgctgaaaggaaagaagagacgagaagctgtttgcatcgtcctttctgatgatacttgttctgatgagaagattcggatgaatagagttgttcggaataaccttcgtgtacgcctaggggatgtcatcaggtgtgtgtggggtttttggcttcacagggatgggaggccagagatagcctgcattacaggcaggacccatgtattacaggcaggaccaagttcttggcacctgtcgatgcaggaagcctcctggtcatgggaagacttatgcttcagggttgtctttaggttttggttctgcctccctgggacttcaaaatccatttctgcaggtcccttgagacaaattggcgttcctgtaactttcttgatggctttattttttcctactagaggtgtaatttatcatacttatatcctggcttaggataccactcgagggtgtgtatgtatatgccaaataatctcctcactactctcactagtatgtctaattgatggcttgtgttggggttggaatgaggtgggggtatgggcatggaaggtgagctgctagcaggtcttttaagcccctaagttaacccgggagagaggaatagttggagccagacctgggatagctctcaatgtgagtgattttgcttgttcttgcataattttaggcaagaggttaccccatcttggagtcatctctagccactcctacccaaccaaccatcacctggccaggatcatctcaggcttttgattcttttgaatggagtctaagtttcatgtagctttcttcttgggagtgcttagtcacttcctcaaggtgttctgaccacctggctgagataattttgtttttttcacttctgtttcactgaccctgacaattgttagcttaagaccttcccttgtaatattgggtcaccagtattagctagaaggggatcatccttggatatctccctgaagaccctgcatgtctttgtggggtttctaaatgtgtggctcttgattttggctcactgattaggagtgagtggggctgttccttcgccctcacttccaccctgttctccttcctctcttcgcctaaagccatcctgccttttctttttcacttactatcagctatctgtgccaggcccttttggacacccagtgcttgggcccgaagtgtggttggtaatatggagtctgcttgtcatcctcagcatccagccatgccctgatgtgaagtacggcaaacgtatccatgtgctgcccattgatgacacagtggaaggcattactggtaatctcttcgaggtataccttaagccgtacttcctggaagcgtatcgacccatccggaaaggtgagagctaattctgagcttaaggattattgactgtagggaataaaccttggaacatctttatctcattttctttttctttttttttttttaaatcttttatgcttttcccctgtatttatttattcattttttaagagatggggtcagctgggcaccgtggctcacacctataatcccagcaatttgggaggctgaggcgggtggatcacttgaggccaggagtttgagaccagcctggccaacatggcgaaaccccatcgtgggcacctgtaatcccagctacctgggaggctgaggcatgagaattgcttgaacccaagaggtggaggttgcagtgagccaagattgggccacagtactgcagcctgggtgacagagcaagactctgtctcaaaaaaaaaaaaaaagagacagggtctcactatgatgcccaggctggtctcaaactgctgggctcaagtgatccatctgccatggcctcccaaagtgctgggattacaggcatgagccatcaagcctagtctcattttcttttcttttttttttgagacagagtgtcgcgctgtcccccaggctggagcgcagtggtgcaatctcggctcactgcaacctccgcctcctgggttcaagcaattctcctgcctcagcctcccaagtagctgggattacaggcgtctgccaccacgcccggctaatttttgtgtttttagtagagacggggtttcaccatgttggtcaggctcgtctcgaactcttgacctcaggtgagccactgtgcccggccgctagactcattttcatatatttgtatacacacacatgcaaaccctgcacacatattcatatgtcttaccctctttttttcctccatccttcctttgctccatctctccccttctctgttccaggagagtaagctatctttatggatctctgaaggagaaagtggtccattttggctgggtcagggtccagagtgcacagttctaccattggtggttgtagtgaaaacttgggctacctatatggcagaagtcagaacttgatgggcttctgacatgtcaggttttgttcactgacctcttgtcagagggactcttcacagtttacctttctcatcttgcctgctgcttattaagacaggtggggtggagttggggagaggtagggcaatatctaatgaagggcactatctaatgagcttggcattttgaccccagggtctgatgagttctcactttgtcttgtagttgacacctctaactgtgcttgtactgtttgctctcgcaggagacatttttcttgtccgtggtgggatgcgtgctgtggagttcaaagtggtggaaacagatcctagcccttattgcattgttgctccagacacagtgatccactgcgaaggggagcctatcaaacgagaggtgagttttctccctgattccagtatccgattttatgattactcagtgtggcatcatgtggtaactgtcaggactgggtgctcggccggctgcggtggctgacacctgtaatcccagtactttgggagactgagatgggcagatcacttgaggtcaggtgttcaagaccagcctgggcaacatggtgaaatcccatctctactaaaaatacaaaaattagccaggcatggtggtacacatctgtaatcccagctactcaggaggctgaggcaggagaatcggttgaacccaggagtcggaggttgcagtgagctgagattgtgccactgcactccagcctgggtgacagagtgagactctgtctcaaaaaagaaaaagactgggtgttctttggagaactaaccatctttcagggatgagaaacctgccagctattcatttctgggcctaattgtttcttggatttacctaatgccaggaatttcaaaaaactagactgaacccaaaatatataagtgattgaaatcatttttgaagtaaagctgatggtggcttcaggcctctgcccattcccagggtttccagcttcagattttagagaccccttctcagtaagactacgagtaatgtgagaggcaaggactgtgctagaaatctttgccttgggatttttgtagttgttctttgaggccggatccctttagaggagaatcttttttaaatttaatttaatttttaatgagatggagtcttgctgtattgcccaggaactcctggactcaagcattcctcccacctctgcctcccaaagtgctgggattacagatgtgagccaccatgccgggttgagaatcttcttatacggtaggtttttgcacactaggtagtggaatgatttagagaaactcagcttttgctgatataatattcttgccttctcctttctttatctcctccatattcaggat

SEQ ID NO: 1333 - DNA, 6000 bp, Homo sapiens
agagtccgcctctaagggattaaagggtctcctttcactaatcgatctcgccctattcctttcgttgattggctgagaattccaatccgtcgaggaagcgtagcgttgcggccaattgacgtggcgttactaggcgtgtcgcatcactgaggcgggagccaggccgcaagcgaatttcctgattggctgtgatctgcgggttgctggggagaggcgcggagaggcgggcgagagtccgcagggcaggcgctgattggctgaggtgggagcagcttcccttccgatgattcggctcttctcggctcagtctcagcgaagcgtctgcgaccgtcgtttgagtcgtcgctgccgctgccgctgccactgccactgccacctcgcggatcaggagccagcgttgttcgcccgacgcctcgctgccggtgggaggaagcgagagggaagccgcttgcgggtttgtcgccgctgctcgcccaccgcctggaagagccgagccccggcccagtcggtcgcttgccaccgctcgtagccgttacccgcgggccgccacagccgccggccgggagaggcgcgcgccatggcttctggagccgagtgagtgtgcgcgcgccgttcgcttgctgcggcggcgcgcaccgggaccagccgcgcagggtaggcccggcggggcctggccgtgggcgcgtcagagaggtggagaccaggaaagagggaagggaagctagggggcgagtgaggggccgtggacccggcaggcccggctggggccagctgcgcacccgcgcgccccctaggcggggcttgcgttgggtccgggtcggagcctgggccggatcgtgctgtgtcatgcaggccccggcccgcccgattggctcccttagaacggacgtctgggcctggccaggtcttccggcccactccgccggcgcggcgccccggggctttggggcgccagtctgccgtccggcctaccacccgccgaaagcctttggtccccggagagagcaggccccgcgagcccgaggccccagccgggcccggtgggcgtggactttgcgccatgtgaaggcctcaggagctctgccaccgaggcggagcccggggtcggggaaggcccgccgagctcagggaagctcacagccgcctttttggagccgggtcggcggggccggaggtgggcatcctctgtgtgtgacctgagtcgtgaaggactgttagggagagggcgagccctacctttcgcttctggtcttcttactttaggcctgttgttcatactagaaagtttgagccagttttccttaatgttatgactcgtgggtggggagaaaggaatttttctttaacattttaggttcttgctaaagttggaatctcagttcgtgttttgtgcgcctttccagatttccaggtttcgtggtgtgcagtttagagttgcactaactcttcaaaaacacaaacgtgcgcgcactcctttccccaaccagctatattgagaaattacccgggctctggggctttctgaccccacctccatccttaggaaagcgttagataaaacttggctacctcagcccattcaatttagaatagagagcttttagaggcaaaaaaaaaaaaaaaaaaaaaaaaaaaaacacagccagcccaaggaaactctatgcaaattaccttccttccttgaagagattagttttttgaggtgtgttcctttttctcaagtttctgaattcggataaagtattactcagttgcttatttaaaagagtcacttattctgaaagtattcttttggtttatatgcagtcagcctcttattttcaaaagtaaaaatctaaaattcttggaacctggcatcatcagctgtttctaacctcttggtcaccttgatgactcttagctgaaacccttccaagtcccgtggagtcccctgtgcagttctggaaagggattgacttatacagaagacaatggaggattgccccaaagagtgtccagaactgctgttggcccatggtcaggccaaattcagtcttttagagattaccacatctgatctcagtaggtagatggggaattagaggctttaccttaagaaaagggcataccactcatctccagagccagagtccgggatggtaggcagaatggaggttttcctaggatacagctttgagattaaaatacaaactattgaccgggcacagtggctcaggcctgtaatcccagcattttgggaggccgaggcaggcagatcacttgaggtcaggagtttgagaccagcccgggcaacatggagaaaccccatctctattaaaatgcaaaaagtagccaggcatggtgatggtgcacacctgtagtcccagccactctggaggctgagacaggagaatcacttgaacccagggaggcagagattgcagtgagggagatcgcgccactgcactccagcctgggcaacagagggagactccgtttcaaaaaataaaaaactatggtgactagaggcatctggcgttttatttttctccagtcccagttctataagtcaagcaagaagatgggcagtccctggaagagtattttgatgggacaggagtgggagagctcgtgggtttacattgctctcaactgtcacattgagcatgcttggcctctagtgtgttgataagcattggaagagtctgcctactcagcagcattgtgcctggagtggcagacttttggaatgggggaagcaaatttgagcagaggaaactgtcgttagaaactagtttagaggcagtggttaaaaatgcagcctatgtgtgagggttagcagaaggcctaccattttgttagatgaatggggtttgtttttctcttgggtgtatcaggacccaaagatgtaagaaccccatggcttcctagctgagcacagcatttttctttgtctcttgcaaattgtgaggatatttccaatgggaatactattttgtcttgttttgttgacttcagtatccccagcccttagaacaatgcctggtacataatagagactcatgaatttgttgaatgaagaaattcgttttaaaaatttattttctttgcttccttcattgtctggccttcctactttggttaatgcttatgttttcctgagccttactaacacgaggccgctcttaaaaaagagagagcgctgggtgctgtggctcacgcctgtaatcccagtactttgggaggccgaggtgggcagatcacctgaggtcaggagttcgagaccagcctgaccaccatggtgaaaccccatctctagtaaaaatgcaaaattagccaggtgtggtggcgcatgcctgtaatcccagctactcgggaggctgaggcaggagaatcacttgaacccgggaggtggaggttgcagttagctgagatcgcagcattgcattccagcctggacaacaaaagcgaaactccatctcaaaaaaaaaaaaaaaaaaaaaaaaagggagagggagcttgctgagtctagtaagtgacagctggaaacgggctaggtaataagttggtgtcactgtctggtgaatgatcctagcttctaggaaataacactgagtgtagacccagtcgactttgatttgggtgagagggatttggatttgccccatgtctcagcatttcttggttttgattttttgagccaactttatggaattgtgtacttttgcagatattactgtgaagttccttttgaccttgagcctctttctggcggtttgatgtctgttagtgttttttccaaatatgatggtctttatgcttggcattcctttggtactatggaatgccctggcatcagtaggtttagcctataaggagggtagcaccaatgattctgcttcgttgtccccaggcttgcttggtagaacttaaggcctccctgagcctcaagggaggttgtctggcttacttaattccctggaaagttagcttatgctttactctatactgttaatcatggtgaccattaataccatgtgccaggtattatgttaagcattttacattcattatctcccttaagacaataagcctctgagataagtattatattccttcttttatagaggaggacatcaaagttcagaggttaggtaacttgcccaagatcacaattaagcagtggcataattggaattcagacccaatgggtctgactatagagttcctgctcttaaccactcttctgtaagtctaagactatttttatttctctaacaactattcagcctccatttctattatgtcttcttcttaggccattattttctgaccctggggcaggatcactcacttggggccttatagctgggacactgacgctcaaaataccaggagctgctggaatgggtattgtaatatgtatggtagatactgctcctcgtgaccttggctgcctttccttcatctgagctttctggtctagggacagcttcatctattcactgtttctttcctaagtatgagttttagagactggcgaggcgcttggggcaggagtatctactgactccatttcctccttctagttcaaaaggtgatgacctatcaacagccattctcaaacagaagaaccgtcccaatcggttaattgttgatgaagccatcaatgaggacaacagtgtggtgtccttgtcccaggtaagctgtggccacagactagtctttccttactgcacttacttgagggattttcccaggtttcttttctcatttttcttgcagtgactgcagatagagtggggtttactgggaatcccaatctccagggctgctgcttactccccgtcagcccaatgacccaaaggccttaactttctttcctcagcccaagatggatgaattgcagttgttccgaggtgacacagtgttgctgaaaggaaagaagagacgagaagctgtttgcatcgtcctttctgatgatacttgttctgatgagaagattcggatgaatagagttgttcggaataaccttcgtgtacgcctaggggatgtcatcaggtgtgtgtggggtttttggcttcacagggatgggaggccagagatagcctgcattacaggcaggacccatgtattacaggcaggaccaagttcttggcacctgtcgatgcaggaagcctcctggtcatgggaagacttatgcttcagggttgtctttaggttttggttctgcctccctgggacttcaaaatccatttctgcaggtcccttgagacaaattggcgttcctgtaactttcttgatggctttattttttcctactagaggtgtaatttatcatacttatatcctggcttaggataccactcgagggtgtgtatgtatatgccaaataatctcctcactactctcactagtatgtctaattgatggcttgtgttggggttggaatgaggtgggggtatgggcatggaaggtgagctgctagcaggtcttttaagcccctaagttaacccgggagagaggaatagttggagccagacctgggatagctctcaatgtgagtgattttgcttgttcttgcataattttaggcaagaggttaccccatcttggagtcatctctagccactcctacccaaccaaccatcacctggccaggatcatctcaggcttttgattcttttgaatggagtctaagtttcatgtagctttcttcttgggagtgcttagtcacttcctcaaggtgttctgaccacctggctgagataattttgtttttttcacttctgtttcactgaccctgacaattgttagcttaagaccttcccttgtaatattgggtcaccagtattagctagaaggggatcatccttggatatctccctgaagaccctgcatgtctttgtggggtttctaaatgtgtggctcttgattttggctcactgattaggagtgagtggggctgttccttcgccctcacttccaccctgttctccttcctctcttcgcctaaagcca

SEQ ID NO: 1334 - DNA, 6000 bp, Homo sapiens
ctatctcttagaattgggggaaactacaggcattatgcatagcttcttgctttgtaagggtagctgaggcctgtgtcctcaaggatcaagaggacccttgagctcaaggtctagccaggatagatggagataggagaagacgaggaggttgtaggcttggagcttctggttgtccttctttccccagagtggagcctctaaggatctgctgttacttctgaaaacttggagtcccccagctgaggaattagatgctccattgaccctgcaggatgcccagggattgaaggatgtcctcctgacagcatttgcctaccgccaaggtcagctagcaacctgactcatctcttctacctttaagtggtcctccagactcatgccctctctcttgtcccattcagttccatgggcttcttagacccttgttccccatcatgacccctgctctatagccctctccaagctcacaccctgactgtcctcaggtctccaggagctgatcacagggaacccagacaaggcactaagcagccttcatgaagcggcctcaggcctgtgtccacggcctgtgttggtccaggtgtacacagcactggggtcctgtcaccgtaagatggtaaagacagtcctagggtggattggggaaaccacaagcattatgtatagctttttgctttgtaagggtagctgaggcccgtgtcctcctatccctttagggaaatccacagagagcactgttgtacttggttgcagccctgaaagagggatcagcctggggtcctccacttctggaggcctctaggctctatcagcaactgggggacacaacagcagagctggagagtctggagctgctagttgaggtagggaactgccaggtgaagatgtggggtggaggattcctgaggtgcttgtgatggggtgacttgactagtcaagatccaagtataaggaagtatggctcccaaagattatagatacaatttttttctttctcttttaggccttgaatgtcccatgcagttccaaagccccgcagtttctcattgaggtagaattactactgccaccacctgacctagcctcaccccttcattgtggcactcagagccagaccaagcacatactagcaagcaggtgcctacagacggggaggtgaggttccccttgctcacctgagcttctcttcccacttctgatgcctcccctggggtgtgactctgcttttgttcttgtgacttgggggatgaatgaggcagtggcaggacataggtcgccactcctcagcctcttaccttgcttctagacctgaactgaggactcttctctaagacattaaccttctctatctttgacactctgaagtctcttccccagtccattctgtaactggggtagatccatactgagccaaaattggagccctaagaccttccctccctttctcctcctcagggcccatgaacatccatctgttagctaagagagaacattctcaggacccttgcaggttccctgctagggcctagggtgaggcttatgggcttttactcctcagggcaggagacgctgcagagcattacttggacctgctggccctgttgctggatagctcggagccaagggtgggtgtgtcttcaagcttctctgcaatggggtagacgggttggtgtcccctttgaaatacagcaagactgcaattttttgttttttcctctattctgtctgtccagtctgggggcccaggactctgcatggtaccagagcctggtgaagaggttggggatggtggctcatgcctttcaagacactgcttcttcttcccactccagttctccccacccccctcccctccagggccctgtatgcctgaggtgtttttggaggcagcggtagcactgatccaggcaggcagagcccaagatgccttgactctatgtgaggagttgctcagccgcacatcatctctgctacccaagatgtcccggctgtgggaagatgccagaaaaggaaccaaggaactgccatactgcccactctgggtctctgccacccacctgcttcagggccaggcctgggttcaactgggtgcccaaaaagtggcaattagtgaatttagcaggtgagcccggggtcctagagggggtgtggagggatgattttctgattgggacctgagttggtgagctccatgttcacctacttaccctagagtttctgaaattgattcctcttcacccctgttctgtgtcctacttcaggtgcctcgagctgctcttccgggccacacctgaggaaaaagaacaaggtgatctaaactttcagttttcctcttacctcctggaagtggtagtggtggaagtgggttccctttaatgtgtcccagcccaccaggagacttaagagaaagggactgtggacacaagaagaaatagaggaggatttggggttttggtgactgtgaggctgggaagacacttcttgactttgggagtggtccccaggggcagctttcaactgtgagcagggatgtaagtcagatgcggcactgcagcagcttcgggcagccgccctaattagtcgtggactggaatgggtagccagcggccaggataccaaagccttacaggacttcctcctcagtgtgcagatgtgcccaggtatgtatacttgcatgacgtcggctatgcatagatgtgcaaggacagagaggcccatgggaaatacttgggcgtaagtgtaagagtggtgttctcagacaggaggggtgattggggttgtgctatatatacctagggatatatccaggtgttcaaatatacacagtgtgtatgcagggctcccaagagttccctggtttccccgatatcctcagacacaaagaccatgactctgctgttgtgggttgcacaggagtagggggcagatgatggacactgggatgggaatggttgtgaatgatctgcccccgcttccatatgtgagtgtaggcaagatacttcctctctctaggcctcagtttccctttttataaaacaatgcctaagactatgtcaagttctaagactctgtactctgggctggggctacaggtaatcgagacacttactttcacctgcttcagactctgaagaggctagatcggagggatgaggccactgcactctggtggaggctggaggcccaaactaaggggtcacatgaagatgctctgtggtgaggctcaggcctgctggcttggggctgaggggcagttggtgtcctagagtccttggacctattgtgggtggtgaacactgaaagcgggggtatggctgcccagctttctgccaatctttcacccttaggcatcatccttctttctctccaggtctctccccctgtacctagaaagctatttgagctggatccgtccctctgatcgtgacgccttccttgaagaatttcggacatctctgccaaagtcttgtgacctgtagctgccacgttttgaagagcttgagctgggtccccagtgggctgtctctctgtggggagggctttctgcttcaccatcattaggaatgtgaccattcctatataattcctggactggtgagattggtggtaggcctgtgaaatttgccctagttactaccattctcgttttggaggaaacaatctctgccaccaccaagtcattgactttgctcgaggcaccttttttcctgtttctccttttctgttgtcgagtaaaatttcatatttatctcgtctgcctactacatatacttgcgtgggaaggcttgtgaccgtctagttgagtgctagttgtctatgatgccctttcctgacatcgtctaccttatgaacttgaagtctgggtatgaggaaagggctacaggaatcctcactttggaggcagtggctttagtccttcacattgcctgaatgcagagccccaaagcccaggacagtgacaatgagtggagttgggtctgaagggtggtctagataggcctctcaggacaagggcaggtacctgttacttagagacaggcaggtttctctcagagtaactcttcactcccttcctaattccaaattctagaaattcgactcgtcttagtcaaatgtgtctgtgtgggtacagggtgaaaggtgaattgagtcagcatatcaccaacagctgcctgttgactactaacagggacccctgttatttggggcccaaggattttcaagtcccagcatatgcagttttcttgctaatttgggttctactgaattggctgtgtgttctgtggttgccctttgacttctctggatttgagtgccttattataaggtattaatattaatgacgggaggaagaaaggcacaagcgctgagaaactgcaaaggctgtgggattggggttaccagagggtgcagtgacaatggggtaggagtggggtgctagtcagaaagttcagagtaggggtggttggaggcagcgttgagaaggagcaagaagtgtcagggtggtgatggcgtcttagaagatctccaggttttgggagaagatgggtgtatgggttaccacaataggactagactaatacaagggttcagtctattgtgccacgttcttccaggaggataaactccggagccaatgaactggagccaagtgggagagtccgcctctaagggattaaagggtctcctttcactaatcgatctcgccctattcctttcgttgattggctgagaattccaatccgtcgaggaagcgtagcgttgcggccaattgacgtggcgttactaggcgtgtcgcatcactgaggcgggagccaggccgcaagcgaatttcctgattggctgtgatctgcgggttgctggggagaggcgcggagaggcgggcgagagtccgcagggcaggcgctgattggctgaggtgggagcagcttcccttccgatgattcggctcttctcggctcagtctcagcgaagcgtctgcgaccgtcgtttgagtcgtcgctgccgctgccgctgccactgccactgccacctcgcggatcaggagccagcgttgttcgcccgacgcctcgctgccggtgggaggaagcgagagggaagccgcttgcgggtttgtcgccgctgctcgcccaccgcctggaagagccgagccccggcccagtcggtcgcttgccaccgctcgtagccgttacccgcgggccgccacagccgccggccgggagaggcgcgcgccatggcttctggagccgagtgagtgtgcgcgcgccgttcgcttgctgcggcggcgcgcaccgggaccagccgcgcagggtaggcccggcggggcctggccgtgggcgcgtcagagaggtggagaccaggaaagagggaagggaagctagggggcgagtgaggggccgtggacccggcaggcccggctggggccagctgcgcacccgcgcgccccctaggcggggcttgcgttgggtccgggtcggagcctgggccggatcgtgctgtgtcatgcaggccccggcccgcccgattggctcccttagaacggacgtctgggcctggccaggtcttccggcccactccgccggcgcggcgccccggggctttggggcgccagtctgccgtccggcctaccacccgccgaaagcctttggtccccggagagagcaggccccgcgagcccgaggccccagccgggcccggtgggcgtggactttgcgccatgtgaaggcctcaggagctctgccaccgaggcggagcccggggtcggggaaggcccgccgagctcagggaagctcacagccgcctttttggagccgggtcggcggggccggaggtgggcatcctctgtgtgtgacctgagtcgtgaaggactgttagggagagggcgagccctacctttcgcttctggtcttcttactttaggcctgttgttcatactagaaagtttgagccagttttccttaatgttatgactcgtgggtggggagaaaggaatttttcttt

SEQ ID NO: 1335 - DNA, 6000 bp, Homo sapiens
tcaaaagaaccttggtctccacagtgttttttcttaacctaaatatttcctttctatgatccctggtctttagacaaactcaaccaattttcaaccagaaaatgtttaaatttacctatagtctggaagcccccctttgagttgttccgtctttctggaccaaaccaatgtatttcttaaatgtatttgattgatgtctcatgcctcccaaaaatttataaaaccaagctgcaccccaactacctggggctcatgttctcaagacctcctgagggctgtgtcatgggccatggttactcatatttggcttagaataaatctcttcaaatattttacagagtttgatttttttcatcaacattagtaaagattttacttaagttatgtaaacttgaaaaagcatttgactattttattttttcctgaataagtgtttgatttaagcacttttattttcttacgccaattaattagagctcttttatatattttcagtagtgaaacattgtgtacacaacacataaatacatagacacattaggcatgctgatagaggtacatctttttttttttttttttgagacagagtttttctcttgtcacccaggctggagtgcaatggcatgatctcagctcactgcaacttctacccgctgggttcaagtgatacttctgcttcggcctcccgagtagctgggactacaggcatgtgccaccacgcctggctatttttgtatttttagtagagacaggtttcaccatgttgtccaggctggtctcgaactcttgaccttaggtgatctgcccacctcggcctcccagagtgttgggattacaggcgtgaaccactgcacctggcctagaggtacctcttatagattcataaaaaacgttttttttccttaggctttcagattctttttttcccctcctccctccccgctactttcagattcttgataacctgtttcacaaccctaggcagttgtcagctaaatagccttaaatttgcatattaaagaaaacaactcaggtgaactccaaacagcaaaatttacattataaagtgtggagagaaaaagtctggtgtgctagacggaaattgaaacagatttaatggccaattaaacataaaattatagaaattataaaagccttttaaatacacacacacacacatcctatagcttttacttcagaacttttagctatgagataaattcaaatttaccggtttgcaaaaagaacttgttggatctaaactgtggtttttatcttaacagaaaataatggcagatttagagcaggcagaaaagaatagagaaaagaggtcttaggaactctataattagtaggtcgaccttagggctcttttttcttaatgtaaatgtgcacaaagaccatattttttccattttacataaactttggcagtagaggtgccataaaacctacagagtgctcaaaagagggtcattctccttgttttcttctcattcttagattatttgttttccacttctttttttcttaaaaggagaaactgagctgtggcttagagtttctgtgtggtggatcatcacgtgctgcttgtgggcaggactccacaatgtgccaccactgaatggtttccaccctcttacatgtctcagtttctctctccagaggtttatgacttctgagagggctcacaacactgggtgatcagcccttcaatgtgtttcctggatgagccagtttttaaattaaatatatatatatatatttttttgagacaaggtcttactctgttgccccggctggagtgcagtggcataatcttggttcactgcaacctccactttctgggttcgggcaattcttacgtctcagtctcctaagcaactggggttacaggcacgcaccactacacctggctaatttttgtattattagtagagatgcggttttgctatgtttgtcaggcttggtcttgaactcatgacctcaagtgatctgcctgcctcggcctcctgaaatgctaggattatgtgtgtgtgaccgcacctggcctaaattaatttttgttggggatttccctgcaggaccactgcacatcgttcggggtcaacctttcagacactcccacaaggtccccagtcactcaggggcacctttcagttgggaggggcaaatgccctttctttttggagctgagaaaactcagtctctgatatacctatgaaagcaacagttcagttcctcatgcaaatgcacacagacaaacggaattgagattaatgttgggagaaaaagcaatataaaggatccttcagaacggatctccaaactagaattaggatttttttttttttttgagatggagtctcgctctgtcgcccaggctgagtgcagtggcacgatctcggcacagtgcaacttccacctccctggttcaagcaattgccctacctcagccttcgaatagctgggattacaggtgcacaccaccaggcccggctaatcttgaacttgtggggtcaagtggtccgcccgcctcagcctcccaaagtgctgggattacaggtgtgaaccaccgcacctggcctagaattaggattcttaaacaacgacttcctaggagagaaaattaaaaaaaaaaaaaaaaaaaaaaaaggaaacagccaaaaccacttcctataaactgtgctcagccacccgtaactttgtagctcttttccaacaatatacacaccaaggtcaaatcctctcacagtgcaaggtcatctctggcacccaaagccaaaaaggtcaggtcatgcaatacaggaaaacagagctttagacctaagaagaatctgcccatgactcttgaaatcccacaaagccaagagaacaccccaaaagggggtgagtggcacctttgttctaaattctttttttttttttgagatagagtcttgccctgtcacccaggctggagtgcaatggcacgatctcagctcactgcaacctccgcctcccaggttcaagtgattctcctgcctctgcctcctgagtagctgggattacaggcacgtgccaccatgcctggctaactttttttgtatctttagtcgagacagggtttcatcatgttggcgaggctgagtctcgaactcctgacctcgtgatccgcccacctcggcctcccaaagtgctgggattacaggcgtgaaccatggcgcccggcctaaattctttaaagaggttcaagtcattagaagccttctctcgattttttggtaatgcagatggcaaagggtgaaggaggtatagggtggaagaaaagtaaacaaaagaacaattgaattttttttttttttttttttaatttgagacagagtctcacactgtagctcaggctggagtgcaatggctcgatctccactcactgcaacctgcgcctcctggttcaagcaattctcctgcctcagcctcccgagtagctgggattacaggcacccgccaccatgcccggctaattttttttgtattttcagtagagacagggtttcactatgttggccaggctggccttgaactcctgacctcgtgatccgcccgcctcggcctcccaaagtgctaggattacaggtgtgagccaccgcgcccggcctaagaacagtttaatttttaagaccaggaagcaaacacagaaaccaaatacatggttttttgttttctgtttgttttttcttttgcagctgtgaggaattttactcaaattagataggccttgttacccataatttggaattctcacttggatttgaccaagtgaagtagagttggtcaatgggaaaaagacaaacaaaataaaaaaaaacccaacaatatgatcactgagcactctaatggtaagcagaaattaagaccagctggttgttaactttagccaagacaaaaatccctattcagctacttacctaggggtgcgtctcaggctgaaaacggctgtctaccatcccagaagtaggaaaaaaacccctcatcttccctgttggaagtgagctcaaactccataaaagagttacctgccttccctcgtcatggaagcaggaaaacttgccttccttgttggaagcaagtaaaactccaaaataataataataataataataataataataataatagagggagttgtacaacaaaatgaactttagatctcgaccaaattttgggagatcagggattctctggagggggtgctcctagaccttagcaaattgtcctgttggtttgagccatggagttagctcatgttggtaccaagcatggataggagatttgtcaaagatcagaggtatctccactcacaatccctccgtggttaccatccttcattcagtaaatatttacggactgattaccatacactaggcactattccagacattggagatacaatgatgagcataaaaaacggtctagataagaactgaggtctccagacatactttatgcccactcagttttgtcttttgccctagttgctaaacaaaacttaactttgctgtgcggtgcgacttcgttaacttaaaattacaggctgtcagctatgaccgctagactctaagaaagtccagtggaaatccttcaatgaaaagaatctgttcttgggtggaagccccgctcatgcaggaggaacagagggcttccattctcgcgtcacacaactgagggtcaaccccttgctccctgcagtaagcctgattagtgggcggagcttccttcaggatcgcaagaaagaaaggaggaaggggaccccgcctcctacgtgctcgcgggggggggcggggtcggtggactgggcgtgagttaattggctggggggcggggcaccacgggttggctccgcccaggcgctcgcgcggatcccgggtggaatgacgggagggagtcccggcagctcctacctcccagcgatggcgtcgctgtgccgcgcccagtccccagcctgccggccggtactcaccgctacccggagttcgctcagacggtgagatttggggcgggtccgaggcagcggcgggacgctacctgcgaccgggaccatgaggagctgccagacccgtggggccggtaacgagagcagtcgcggcacctgctgagaggaaagagggagcggtccggcgcggctggggcgcggcagaggcttgcccgatcctcggccatgtcactgctctgcgtgcgcggtgagtgcgcggactgaggcggggaggcggggtgtcggcgtagaggtccccgcacccttccagtggacgtccggtgaccgtctcacccaaactttacatcccgtccgtgctttgggggtctattattttggcaatcacttaacaatcacttgagttctttccactttcttgttttcccccaagctcctgcaagggacgattagctctccattctggtagccatgtgacaatgttgttggactgcaggctcagatcctattaaacagtgactggggttctctagtgagagtggacgagttagaagaccgcggatggttggtgcctgtgaatggtgggcagcctctcattcttttcctcctcctcgcaccgtaacgctacagtatgcttagtagcaggttctttttatcacactttgaatgcgttagtggtacagctgtcacatcccttctattgcttgtcttgtcccctgccacttccctgaacactaaccggtagtataggctaagattattcttctgttccacttgggaggatgtggtgactgcttttgaggataagaggtatgatttatttttatttttattttagcttgcctcacagtaactcaaggtgaagggccattattgcttttcccctgaggacacttgacccatctaagaagatatcttaaagcaagagctttggggtttaagatgaggcatggtacgcgaactaagttctatgtgggtagagactgtttcttattagtttttgtattcctggtgtctgacgtagtagaagc

SEQ ID NO: 1336 - DNA, 6000 bp, Homo sapiens
attctcagaatagattatcctgaatagtgatcttttgcaagttacttttaacaaagtataaccatatttgacttgtaaatgagaaaatgagatttaggatttatcaagtttctctttgaaagaaaatttcatttttctattggataataatctatttatgataaagttaaccaaaatcaccccaaccaatgcaaagcaaacatttattgtggcttggtctggaaaactttcattacaaatttagctacaagatatttacagaatatcttgtaaagtttattgtttgttttatatatttactcccattttaattccagatccatccagatccatgtttttttattttttaagatagtataaagatccagtttttgtttaactatgctagtttaaagaattgttttaaatcactttttaaacctattgagttaaaatagaaattgaaaaaaagtcattattaaatttaaggatattaatctttggttcgtgtcataaatccatggagttggcaatgattatgtgaagacttgctgtattttttgtgttctgattacataagaatttttgaattattatattagaaattatatggtcctggtatatcttagaaagtatataatcaaatgaagttcctttttttcataatagactctagtttttagagaaattttaggtttacagaaaaattgagcagaaagtacagagaattctcatatactcaatttcccgctgctcttagtttcccctgttactaatattttggattgatgtggtccatttgttatattggtgaaccaatattgatacattattattagctaattgccatagtttacattagggcctactcttcatgttatacatttctatgtgttttgccaaatccataatgtatgcatacaccattacagtatcatacagaatagtttcacttccctaaaaatctcttttttttttttttttttttgagacatagtctcgctctgttgcctaggctggaatacaatggggcaatcttggctcactttaacctctgcttcccaggttcaagtgattctcctgcctcagccttctgagtagctgggaccacaggcgtgcaccaccacgcccagctaatttttttttgtattttagtagatggggtttcatcatgttggtcaggctggtcttgaactcctgacctgatgatccgccgcctcggcctcccaaagtgctgggattacaggtgtgagccaccatgcccagcccacttccctaaaagtctcttatttattactcctccctgccaccaactcctggcaaccattgatctttttactttctctatagtttgccttctccagaatgcatctcattggaatgaaacagacatagccttttcatactgtcttcctttacttagcgatactcatttatgattccttcatttcttttcctggtttaaaagcatttctttttatcattgagtaatagtccattacataaacgtactatagtccatgtattcacttacctcttgaaaaatatctcagctgcttccaatttctggtaattatgaataaactgctataagcatacatgtgcaggtttttgtgtaaacatgtttcctaactcatttgggtaaatatctaggagcacaattgctggattgcattgtaagactctgtttatctttgtaagaaactgccagactattttaaaacagctggaacctagaaagcagagtttgaccttttgaccttaacacatatcttcattttccttctgcaaaacttcttgaaaattattgaagtaaaatttgttattatagcgaatgtgacaaggtcttattctcttactttcgaataatatagagagggatatggatactatactcagggattaaacaaaataacttgtgcaatacaaaattactaatcctagcatgatcctgatgttggaagtatactagttgaatcaccaagtcattcgctgacttttcctaagtcacacagtaatagatactaagccaccaccaaatttgagtttttatcttctctaagattttccacccacaaaaggaaatatagagaggcagggaggtaagatctttttccctaagtgaagtccaacaaaggtacctccctttggctctagctacccacatgactacttcattaacctgaaagagtaaaatttgaaaaaaaattctgtctttaattcatgtgaataactgaggaataataataataataatctcaataactcagtgtgtgtgtgataattatttgccatgtttagaggcaaagggaaaacatttagaatgttagccctcaaaatgctttgacctggggacacatgagaaacacacactaaaataatgatttttgttggctgtggatagggggtatgaggaagctgtggggagattttggaatatctgtgaaatgctgttcttgatcattcagaatatactctttcttccatataacaagtaatgcttagatagagttaaatgtaaaggatgaggggacagcttactaagatcagatattttgcaagagtcttatgcacaatgagatgtatgtgagagactccatatttcctctccttgttttgttttgtttcctcttcactatcagattctaaaccaaatgagtgaaaataaacatgctgtgaaaaacgtaacatatagagattgattttaactgtcttttttctttccttctctttctttattttctctgtttgtaaagtaagtggagccgatgaatcatcatcttctagaaacagcaagagtggtgagtcatttctctggagtatgtggcatttcacccacagaaagcatttaacccatgattatcccctcactgttaatgataacatattttacttgttcttttatttccataaatctactcgacattattattatgcggagaaaaagattctgacagattattcacagcaatatacctacatgattagtggctttctttttgtgttatgtttgggagtttcacttgcctttagtgttacagctggaagttaattttggaaaaacattcttttcactttttttttcttaattctgctacaattatcatatttattgttgctattttaggtttgcctatgtattacaaatccaaacatataaaataattccattcagtttatggcactggtaatagcagcaacaaagcaaaatgagactatacatgttttctaggttgttatattttataaaaagtaagtggaattttttcttcatttcacaagagcatcactgtgcaggaatgttccaatagttccattaccagagttaggaatacaaacgcaaattaaagaaaaaaagaaaaccagattttgtataatcatcttattccttctcacctgatgacataaatatggtattagaaagttagtctacatctgtcaagatcaatttgcaataatatcaattaacttaacttgttagcaggtaactaattaattttcaacttacacatatgatagtaaaaacatatattgacattttcttaaatatttagattagatgatcatcctacttcaggatatgttgacttcattgatattggcatcgagcacttagaatgtattataaaatactgccaatctttagaaagtattttcattaacttcctaaacttcatgttttttatgtgaaatatctatgaggaaaagaggaaaaagaacaaaccactaaatgcagcataaattgagccataatgctgtgagattttacacctgtgcactttaatggaaacatcatataatactttgtagggtttaaagaagaatgaaaatgaaccactatggaagttaccagaaccaattttcctccattgggtgggaaatttcttatggaatgtgttctgtaatagttgctgctccattaatcctttcattttataggtctagttccttgttttggtgttcaactagtctacaatgtcaaagatgtgtatcaaaatgtatatataactgatctatattacagtttatatatatagttctatgtaactgactctatttaaaagaattaatgtagataggccttctgatgtcaatgcttttattgaatgtcataatgatcaaatttttggcattacctttgttcaaaattttgagccaatctggaactttattacttctatatttcttatttataacaacaagctatatctaggaacaaaagtcgtttattttttaaggcaagaaaaatataaatagaaaattattcggcactgtgtaatgttaaaatttacaaatatatgttatttctccattgtcacaagaattctagtgggtagacaacttagataatgctcctatatacaaaagtaaaaacagctaggcatggtggctcacgcctgtgattccaactcttagggagacagaggcaggaggatagcctgagcccaggagtttgagacctgcctgggcaatataacgagaccccattctccacaaaaagcgggggaaaaagacaacaaaacaaaagtaaaaacaggttcagaaaaattaagtatgtccctaaagtcacagaataataagtgatggaggtggaattcaaatgtaatattttgtttgttggtttgtttagttttgaaggtaacatactttttagtctacaacctatttaactacaaaagtgtgccaatcactggtattaggattggggcagatgtatactctgaaaataaaagtgcaaaataaatatcccatctggaaataaaagtgcaaaataaagagggaggaaaaatcagcccttccatttcttttcctttgtaatgccagttgaattggtttagtgagtagttttgcaagacttgtttcactttgtttttggacatagctgagccatgtacttcaaacagaaggcagccaattactaacttctggttgctaggtgtggcttcctttaaaatcctataaaatcagaagcccaagtctccactgccagtgtgaaatcttcagagaagaatttctctttagttctttgcaagaaggtagagataaaggtaagtcttggttttccttttagttagttttggttgttttgaaaacttttctcatcactatgttaaatgttactgcttctacaggatttatggttagttgcatttaacatgataagtcattcataaatctttctgtagaattacattggatatttatattttaggaatcacaaattacaatatttttgttctacttagttaacaaatacaagtaaaaataagataagtttgcttaatactggctcattgtactcttggtaagttaccatgagaaagaagggaagaatgtgctttccctctggtagccttaaaagaatgtgtttttcctttccttccccttgaaatatttcttcccaagagctgtgtgttttacagagaaatcgtgatgggggctgctttttgggggcaagaacaaaagtgataggagtgggctgcagggaactgtttcaaaatagtaggactttcataatttattttcttcttttgtaaggaaaacaagatagattcagacctcaaagtgctaatcatgctctttgtaataaacatttaaaaatatatgttatatttgcttatgctatttaaaataagaaggtccgcttattacttttttcatttaaagagggtgtggccacattccttttcttgtaggctctgtgtcatatacagtcttttcaagtgctggctggaaaacctaaaaagaagggaaatactttctgggtagtgtcagatacattatcctaggggaatgtcagtgaggccctccaacagctattccacttgattgttgcatgagctaatggccataaaactccttagaaaagcacaaagcaaaactaaagaagagtatttactagtgttggatatatttgtaaaagtgagattacaaatcatgtatctggctatttttttcttaaacatgttccttcaagaatttttctgttcgttcattttaaatatttattaaatgttctga

SEQ ID NO: 1337 - DNA, 6000 bp, Homo sapiens
tcatatactcaatttcccgctgctcttagtttcccctgttactaatattttggattgatgtggtccatttgttatattggtgaaccaatattgatacattattattagctaattgccatagtttacattagggcctactcttcatgttatacatttctatgtgttttgccaaatccataatgtatgcatacaccattacagtatcatacagaatagtttcacttccctaaaaatctcttttttttttttttttttttgagacatagtctcgctctgttgcctaggctggaatacaatggggcaatcttggctcactttaacctctgcttcccaggttcaagtgattctcctgcctcagccttctgagtagctgggaccacaggcgtgcaccaccacgcccagctaatttttttttgtattttagtagatggggtttcatcatgttggtcaggctggtcttgaactcctgacctgatgatccgccgcctcggcctcccaaagtgctgggattacaggtgtgagccaccatgcccagcccacttccctaaaagtctcttatttattactcctccctgccaccaactcctggcaaccattgatctttttactttctctatagtttgccttctccagaatgcatctcattggaatgaaacagacatagccttttcatactgtcttcctttacttagcgatactcatttatgattccttcatttcttttcctggtttaaaagcatttctttttatcattgagtaatagtccattacataaacgtactatagtccatgtattcacttacctcttgaaaaatatctcagctgcttccaatttctggtaattatgaataaactgctataagcatacatgtgcaggtttttgtgtaaacatgtttcctaactcatttgggtaaatatctaggagcacaattgctggattgcattgtaagactctgtttatctttgtaagaaactgccagactattttaaaacagctggaacctagaaagcagagtttgaccttttgaccttaacacatatcttcattttccttctgcaaaacttcttgaaaattattgaagtaaaatttgttattatagcgaatgtgacaaggtcttattctcttactttcgaataatatagagagggatatggatactatactcagggattaaacaaaataacttgtgcaatacaaaattactaatcctagcatgatcctgatgttggaagtatactagttgaatcaccaagtcattcgctgacttttcctaagtcacacagtaatagatactaagccaccaccaaatttgagtttttatcttctctaagattttccacccacaaaaggaaatatagagaggcagggaggtaagatctttttccctaagtgaagtccaacaaaggtacctccctttggctctagctacccacatgactacttcattaacctgaaagagtaaaatttgaaaaaaaattctgtctttaattcatgtgaataactgaggaataataataataataatctcaataactcagtgtgtgtgtgataattatttgccatgtttagaggcaaagggaaaacatttagaatgttagccctcaaaatgctttgacctggggacacatgagaaacacacactaaaataatgatttttgttggctgtggatagggggtatgaggaagctgtggggagattttggaatatctgtgaaatgctgttcttgatcattcagaatatactctttcttccatataacaagtaatgcttagatagagttaaatgtaaaggatgaggggacagcttactaagatcagatattttgcaagagtcttatgcacaatgagatgtatgtgagagactccatatttcctctccttgttttgttttgtttcctcttcactatcagattctaaaccaaatgagtgaaaataaacatgctgtgaaaaacgtaacatatagagattgattttaactgtcttttttctttccttctctttctttattttctctgtttgtaaagtaagtggagccgatgaatcatcatcttctagaaacagcaagagtggtgagtcatttctctggagtatgtggcatttcacccacagaaagcatttaacccatgattatcccctcactgttaatgataacatattttacttgttcttttatttccataaatctactcgacattattattatgcggagaaaaagattctgacagattattcacagcaatatacctacatgattagtggctttctttttgtgttatgtttgggagtttcacttgcctttagtgttacagctggaagttaattttggaaaaacattcttttcactttttttttcttaattctgctacaattatcatatttattgttgctattttaggtttgcctatgtattacaaatccaaacatataaaataattccattcagtttatggcactggtaatagcagcaacaaagcaaaatgagactatacatgttttctaggttgttatattttataaaaagtaagtggaattttttcttcatttcacaagagcatcactgtgcaggaatgttccaatagttccattaccagagttaggaatacaaacgcaaattaaagaaaaaaagaaaaccagattttgtataatcatcttattccttctcacctgatgacataaatatggtattagaaagttagtctacatctgtcaagatcaatttgcaataatatcaattaacttaacttgttagcaggtaactaattaattttcaacttacacatatgatagtaaaaacatatattgacattttcttaaatatttagattagatgatcatcctacttcaggatatgttgacttcattgatattggcatcgagcacttagaatgtattataaaatactgccaatctttagaaagtattttcattaacttcctaaacttcatgttttttatgtgaaatatctatgaggaaaagaggaaaaagaacaaaccactaaatgcagcataaattgagccataatgctgtgagattttacacctgtgcactttaatggaaacatcatataatactttgtagggtttaaagaagaatgaaaatgaaccactatggaagttaccagaaccaattttcctccattgggtgggaaatttcttatggaatgtgttctgtaatagttgctgctccattaatcctttcattttataggtctagttccttgttttggtgttcaactagtctacaatgtcaaagatgtgtatcaaaatgtatatataactgatctatattacagtttatatatatagttctatgtaactgactctatttaaaagaattaatgtagataggccttctgatgtcaatgcttttattgaatgtcataatgatcaaatttttggcattacctttgttcaaaattttgagccaatctggaactttattacttctatatttcttatttataacaacaagctatatctaggaacaaaagtcgtttattttttaaggcaagaaaaatataaatagaaaattattcggcactgtgtaatgttaaaatttacaaatatatgttatttctccattgtcacaagaattctagtgggtagacaacttagataatgctcctatatacaaaagtaaaaacagctaggcatggtggctcacgcctgtgattccaactcttagggagacagaggcaggaggatagcctgagcccaggagtttgagacctgcctgggcaatataacgagaccccattctccacaaaaagcgggggaaaaagacaacaaaacaaaagtaaaaacaggttcagaaaaattaagtatgtccctaaagtcacagaataataagtgatggaggtggaattcaaatgtaatattttgtttgttggtttgtttagttttgaaggtaacatactttttagtctacaacctatttaactacaaaagtgtgccaatcactggtattaggattggggcagatgtatactctgaaaataaaagtgcaaaataaatatcccatctggaaataaaagtgcaaaataaagagggaggaaaaatcagcccttccatttcttttcctttgtaatgccagttgaattggtttagtgagtagttttgcaagacttgtttcactttgtttttggacatagctgagccatgtacttcaaacagaaggcagccaattactaacttctggttgctaggtgtggcttcctttaaaatcctataaaatcagaagcccaagtctccactgccagtgtgaaatcttcagagaagaatttctctttagttctttgcaagaaggtagagataaaggtaagtcttggttttccttttagttagttttggttgttttgaaaacttttctcatcactatgttaaatgttactgcttctacaggatttatggttagttgcatttaacatgataagtcattcataaatctttctgtagaattacattggatatttatattttaggaatcacaaattacaatatttttgttctacttagttaacaaatacaagtaaaaataagataagtttgcttaatactggctcattgtactcttggtaagttaccatgagaaagaagggaagaatgtgctttccctctggtagccttaaaagaatgtgtttttcctttccttccccttgaaatatttcttcccaagagctgtgtgttttacagagaaatcgtgatgggggctgctttttgggggcaagaacaaaagtgataggagtgggctgcagggaactgtttcaaaatagtaggactttcataatttattttcttcttttgtaaggaaaacaagatagattcagacctcaaagtgctaatcatgctctttgtaataaacatttaaaaatatatgttatatttgcttatgctatttaaaataagaaggtccgcttattacttttttcatttaaagagggtgtggccacattccttttcttgtaggctctgtgtcatatacagtcttttcaagtgctggctggaaaacctaaaaagaagggaaatactttctgggtagtgtcagatacattatcctaggggaatgtcagtgaggccctccaacagctattccacttgattgttgcatgagctaatggccataaaactccttagaaaagcacaaagcaaaactaaagaagagtatttactagtgttggatatatttgtaaaagtgagattacaaatcatgtatctggctatttttttcttaaacatgttccttcaagaatttttctgttcgttcattttaaatatttattaaatgttctgatttcttatgttcactgctagctaattaacaaggatggaatttttcttgccttggttatatctaaaagattgtaaaaactttgagaaagcaatgttgccctctttccacaggagtattttggtagctgtaagagaatgcacattgcaaatgactcaaatgtggtaaaatgttggtttcataattctgaaatggcctcttccccaaaagtgacagtaacaccctagctccaggctcaaccacatccagcacatagccaacatttaacagatgttgacaaaatagttaataataatattattaaggaaccagccagagtttcatgcttattaaatactttttcaaccagaaggtctgcaaaggttgatttctgaatatgacgttagctctctctagacctattaatttacgacatttcaaatcagaggtaaaccagcagacctattatttttcaatgataaactataaacagttttttgaagtcaactatttccttttcctttaaaattggacagaatttcatcaggaagctcagaacaatccaatttatataatgccttccttcattatgctaattttcttcatcttcatctacttgaagtaatatttaagattggcacttcagagctgtaaatggatcttagatgataattacttcaacattcttattttataaacgaagaccctctggagaagctaaatgtttttcttga

SEQ ID NO: 1338 - DNA, 6000 bp, Homo sapiens
ccacatggcaagaaaggaagcaagagagagaatggggaggtgccagcctcgttaacaaccagctctcgtggttctcatgagcaagaactcattcccagtgacggcattaatctcttcatgagagatcagccccaggacccaaatacctccctctaggccccacctttaacactggggatcaaatttcaacatgaggtttggaggggaagaacatctaaaaccatcgcaagtaaaatcttgtatctgagctccttctagaaatgagtaatagaatacctttttctcaaaaaatattatttatctgagtttaagataattaagtaaatcatgcaattacatgctagagaagagcttacaatagaatgggatttctttcagggtgaccgatctgaggactttggtgtgaatgaagacttggctgattcagatgccagggtaaggaagtgcttacaaaatactgctgcagttcatcttcctaccttaagtggggctaccacatgatcccctgtgaaagcaaatctaagatcttctgagagaccaatggcttcttaatgttcatttcctgaatgaggcatgtctttctgtagcccccacacacaaaaaagtagtctttgtaagttttcaatatctctcattattcgtaaaaccagagagaactgaagaaggacaatacaaatttgatttgtcattcccaagaattgtttgttaaaaaaaactctgacctttcgttgtactaggtataagaaggggaaatgtaatttttttattatgtgcaatggaaagagtaagcatatttaacgttatttttaacagagaactttggaatggtttatagatgtcaatttatattgtcaaaatattactgcaatgatataacaagagtataggataaattataataatatatgctttctaacatattgttttatttagtttcagtgacattgctgattatttatatgccaaaccactggcaacataagaaaaatcatatcattttaaagcctggaatttccatttaaaacaaacaaacaactaatatttgcattatgccttctcatggaacagtattctctagagaattcattacagtgcttcactaaggatagagatttctttgtgcacccccatccacttctgctataccagtacattatcatgtacataataggcactcatgaactttttgttcaacaaatgcatacatatcagatcaatttgcttgaaaaatgcaaaataatttttacatacattgaaggttttatcattttaatagaaattgttcaagcatattaaggaacaagagttagcatttgaataattgcccataataaaaaattcttatttgcttttgacatttctgaatttgctttccattttaagactatcagggttcttaatatatatttatggaggttacatggattagtgtgacccaagagaatgatggtagtcaacatttcaaagttaataaagaccgcttgtgacaatagggcagggattatatttttcatatataaaagaaaaaaatctgtcatttagtaaggttgatctatttgtctaagattatgcagctttgaaattgcagagtcagaatttgaatacagaaattctaacatcaaaatgcaaggtccaggttacggttgaattattgatttataagtaacatttgctgataattactttgaacaacacagagtaaaaaatctttagagatccccttggagttgtcttactatagagcataatcttaaagcaatttagttcagcaaacatttattctgcaaacatatattcagactctagtgtttacaaggcaccttgagagaaactgtggaagatatttgacaaacaaaataaggtccctatctttaaagaacttgcaatcttattgttgactactctgattgtattgggcacaaagcgattgcctatataatctttgacaaggtctaacattattgtgcagatatcatttcagcagatagtgaagtgtttacttttgtgtttcttgacaggccttgtatgaagcaggagaaaggagaaaggggacagacgtaaacgtgttcaataccatccttaccaccagaagctatccacaacttcgcagaggtaacaataaatttctttttctggaatctgtttatggaagatgcaattttcttttttgatgacaaataagagaaagtaaaaacagaaccctttttcaatatcactcctgtatcaaacagatacagtgttcctgacccattgttatttgtcaatttgtccaattttgtacagccgctactttatcatatttaatacattttgtgacttgggcatgtggaacataattttgttattttcactgcttttactcccctaaaagatttggaatatgtgtgggaaaagacatgcataacagaacaaatgaaattagaatgaagaaaaacaaaaaaaaaaaaacaaaaaaccctcagagctaaatgaagaaagaaatatgtaggtgctttggaaaaacaacaacaagacaaaactcagaaaaagtcctggcctttgagtgcaagatttagctctgggcctcttggaagtgaaggcgatggaaaagttatgacaattaccaaagttcaccatcttataatagtatactgatttctactgttaaatgtaagagaaatttagtgcacaggtctttatataagggaagatccatttgctgtggctcttagaactgctgtaggaagtgctatagttgtcaatcacatgccgtttctaataactgtcaacatttgcaaacatttcgccaaaatatataggaataccaaaatggccaggtaagttacattcctaggagaggatgaagtattcacgttatgattaattgggtatattgctttaaaaggtgtagccaaagttgttattctaaaaaattctttgagtcagttgccttgattttgctaaagctttctaaagaaaaggatgttttgcatgtatcttagtttgaatttaatattcagtgtttcagaaatacaccaagtacagtaagcatgacatgaacaaagttctggacctggagttgaaaggtgacattgagaaatgcctcacagctatcggtatgtagtccagcagttgaaagagttttctaactagaaattgtattttcaaagctatcctatacttaacaagaacaacagcaacaaaaccaataaaagaaaacaaaaaacaatcagaagtagtgcatctgtttcaattgaagcaacgtaaaagattggcaaagtactataaccttaataacaatagatattattccccttttcaaaaatagagagagatagactatacttattgagcacctacttatatcaaacaatgtaccaggctgggcacaccacagaggcaattcagaatggtcactgagagcatgggatctggaataaatgtaacatctggataaatgtaacttcaagtcctggtctactgcttgttaattgtacaatcttgggcaggtccaggagagtctgattcagtgggtccgagttggcctctaaaaatcggtactttttaaagatctcccaggttattcagacaaccatcagggttggggaacctatgttctcaagcagtgtttctcattcatgactatgcacttgaatcccctggaaagcttgttaaaatgcagattctgattccccaggtctggggtggagcttagattctgcttttctaacaagctccccattgatgccaatgctgttggtccatagatctcgacaagatgaagaacactatgaactggaatgtgctagtattatttgggttctgttttatatttaagcccatcctatcccagagttttttcttcatttattcatttatttttacttatttgtttgtgcaactcttactttagacacagaggtacatgtgcacgtttgttccatgggtgttctgcactcaggcagtgagcatagtacccaataagtagttttttgaccaatgccccttctctccctgccctctctagtagtctgcagtgtctgttgttcatagggtgttctttttaaatgttcttatagtaacataaataaagtatttacataggcttgaacacctagtggcttctccactcccaaggagaatatatgttggatagcgcaaactactgaagttgctcttgagatgtatttaaggtaataaaaaaattgatcgtcagggaaaagaatattcaaaaccaccatctagagagtcacaaataccttctcagaagttaactgccctatattgggagatgagaggtgaagaatgatgatgagggatagaacactgttggcaaaattctatatttcctgtttctttcatatggatatttcatttttttcatggtaaatacatcaactaaaattttcttctctaacagtgaagtgcgccacaagcaaaccagctttctttgcagagaagcttcatcaagccatgaaagtatgtaccattctacttatatgtcctgcttagaggaagaattatttgtagaaagaacagaaaacctcatgttgtttgaaaatctcacatttaatatcttcccattaatgagaatcattgttctatttgatgaaagaggtaatacactaccttctcagaataaacttctgttagattcggtgcttttttttacagatgagattgtaaagtgagcctgtaagtgatttacggctcacttgtgatttgcttaaaacatgtgtcaccacgggaagggtgatgtactttcttttttaacgtgtaattttagtggcctacttcctctaaggttgtgagttttataatctcccactttatgagtctgatttgttgtttttattattctgtcttttatgccacagattaatagttgaaacttttgaaatgtcattctatgattaaggatgtagaatgatgtatttgagatcaactatgtcactttaactttactgtctgacatgcatggtattatacaaggtacctcttctattctgacattttgagcccacaaatgaatagttatgaagttatcttccttttttctttgcagctccaaaataaggaggttttcagagagagagagaaagaaagatctaactatttgaataatatgaaggaatattttgaatatatatgaataatttgaataatatgaaatgatagacatgctaggtactgctctgtagtggttagcatagttgctgccccctttctgccatagtctagtgtgatatttcgttgggtaatgatgaatacctggtgccatggaagagaaaagtgggacatatactccagactttggaaatccaggtagcattgctgtcagctaaattaacacctgaagtttaaatagaaatgagccagatgagggcaagagtggaagagatggggataaagcaagggtggtccaagaggaagaagtaacccacacacaggcttgaaggcaaaaggtaacataaccttctcaagacagtaagtatagagtgatggtgcacactggaagagatggtagaattaggcaggatattgtaagccttgaaaaagaattaggcaggatatcggaagccctgattagattctatcctaagagcaacagaagatcactgacagtgttttaaatagatagactagtttattagatttgcagtttagaagttccctttttttgtaattattggacagtgtagagaccggatggtgagagatgagttaggaagttgtgacagctctctatacctaccgctaatgtagaggattatttattttcatttcattaccattcgtgtaaggtgtgtgtgtgtgtgtgtgtgtgtgtgtgtgtatagctagtttctctatagaaattatatggaagagtaagaaggcttcactttaaaattcatgtttttaatgagagtattttctgaatatgagacacttaccctcatttattttggccagggtgttggaactcgccataaggcattgatcaggattatggtttcccgttctgaaattgacatgaat

SEQ ID NO: 1339 - DNA, 6000 bp, Homo sapiens
agcaagatgtacctaatcactcaaccaaaacttggggtgtcacccggactgtgtccttttcctcaggtaccaaggtctcaggtcctgtgatttctacttccttaaagtatctcattagttttctatacccaccatctgtgctaaattagtattaattaactatctttagagtgatacagccacatgctgagcatgatggacaaggaccttcaagctctaccttggttcacccctccatctcatctgagttctgggcatgatggaagagactcttctcctctccactcttgcctcttgccattaccttgccttggtcgtgattacctacagatgcctgaatgagtcatagtctttctcatatccaggattgtacccttgctgttttcctctgcctagatgccctcctttccaacccccactgtccaataacccaccaccgcaattgtccaccattttatcctgcttactcttattctcttttcaaatttttcatgagatgtcagcttctctaggaaacttccctgaaatcccagccttccctccaccctcaccctccactggcccttatctgaattaagcactctccctgcttgttttcttcgtcttctgaggctcctttctcgttatgctgtcactcaggggtccagagggcagagatggaatgctcaaattaggacaattcagggaggtgtgggagaggtgcagggggaccataagggatggagcaggaacccaaggtagtaatagcagagctggcaccaaccctaggctcaaaaagacaaaggagagagagtggttaccaaaacccagaaagagaaaacccggtaaaagacgggacctggtgaggagcagcaacctgtgtttggctgtggactgtggcaatcttgcagggaggagagcagaggaatgactatcttggcttcactctccttccttctccttcatctcatgtcaggtgccccattggctaaacctaccagcaaccagaggacaaggaatgcattaaaataatcttacggctcagagagtagattagatgtagagtgacaaatggattatatttagcacaatcgcaggtctatttgttgatccgtctccctcatcagactgagttacctgaggacagagaatgtttctcttatatctgtatccctaacatttggtggacactagatactcaagaaatgcttatggacgggatcagagaagatggtaaattgggcattagatggaggtttgtgctttctgagcttgccgcatgctttctggcgaatccaaggcaaaatgagaaacagaatgagctctgtacttttgtctggtaaaagaaaatatgatttggtgagaagaaatgaatacttttagcactcagtgctgggaggaactggaatcagtcatgtgactgcctctatcagaggctctcaactgcgtaacggacagaatctttaatggtgaaaccacaatgcagaaacattcttttttttttttttttttttttttttgagacggagtcttgctctgtcacccaggctggagtgcagtggcaccatctcggctcactgcaagctccgcctcccgggttcaccccattctcctgcctcagcctcccaagtagctgggactacaggcacctgccaccacacctggctaattttttgtatttttagtagaaatggggtttcaccgtgttagctaggatgctcttgatctcctgacctcgtgatctgcccgcctcggcctcccaaagtgggaaacattcttaaaaatattagcccttgataaaaccaaagccatgttacaaaaaagcaaccaaaaggtggaaatgagataatatggtccactttgagctgagaacatcttgccagaaaatgattgtctcagacttcaaatctgacctcctacataaaccttcagtgcaatcctccctgtattatctcttctctcatcagccaaaagatggaaaggataaactgaggaacttacgctggaggagcatggattcattagatggcagaaacctgggtttctgaatgactactgtggagctgatctctgcttatgccctgcaaacctttgtgctgagagcaagtaacacatttttaatgtgttaaacctctgggatttgttgggtcttatagcaatggttattttaccctaatacgactgtaaaataatgttctaaaatctacagtcgggtttgtttaaaatattatcgccatcattattataatccatagtccatatcataattatttttatagaagtccttctcaactggcatctcataatttgtggcttcttatattgttgccttctatgtgtgagatgcctctctgagtcctttttgctagggacatgatagaaaataaaatatccaacattctggtgtattttataatgtacaaagtcctgtttcatgcattatctctttagattctcccaacaaacccaaggaatatgtaagggtctataatcatcttcatttcacaggtgatgaaactgagacgtttacatgtaaagtggaaataaccacttatttatttatttatttattaaataaaaaccccgctaatttatttaaagattaattgagagaattatttcatctgtctggaacctggtatgtgttaagagaaaagttttcttaatttttctttttaagaagataatctattgctacataacaaaccactctgaaataatgacttaaaacattaaaagtcattgattttgctcacagaacttgaactggaagatataaacaactgggagtgagggtggggctggacagctggcttctctgggcatctctcgttctttctgtggttttgtcacatgtctctacatggcagccctagggtaatcatgacagctgaaggctttagagtgggtggagggggagagggagggagggaaagagagagagagagagagagagagaaagagaagcaagcaggcagaagctctaatgccttatgacctaaccttggaaataaattacactgtgccactgccactaccttttcttagaagcaagcagatagggttggtgaatatttattgagaggggaattagactccacctcttgattgggggagtgtcaaagaatttgtgaatatgtttttaaatgaccacatttcccctttctaaaatgcttgtctaaattggtgtacacaaaaagctcgggggttagtgactcatccaaggttattaagctgttaaatggttccaccaatactagatctaattttgtgactccaaatttcatgctctttttcactactccagataatctccggtgaacatcattgtccattagggtagttaagacattctagctgccaaatagattcagtccttttaattgcctcggacaatatattttttattttgcagaaaataaatattacccatatggcagtcatccataaacaccttccaagtttatcccaaacatctgtgttttaaattttttctcccaacagatgtattcatttgcattttcccagatgaatcactctttttttgttgttgttgttatttttgactgtatttctcacctctcaagacccttttgtattatcaagcccactgcttaagctaataccatctcccaatttggggacttccccttgattcctgtgtgcccttcctgtgggtcattaatgcaatgttatttaagactaggatttggctgggcgcagtggctcacgcctgtaatcccagcactgtgggaggccgagccgggaggatcacctgaggtcaggagttcaagaccagcctgaccaacatggtgaaaccacgtctctactaaaaatacaaaattagccgggcatagtcacatgcctgtaatcccagctactgggtagcctgaggcaggagaatcgcttgaacccgggaggcggaggcggagtttgcagtgagccaagatttcacaactgcactccagtctgggccacaagagcgaaaacccgtctcaaaaaaaaaaaaaagactaggatttgacataaggcctgaggggtattcttttgttttgttttgccttgttttcaagaggccaaaatcttcacagttgaaaatttctgttgaaccacagagatttgaaccaactcagtttagaaagcctggggatttgaacaacggtatggatcggaaatctcttcatctgtcagttttcatcattctaggcagtaaaatagatttccctttaggagcttttcaccgtttggggttctccagcagtgggatgtggggaatcaacccttcttcgtctccacccaaacattaggtgggagcaaggggtgggaagtagagaaagtggatagaggtctccagtggatatgggatctttgtgtagaccagcacagtcctcagaaatctcatgcaagcaacataggtactgttatattttctagtggccaccttttaaaaagtaaacaggtgaggccgggcgcggtggctcacgcctgtaatcccagcactttgggaggcccaggcgggcggatcacgaggtcaagagatggagaccatcctggtcgacacggtgaaaccccgtctctactaaaaatacaaaaattagctgggcatggtgacgcgcgactgtagtcctagctactggggaggccgaggcaggagaatcacttgaaccctggaggtggaggttgccacgctccactacactccagcctggcgacagagtgagactccgtctcaaaaaaaagaaagtaaacaggtgaaattaattttaataatatattttgtttaacccaacgtatccaaaatactatcatttgaaagtgtaatgaatataaaaatattcatgagatatttttcattctcatatccatactgtcttggactctaatgtgtattttacacttacagcacaattaatttgggactagctacatttcagctcaacaatagccaatagcatatgggatagcgcaaataaactctgcgtctctgttgcttctttgggtctcggagacctcaaccctttcttcagattgcaaaccttcttgccttcaagcctcggctccaacaccagtccggcagaggaacccagtctaatgaggtacgctcccttcctgccattctctattccattaacctgtttcgtggtaaacgtaggactgatcctccaaaattaccttattaattagcttacatatttattatctatctgtcccaccagaatgcaggtttccggaaggcagggatttaaaaaaatctgttttgttctatgtgattttcccataccaagcaccgtgcccggcacaagctgggatcccagtacacatctcgggacggaagaaccgtgtttccctagaacccagtcagagggcagcttagcaatgtgtcacaggtggggcgcccgcgttccgggcggacgcactggctccccggccggcgtgggtgtggggcgagtgggtgtgtgcggggtgtgcgcggtagagcgcgccagcgagcccggagcgcggagctgggaggagcagcgagcgccgcgcagaacccgcagcgccggcctggcagggcagctcggaggtgggtgggccgcgccgccagcccgcttgcagggtccccattggccgcctgccggccgccctccgcccaaaaggcggcaaggagccgagaggctgcttcggagtgtgaggaggacagccggaccgagccaacgccggggactttgttccctccgcggaggggactcggcaactcgcagcggcagggtctggggccggcgcctgggagggatctgcgccccccactcactccctagctgtgttcccgccgccgccccggctagtctccggcgctggcgcctatggtcggcctccgacagcgctccggagggaccgggggagctcccaggcgcccgggtgagtagccaggcgcggctccccggtccccccgacccccggcgccagcttttgctttcccagccagggcgcggtggggtttgtccgggcagtgcctcgagcaactgggaaggccaaggc

SEQ ID NO: 1340 - DNA, 6000 bp, Homo sapiens
ggaccataagggatggagcaggaacccaaggtagtaatagcagagctggcaccaaccctaggctcaaaaagacaaaggagagagagtggttaccaaaacccagaaagagaaaacccggtaaaagacgggacctggtgaggagcagcaacctgtgtttggctgtggactgtggcaatcttgcagggaggagagcagaggaatgactatcttggcttcactctccttccttctccttcatctcatgtcaggtgccccattggctaaacctaccagcaaccagaggacaaggaatgcattaaaataatcttacggctcagagagtagattagatgtagagtgacaaatggattatatttagcacaatcgcaggtctatttgttgatccgtctccctcatcagactgagttacctgaggacagagaatgtttctcttatatctgtatccctaacatttggtggacactagatactcaagaaatgcttatggacgggatcagagaagatggtaaattgggcattagatggaggtttgtgctttctgagcttgccgcatgctttctggcgaatccaaggcaaaatgagaaacagaatgagctctgtacttttgtctggtaaaagaaaatatgatttggtgagaagaaatgaatacttttagcactcagtgctgggaggaactggaatcagtcatgtgactgcctctatcagaggctctcaactgcgtaacggacagaatctttaatggtgaaaccacaatgcagaaacattcttttttttttttttttttttttttttgagacggagtcttgctctgtcacccaggctggagtgcagtggcaccatctcggctcactgcaagctccgcctcccgggttcaccccattctcctgcctcagcctcccaagtagctgggactacaggcacctgccaccacacctggctaattttttgtatttttagtagaaatggggtttcaccgtgttagctaggatgctcttgatctcctgacctcgtgatctgcccgcctcggcctcccaaagtgggaaacattcttaaaaatattagcccttgataaaaccaaagccatgttacaaaaaagcaaccaaaaggtggaaatgagataatatggtccactttgagctgagaacatcttgccagaaaatgattgtctcagacttcaaatctgacctcctacataaaccttcagtgcaatcctccctgtattatctcttctctcatcagccaaaagatggaaaggataaactgaggaacttacgctggaggagcatggattcattagatggcagaaacctgggtttctgaatgactactgtggagctgatctctgcttatgccctgcaaacctttgtgctgagagcaagtaacacatttttaatgtgttaaacctctgggatttgttgggtcttatagcaatggttattttaccctaatacgactgtaaaataatgttctaaaatctacagtcgggtttgtttaaaatattatcgccatcattattataatccatagtccatatcataattatttttatagaagtccttctcaactggcatctcataatttgtggcttcttatattgttgccttctatgtgtgagatgcctctctgagtcctttttgctagggacatgatagaaaataaaatatccaacattctggtgtattttataatgtacaaagtcctgtttcatgcattatctctttagattctcccaacaaacccaaggaatatgtaagggtctataatcatcttcatttcacaggtgatgaaactgagacgtttacatgtaaagtggaaataaccacttatttatttatttatttattaaataaaaaccccgctaatttatttaaagattaattgagagaattatttcatctgtctggaacctggtatgtgttaagagaaaagttttcttaatttttctttttaagaagataatctattgctacataacaaaccactctgaaataatgacttaaaacattaaaagtcattgattttgctcacagaacttgaactggaagatataaacaactgggagtgagggtggggctggacagctggcttctctgggcatctctcgttctttctgtggttttgtcacatgtctctacatggcagccctagggtaatcatgacagctgaaggctttagagtgggtggagggggagagggagggagggaaagagagagagagagagagagagagaaagagaagcaagcaggcagaagctctaatgccttatgacctaaccttggaaataaattacactgtgccactgccactaccttttcttagaagcaagcagatagggttggtgaatatttattgagaggggaattagactccacctcttgattgggggagtgtcaaagaatttgtgaatatgtttttaaatgaccacatttcccctttctaaaatgcttgtctaaattggtgtacacaaaaagctcgggggttagtgactcatccaaggttattaagctgttaaatggttccaccaatactagatctaattttgtgactccaaatttcatgctctttttcactactccagataatctccggtgaacatcattgtccattagggtagttaagacattctagctgccaaatagattcagtccttttaattgcctcggacaatatattttttattttgcagaaaataaatattacccatatggcagtcatccataaacaccttccaagtttatcccaaacatctgtgttttaaattttttctcccaacagatgtattcatttgcattttcccagatgaatcactctttttttgttgttgttgttatttttgactgtatttctcacctctcaagacccttttgtattatcaagcccactgcttaagctaataccatctcccaatttggggacttccccttgattcctgtgtgcccttcctgtgggtcattaatgcaatgttatttaagactaggatttggctgggcgcagtggctcacgcctgtaatcccagcactgtgggaggccgagccgggaggatcacctgaggtcaggagttcaagaccagcctgaccaacatggtgaaaccacgtctctactaaaaatacaaaattagccgggcatagtcacatgcctgtaatcccagctactgggtagcctgaggcaggagaatcgcttgaacccgggaggcggaggcggagtttgcagtgagccaagatttcacaactgcactccagtctgggccacaagagcgaaaacccgtctcaaaaaaaaaaaaaagactaggatttgacataaggcctgaggggtattcttttgttttgttttgccttgttttcaagaggccaaaatcttcacagttgaaaatttctgttgaaccacagagatttgaaccaactcagtttagaaagcctggggatttgaacaacggtatggatcggaaatctcttcatctgtcagttttcatcattctaggcagtaaaatagatttccctttaggagcttttcaccgtttggggttctccagcagtgggatgtggggaatcaacccttcttcgtctccacccaaacattaggtgggagcaaggggtgggaagtagagaaagtggatagaggtctccagtggatatgggatctttgtgtagaccagcacagtcctcagaaatctcatgcaagcaacataggtactgttatattttctagtggccaccttttaaaaagtaaacaggtgaggccgggcgcggtggctcacgcctgtaatcccagcactttgggaggcccaggcgggcggatcacgaggtcaagagatggagaccatcctggtcgacacggtgaaaccccgtctctactaaaaatacaaaaattagctgggcatggtgacgcgcgactgtagtcctagctactggggaggccgaggcaggagaatcacttgaaccctggaggtggaggttgccacgctccactacactccagcctggcgacagagtgagactccgtctcaaaaaaaagaaagtaaacaggtgaaattaattttaataatatattttgtttaacccaacgtatccaaaatactatcatttgaaagtgtaatgaatataaaaatattcatgagatatttttcattctcatatccatactgtcttggactctaatgtgtattttacacttacagcacaattaatttgggactagctacatttcagctcaacaatagccaatagcatatgggatagcgcaaataaactctgcgtctctgttgcttctttgggtctcggagacctcaaccctttcttcagattgcaaaccttcttgccttcaagcctcggctccaacaccagtccggcagaggaacccagtctaatgaggtacgctcccttcctgccattctctattccattaacctgtttcgtggtaaacgtaggactgatcctccaaaattaccttattaattagcttacatatttattatctatctgtcccaccagaatgcaggtttccggaaggcagggatttaaaaaaatctgttttgttctatgtgattttcccataccaagcaccgtgcccggcacaagctgggatcccagtacacatctcgggacggaagaaccgtgtttccctagaacccagtcagagggcagcttagcaatgtgtcacaggtggggcgcccgcgttccgggcggacgcactggctccccggccggcgtgggtgtggggcgagtgggtgtgtgcggggtgtgcgcggtagagcgcgccagcgagcccggagcgcggagctgggaggagcagcgagcgccgcgcagaacccgcagcgccggcctggcagggcagctcggaggtgggtgggccgcgccgccagcccgcttgcagggtccccattggccgcctgccggccgccctccgcccaaaaggcggcaaggagccgagaggctgcttcggagtgtgaggaggacagccggaccgagccaacgccggggactttgttccctccgcggaggggactcggcaactcgcagcggcagggtctggggccggcgcctgggagggatctgcgccccccactcactccctagctgtgttcccgccgccgccccggctagtctccggcgctggcgcctatggtcggcctccgacagcgctccggagggaccgggggagctcccaggcgcccgggtgagtagccaggcgcggctccccggtccccccgacccccggcgccagcttttgctttcccagccagggcgcggtggggtttgtccgggcagtgcctcgagcaactgggaaggccaaggcggagggaaacttggcttcggggagaagtgcgatcgcagccgggaggcttccccagccccgcgggccgggtgagaacaggtggcgccggcccgaccaggcgctttgtgtcggggcgcgaggatctggagcgaactgctgcgcctcggtgggccgctcccttccctcccttgctcccccgggcggccgcacgccgggtcggccgggtaacggagagggagtcgccaggaatgtggctctggggactgcctcgctcggggaaggggagagggtggccacggtgttaggagaggcgcgggagccgagaggtggcgcgggggtgccaccgttgccgcaggctggagagagattgctcccagtgaggcgcgtaccgtctgggcgagggcttcattcttccgcggcgtccctggaggtgggaaagctgggtgggcatgtgtgcagagaaaggggaggcggggaggccagtcacttccggagccggttctgatcccaacagaccgcccagcgtttggggacgccgacctcggggtgccgtggtgcccggccccacgcgcgcgcggggctgaggggtcgggggcgtccctggccgcccagctttaacaaagggtgctcctctccaccccgcgaggaggggcagctccggagacccggtcttcagcgagcggggtcttagcgccggggaggtctacttccttttggggttgccattt

SEQ ID NO: 1341 - DNA, 6000 bp, Homo sapiens
gctgggactacaggcacctgccaccacacctggctaattttttgtatttttagtagaaatggggtttcaccgtgttagctaggatgctcttgatctcctgacctcgtgatctgcccgcctcggcctcccaaagtgggaaacattcttaaaaatattagcccttgataaaaccaaagccatgttacaaaaaagcaaccaaaaggtggaaatgagataatatggtccactttgagctgagaacatcttgccagaaaatgattgtctcagacttcaaatctgacctcctacataaaccttcagtgcaatcctccctgtattatctcttctctcatcagccaaaagatggaaaggataaactgaggaacttacgctggaggagcatggattcattagatggcagaaacctgggtttctgaatgactactgtggagctgatctctgcttatgccctgcaaacctttgtgctgagagcaagtaacacatttttaatgtgttaaacctctgggatttgttgggtcttatagcaatggttattttaccctaatacgactgtaaaataatgttctaaaatctacagtcgggtttgtttaaaatattatcgccatcattattataatccatagtccatatcataattatttttatagaagtccttctcaactggcatctcataatttgtggcttcttatattgttgccttctatgtgtgagatgcctctctgagtcctttttgctagggacatgatagaaaataaaatatccaacattctggtgtattttataatgtacaaagtcctgtttcatgcattatctctttagattctcccaacaaacccaaggaatatgtaagggtctataatcatcttcatttcacaggtgatgaaactgagacgtttacatgtaaagtggaaataaccacttatttatttatttatttattaaataaaaaccccgctaatttatttaaagattaattgagagaattatttcatctgtctggaacctggtatgtgttaagagaaaagttttcttaatttttctttttaagaagataatctattgctacataacaaaccactctgaaataatgacttaaaacattaaaagtcattgattttgctcacagaacttgaactggaagatataaacaactgggagtgagggtggggctggacagctggcttctctgggcatctctcgttctttctgtggttttgtcacatgtctctacatggcagccctagggtaatcatgacagctgaaggctttagagtgggtggagggggagagggagggagggaaagagagagagagagagagagagagaaagagaagcaagcaggcagaagctctaatgccttatgacctaaccttggaaataaattacactgtgccactgccactaccttttcttagaagcaagcagatagggttggtgaatatttattgagaggggaattagactccacctcttgattgggggagtgtcaaagaatttgtgaatatgtttttaaatgaccacatttcccctttctaaaatgcttgtctaaattggtgtacacaaaaagctcgggggttagtgactcatccaaggttattaagctgttaaatggttccaccaatactagatctaattttgtgactccaaatttcatgctctttttcactactccagataatctccggtgaacatcattgtccattagggtagttaagacattctagctgccaaatagattcagtccttttaattgcctcggacaatatattttttattttgcagaaaataaatattacccatatggcagtcatccataaacaccttccaagtttatcccaaacatctgtgttttaaattttttctcccaacagatgtattcatttgcattttcccagatgaatcactctttttttgttgttgttgttatttttgactgtatttctcacctctcaagacccttttgtattatcaagcccactgcttaagctaataccatctcccaatttggggacttccccttgattcctgtgtgcccttcctgtgggtcattaatgcaatgttatttaagactaggatttggctgggcgcagtggctcacgcctgtaatcccagcactgtgggaggccgagccgggaggatcacctgaggtcaggagttcaagaccagcctgaccaacatggtgaaaccacgtctctactaaaaatacaaaattagccgggcatagtcacatgcctgtaatcccagctactgggtagcctgaggcaggagaatcgcttgaacccgggaggcggaggcggagtttgcagtgagccaagatttcacaactgcactccagtctgggccacaagagcgaaaacccgtctcaaaaaaaaaaaaaagactaggatttgacataaggcctgaggggtattcttttgttttgttttgccttgttttcaagaggccaaaatcttcacagttgaaaatttctgttgaaccacagagatttgaaccaactcagtttagaaagcctggggatttgaacaacggtatggatcggaaatctcttcatctgtcagttttcatcattctaggcagtaaaatagatttccctttaggagcttttcaccgtttggggttctccagcagtgggatgtggggaatcaacccttcttcgtctccacccaaacattaggtgggagcaaggggtgggaagtagagaaagtggatagaggtctccagtggatatgggatctttgtgtagaccagcacagtcctcagaaatctcatgcaagcaacataggtactgttatattttctagtggccaccttttaaaaagtaaacaggtgaggccgggcgcggtggctcacgcctgtaatcccagcactttgggaggcccaggcgggcggatcacgaggtcaagagatggagaccatcctggtcgacacggtgaaaccccgtctctactaaaaatacaaaaattagctgggcatggtgacgcgcgactgtagtcctagctactggggaggccgaggcaggagaatcacttgaaccctggaggtggaggttgccacgctccactacactccagcctggcgacagagtgagactccgtctcaaaaaaaagaaagtaaacaggtgaaattaattttaataatatattttgtttaacccaacgtatccaaaatactatcatttgaaagtgtaatgaatataaaaatattcatgagatatttttcattctcatatccatactgtcttggactctaatgtgtattttacacttacagcacaattaatttgggactagctacatttcagctcaacaatagccaatagcatatgggatagcgcaaataaactctgcgtctctgttgcttctttgggtctcggagacctcaaccctttcttcagattgcaaaccttcttgccttcaagcctcggctccaacaccagtccggcagaggaacccagtctaatgaggtacgctcccttcctgccattctctattccattaacctgtttcgtggtaaacgtaggactgatcctccaaaattaccttattaattagcttacatatttattatctatctgtcccaccagaatgcaggtttccggaaggcagggatttaaaaaaatctgttttgttctatgtgattttcccataccaagcaccgtgcccggcacaagctgggatcccagtacacatctcgggacggaagaaccgtgtttccctagaacccagtcagagggcagcttagcaatgtgtcacaggtggggcgcccgcgttccgggcggacgcactggctccccggccggcgtgggtgtggggcgagtgggtgtgtgcggggtgtgcgcggtagagcgcgccagcgagcccggagcgcggagctgggaggagcagcgagcgccgcgcagaacccgcagcgccggcctggcagggcagctcggaggtgggtgggccgcgccgccagcccgcttgcagggtccccattggccgcctgccggccgccctccgcccaaaaggcggcaaggagccgagaggctgcttcggagtgtgaggaggacagccggaccgagccaacgccggggactttgttccctccgcggaggggactcggcaactcgcagcggcagggtctggggccggcgcctgggagggatctgcgccccccactcactccctagctgtgttcccgccgccgccccggctagtctccggcgctggcgcctatggtcggcctccgacagcgctccggagggaccgggggagctcccaggcgcccgggtgagtagccaggcgcggctccccggtccccccgacccccggcgccagcttttgctttcccagccagggcgcggtggggtttgtccgggcagtgcctcgagcaactgggaaggccaaggcggagggaaacttggcttcggggagaagtgcgatcgcagccgggaggcttccccagccccgcgggccgggtgagaacaggtggcgccggcccgaccaggcgctttgtgtcggggcgcgaggatctggagcgaactgctgcgcctcggtgggccgctcccttccctcccttgctcccccgggcggccgcacgccgggtcggccgggtaacggagagggagtcgccaggaatgtggctctggggactgcctcgctcggggaaggggagagggtggccacggtgttaggagaggcgcgggagccgagaggtggcgcgggggtgccaccgttgccgcaggctggagagagattgctcccagtgaggcgcgtaccgtctgggcgagggcttcattcttccgcggcgtccctggaggtgggaaagctgggtgggcatgtgtgcagagaaaggggaggcggggaggccagtcacttccggagccggttctgatcccaacagaccgcccagcgtttggggacgccgacctcggggtgccgtggtgcccggccccacgcgcgcgcggggctgaggggtcgggggcgtccctggccgcccagctttaacaaagggtgctcctctccaccccgcgaggaggggcagctccggagacccggtcttcagcgagcggggtcttagcgccggggaggtctacttccttttggggttgccattttactattattattgccttttttttttcttcaaaaggactggagactgatgcatgagggggctacggaggcgcaggagcggtggtgatggtctgggaagcggagctgaagtgccctgggctttggtgaggcgtgacagtttatcatgaccgtgttcaggcaggaaaacgtggatgattactacgacaccggcgaggaacttggcaggtaaagggggtaccagaagcgtaccctcctggattgtggaaatgcataacgatggggccattgggtggtaaacaaatgcagtttgaatcaggcgtctccctcgccctttctggagatgcgcaaatcatagagaaaagagttactaacccagcggtaaaccgcctgatccaagggcctgggggtggaggagaggcagcagttcagggctagattatgatgcacagtatattgatccagtcccctggacaaaatcagatttaattgtccgtgctaactcttgtcagcccttgcccttctgtgacaacaggacaaacactaagattataattgcaattggagttagcttttatgtgtgatttaaacggagggtacaaactaattaataggttttaaaaatcttagtactttaccctctatctaaattttcagtgtaatttgagcaagtattggtaggtggtaaatggagacttgccagatgttgacattgggcttggattttgaaacttcttccaaccaggaatttaattacctggttggtgttggtggttgctttggtttcatttacaatgttaaatttttaacaaatcaatgagagtctaatatggctatctggattcagagcatacctccattgctgtagcagctgtgattctcagtgtaaaatctttcagtttctaggtaaacaaagaatagtttctt

SEQ ID NO: 1342 - DNA, 6000 bp, Homo sapiens
ttccatgttatcccaacttcttatgctaatttaataaggtgaatgtgtaagcatcctgaataaggagatgtttcaaaaaattgtcatataacacattttcataatttgagagctttaattttttttcttggatttttattttagcctaaagatacacaacaggcacttagtagaaaagcatcagcagtaaacatggagaaattcaagaagtttgcagcccggaaaaaatggaaagtaagattgtttgttgtggagggattaacaaattctgtttcctgtgtagagtagtgtgtggtcagggtgcatctcctctgatactggtaatatggaagatacatcctttcctctttttaatccaccctgtagtgttctgcaccattactctattttgaaaaacaagcaaaaacaatattttagtcactttaactgataccattaaatgtaattttgtgttgttttcatcaaaactattctcagtgcaaatttttatagcagcactgtaaaattatagtgaaatttttttctaatactacaagccacattttaaataaattcattctttgtggtaagcagcatgagattacatttgtgctgtaccttgggtaagtgggtctctcagcccagcctttatctgtgagtggttggagtgggggtggggtggggccgtgagcatttgcagggtggcctgttctccttcctcagtgtggatggcctccacaggggctgggtaggacattgctctgaaggcattgcagacctcctggaacaaatcacacttcagggctaagaaggtgatgggatggtttcctgtgcccagggtcatgtcaaacctagaggaagtgggtacctaccgtgtcttcccagctcagggccagaaatgtacctcgttttcacacctaccaattttggggtgccgtggtagggatgaggaagaccacagcactagattcccaaaagtccttagaattaggcttaaaatagagagagagcaaccatttctctttctcgctctcattctttaactgtacttttgccttagagagtaaatgcagagatgtttgttctatagactaagaggtcccccagctgttcacttccaacagctgttgcgttttggttatcacattgtctaccatcactgcttatgtggcacaaaggacacagagcaaggcccctgcagtctgtgcttctctgagggtgatctgcaagggtcagatcaccttctccaaacagcagagaagaaaatatagagagagaaaggatgtggggtgtccagctctgtagttcaataatgaaacatggaaggagaatctctatatcctgttgtcttgatttataagacctttaaaattattctttaagcaaatacaacccattctgctgtaggattgcccaccctgggagagtgtgtgctgatagcaatgaacacgatctcgcaggctttgtcgtttgtactcatttgacaattgttacataagctgtctctcctcctctcaccctgcctttttcctccccgccctccctttttttttttttttttttaaaaaaaagcaatccgttcgcttgatatcactgtgccaaagattatccaggtcattcctgtccagaagtaacatgagtgttgccagaagcgatgatactctggtaagcaaacccgtgagccctggtgctcctttcttagcactgggtactcagaatgaccaagctgttctatttgttcaacctcccaggaacctgaagttgtggaaatggcaagcttattcttgatcccctcggaggggtttgggggtgctgattgatgcaccctcttgcttctttcctctttttttctctttgatttggatggtgctgtcccccctcatagccccatacctctaacactaccctccacctcgatgcaaacataagcacagaccacccccgcaacacacacacatacacacatgcacagcaaatgcacacacatagagacacacgcactgatattttggtaaaagagaggctagccagcagaagagaaaagagcttatcctaattttcatgaactgtagccactgacatagaagaatcttggttaacagtagcacagaaggggcagacagccgccactcccttcccacacacccacaccagagaatcagggagaatgcagtgctgcttgctgatgtgtctcctagcagaccagaaggccaaacctgcttgcatgattggcctggtgttgactgcccaaggcccttgaatgtaactccaactttcttagttttaatgtgaactttgacaaagtggcaaagatttatcaaatttgttgttcggtactctctagttatttttcctttgtaattagaaatgcatttattttccaatttctagcctttattttctttattttcccctctaatccaaactgaaacctaatcacagataagctcttcagatacgagtggaagtgtccgaattcaacaagactttcccctgacaatcaaacaacggggctttgttaagtcaggaggtgaaggggactccagacaaggcagccacggttgtcctgcgggaactaccctgcccctttaactgaatagtcagcattttcccggtggagccaagtacttcagggtgggaactgcaaacaccaagctccccttttttctccttaagttagtagcttcactgaggcttcacatctagccttgtggagtgaaatgggattggagatgtttgaaaaaaaaagcaaaagagaagcagattagggcgagaagagagagaagaggaggctttgtttgggaattgttagagggtggctgcacaaccagtgaaaagataaaaactgtgactctaggtaagataatgagaatgattaaagattgcaaattgaaatcactgaatattcaactgagagacaatacatgtgtcacagtgaaaagtttagggtaggagagggaccaagggtcttgtaggagctccaggtggaaagataccctcccagaggtcagattcccttatttccatattctaatcatggggatgagtcataacaatctgctttattccttctgttttccccatttctcttgacttgcactttcatgtaaacgcctcttagtcattgacttcaattgtgatagaaaagcattcttaaacatgcattttatacaaatattactaaaacccacatgaaaagtgtttggattcagatctatagagaagagaaagcagatggagagaaatgctttctccattctcccccacaagcagagattcagcctctgtagattaacttttccagatttgaaattccagtggtcataattctgtgtttataagttcagaaattttgtttaggatttttctagctaattccttagttttaatgtgaattttgaaagagtggcaaagatttttccagtttttgttcactactcttccagttatttttcctttgtaattagaaatgcatcagttttctgatttctagcctttattttctttatttagagcctattgttttaatttttatttttctgttttttataattgggaccagctttcagagatttttgccgtgttattctatacctagcaatggaagaaattcaagtgatcagaaaacaattctgtaattggaaaaattgcaaattgagaatatcttattcaaaggtatcatttctttgctgcaataggcttttctttttccttatccaggaagagagtctgtgttatacctaaaaattttcacagtggttttaggaactatgttttgacagattcttaagataaacacaaagggttacttatcatcattatttgaaatctggatcttggacattgtgtctctgggctatactgcaggtgatattaaagcccagataaagagtagatagtgcttgtttgcaacatggaaggggcaaaaattccttcctaggtccctccatgactgtatggatttggggagtaaatggcttactttcctctgaatgcccctgttaacaagtgagcacaggtttcttttatgttggtaagaaaagcatggctagcaatgtaactctgtttccatcttggctgtctctctcaaggatgaggaagactcctttgtgatgaaagccatcatccatgccatcaacgatgacaatgtcccaggcctgcagcaccttctgggctcattatccaactatgatgttaaccaacccaacaaggtctggttctgttctgccgcatactggaggggtgggtcacagcgaccttgcccttccatatccaaggaaagaccccatctgcttctccattctcccttccaattggaagctccatactgtggggaaaatcacttctgtttagaaagtgatttgagttacaaataaggtctttgtgcattgagggccttccttcattcacgtattgtatctctacccatgaaattttagatcttctcatcctgctaatgaaaatgtccctgatgatgagaatccaaaaggggaaggaaaggttttatacccttccacctgtcttctcttcctgccacgcagtggtagctctatgtctgttgagacaggggaaggtgtgtggtaacagcaatcatcgtttgggcttttcctttcctaccaaacctgaaaattagtaatttttttcttgcctattctagcacgggacacctccattactcattgctgctggctgtgggaatattcaaatactacagttgctcattaaaagaggctcgagaatcgatgtccaggataaggtcataattgttttattgaaatgaattgaattttaaagtattttcaagtgtctcttaatcataggggtaacagaggaaaaaaatttatgtcctaacttgtttctcagtttcctgtaaaggaagatgagctgcttttaaacagcttggtacagcctgacacatgggttaaagaggcaaacatttatcatttatcctccccttggcgctgctgcttgacatcagcatttctttgtacactacccagattttacttcttaccgatcacatttactcaacaatgttagatgtcacacatgaaaaagttttgttatctaattattctcatcagaaatttgtttgcctgcttctgcagacgtcagcagagctgtaagtggagtagatctggccctctgcagtaagggaatcctaaccagagaggggagatgagggtttacaaacataaaataattgtttataagcaattgtttattttgaaatcatttttgatttacaaaaaaaagttggaaaagtggtacagagagttccatcattcgcttcacccaggtgcccctaatgctagcatcttgtgtaaccacggtacatttgtcaaaggtgtaaaatagaatgagggttttattcctctgggaagttgctcctctggggtttgtcatcacacaggaagggaaataacagtgagtctgaggaatgcatgcatctggtgctgtcagctccctagaaatgtgaccccaggttgattttcctgcagggcgggtccaatgccgtctactgggctgctcggcatggccacgtcgataccttgaaatttctcagtgagaacaaatgccctttggatgtgaaagacaaggtaaggccacttctcttaggaggaacatgaggtggtagtaaatggatgcatgtgagtgtgagtgctggcctaccgtgtgcatcgggacccaaaggaaaggaatcaggaccagaattcacctgcagaacatttaagttggaaatgtcttgttgcctgtggtttggtctaatactgaaatcagccttaagtcaaaatctttcaggtagttgccataatacgcacgcattgaattataatccccataacataaaaacctcaaagttctagtacagacaaccagagagagacctcggtctcgattcgattttcttcctgactcaaccttgtgcttttaagcggatctctcctattctcttcttctttgaagtggctgacagtgctgacctgacaatcacagacactagaagatattaatgagaca

SEQ ID NO: 1343 - DNA, 6000 bp, Homo sapiens
tgtcttcccagctcagggccagaaatgtacctcgttttcacacctaccaattttggggtgccgtggtagggatgaggaagaccacagcactagattcccaaaagtccttagaattaggcttaaaatagagagagagcaaccatttctctttctcgctctcattctttaactgtacttttgccttagagagtaaatgcagagatgtttgttctatagactaagaggtcccccagctgttcacttccaacagctgttgcgttttggttatcacattgtctaccatcactgcttatgtggcacaaaggacacagagcaaggcccctgcagtctgtgcttctctgagggtgatctgcaagggtcagatcaccttctccaaacagcagagaagaaaatatagagagagaaaggatgtggggtgtccagctctgtagttcaataatgaaacatggaaggagaatctctatatcctgttgtcttgatttataagacctttaaaattattctttaagcaaatacaacccattctgctgtaggattgcccaccctgggagagtgtgtgctgatagcaatgaacacgatctcgcaggctttgtcgtttgtactcatttgacaattgttacataagctgtctctcctcctctcaccctgcctttttcctccccgccctccctttttttttttttttttttaaaaaaaagcaatccgttcgcttgatatcactgtgccaaagattatccaggtcattcctgtccagaagtaacatgagtgttgccagaagcgatgatactctggtaagcaaacccgtgagccctggtgctcctttcttagcactgggtactcagaatgaccaagctgttctatttgttcaacctcccaggaacctgaagttgtggaaatggcaagcttattcttgatcccctcggaggggtttgggggtgctgattgatgcaccctcttgcttctttcctctttttttctctttgatttggatggtgctgtcccccctcatagccccatacctctaacactaccctccacctcgatgcaaacataagcacagaccacccccgcaacacacacacatacacacatgcacagcaaatgcacacacatagagacacacgcactgatattttggtaaaagagaggctagccagcagaagagaaaagagcttatcctaattttcatgaactgtagccactgacatagaagaatcttggttaacagtagcacagaaggggcagacagccgccactcccttcccacacacccacaccagagaatcagggagaatgcagtgctgcttgctgatgtgtctcctagcagaccagaaggccaaacctgcttgcatgattggcctggtgttgactgcccaaggcccttgaatgtaactccaactttcttagttttaatgtgaactttgacaaagtggcaaagatttatcaaatttgttgttcggtactctctagttatttttcctttgtaattagaaatgcatttattttccaatttctagcctttattttctttattttcccctctaatccaaactgaaacctaatcacagataagctcttcagatacgagtggaagtgtccgaattcaacaagactttcccctgacaatcaaacaacggggctttgttaagtcaggaggtgaaggggactccagacaaggcagccacggttgtcctgcgggaactaccctgcccctttaactgaatagtcagcattttcccggtggagccaagtacttcagggtgggaactgcaaacaccaagctccccttttttctccttaagttagtagcttcactgaggcttcacatctagccttgtggagtgaaatgggattggagatgtttgaaaaaaaaagcaaaagagaagcagattagggcgagaagagagagaagaggaggctttgtttgggaattgttagagggtggctgcacaaccagtgaaaagataaaaactgtgactctaggtaagataatgagaatgattaaagattgcaaattgaaatcactgaatattcaactgagagacaatacatgtgtcacagtgaaaagtttagggtaggagagggaccaagggtcttgtaggagctccaggtggaaagataccctcccagaggtcagattcccttatttccatattctaatcatggggatgagtcataacaatctgctttattccttctgttttccccatttctcttgacttgcactttcatgtaaacgcctcttagtcattgacttcaattgtgatagaaaagcattcttaaacatgcattttatacaaatattactaaaacccacatgaaaagtgtttggattcagatctatagagaagagaaagcagatggagagaaatgctttctccattctcccccacaagcagagattcagcctctgtagattaacttttccagatttgaaattccagtggtcataattctgtgtttataagttcagaaattttgtttaggatttttctagctaattccttagttttaatgtgaattttgaaagagtggcaaagatttttccagtttttgttcactactcttccagttatttttcctttgtaattagaaatgcatcagttttctgatttctagcctttattttctttatttagagcctattgttttaatttttatttttctgttttttataattgggaccagctttcagagatttttgccgtgttattctatacctagcaatggaagaaattcaagtgatcagaaaacaattctgtaattggaaaaattgcaaattgagaatatcttattcaaaggtatcatttctttgctgcaataggcttttctttttccttatccaggaagagagtctgtgttatacctaaaaattttcacagtggttttaggaactatgttttgacagattcttaagataaacacaaagggttacttatcatcattatttgaaatctggatcttggacattgtgtctctgggctatactgcaggtgatattaaagcccagataaagagtagatagtgcttgtttgcaacatggaaggggcaaaaattccttcctaggtccctccatgactgtatggatttggggagtaaatggcttactttcctctgaatgcccctgttaacaagtgagcacaggtttcttttatgttggtaagaaaagcatggctagcaatgtaactctgtttccatcttggctgtctctctcaaggatgaggaagactcctttgtgatgaaagccatcatccatgccatcaacgatgacaatgtcccaggcctgcagcaccttctgggctcattatccaactatgatgttaaccaacccaacaaggtctggttctgttctgccgcatactggaggggtgggtcacagcgaccttgcccttccatatccaaggaaagaccccatctgcttctccattctcccttccaattggaagctccatactgtggggaaaatcacttctgtttagaaagtgatttgagttacaaataaggtctttgtgcattgagggccttccttcattcacgtattgtatctctacccatgaaattttagatcttctcatcctgctaatgaaaatgtccctgatgatgagaatccaaaaggggaaggaaaggttttatacccttccacctgtcttctcttcctgccacgcagtggtagctctatgtctgttgagacaggggaaggtgtgtggtaacagcaatcatcgtttgggcttttcctttcctaccaaacctgaaaattagtaatttttttcttgcctattctagcacgggacacctccattactcattgctgctggctgtgggaatattcaaatactacagttgctcattaaaagaggctcgagaatcgatgtccaggataaggtcataattgttttattgaaatgaattgaattttaaagtattttcaagtgtctcttaatcataggggtaacagaggaaaaaaatttatgtcctaacttgtttctcagtttcctgtaaaggaagatgagctgcttttaaacagcttggtacagcctgacacatgggttaaagaggcaaacatttatcatttatcctccccttggcgctgctgcttgacatcagcatttctttgtacactacccagattttacttcttaccgatcacatttactcaacaatgttagatgtcacacatgaaaaagttttgttatctaattattctcatcagaaatttgtttgcctgcttctgcagacgtcagcagagctgtaagtggagtagatctggccctctgcagtaagggaatcctaaccagagaggggagatgagggtttacaaacataaaataattgtttataagcaattgtttattttgaaatcatttttgatttacaaaaaaaagttggaaaagtggtacagagagttccatcattcgcttcacccaggtgcccctaatgctagcatcttgtgtaaccacggtacatttgtcaaaggtgtaaaatagaatgagggttttattcctctgggaagttgctcctctggggtttgtcatcacacaggaagggaaataacagtgagtctgaggaatgcatgcatctggtgctgtcagctccctagaaatgtgaccccaggttgattttcctgcagggcgggtccaatgccgtctactgggctgctcggcatggccacgtcgataccttgaaatttctcagtgagaacaaatgccctttggatgtgaaagacaaggtaaggccacttctcttaggaggaacatgaggtggtagtaaatggatgcatgtgagtgtgagtgctggcctaccgtgtgcatcgggacccaaaggaaaggaatcaggaccagaattcacctgcagaacatttaagttggaaatgtcttgttgcctgtggtttggtctaatactgaaatcagccttaagtcaaaatctttcaggtagttgccataatacgcacgcattgaattataatccccataacataaaaacctcaaagttctagtacagacaaccagagagagacctcggtctcgattcgattttcttcctgactcaaccttgtgcttttaagcggatctctcctattctcttcttctttgaagtggctgacagtgctgacctgacaatcacagacactagaagatattaatgagacaatgcacataaagtaataaagtaaggcttttttttggcacaacggtgttataaaagttactgatttatcaagataccttgttttcatatgtgtgtgtttcattcagttcacacaacaatcctgtgaattaattggctgtgctggaacctgaacctggaattcctacctactcatccattatttattctactgtacaatacttctctgcttccagtactggcagactaatttgacgtttagtcaagctgccacatgcagttgcatgggttgtgcactgcaccatatctgaggggtaacattcatatcagagacacgcatttattatggcagttttctggaaggtggcaacactatatcttgttttgtcttcttaaaatttgtttattctgatgattttctgtggggtggatagaagtaaagtatcttaaaggatttgcacttgttactaattcacagaaagttattgcatgggcaaatagtgacattctttaaaatttctgagaaaatctctgagaatataagaaaataagtttctaatcataggcaatgaaatgagaagcttattaataaataaaattgttcatttaagtaactgctgaatgatgaacccaatagtaaaaagagagtgttgtgtttaaagagaaaatcacacagctagaagtatcagcacataaagaagactgagaacagctatcatggaaaagggagagccttctcctgagttgtttgcacttcacaggatgagccaagtatgtgggcttaatactcactgtgtggtggacaccccaacctcaggtccccatcctagccactataggggcatctgcccaaggtgggtgggtggaaccaaaggg

SEQ ID NO: 1344 - DNA, 6000 bp, Homo sapiens
accacacacacagccaccacactacatacacacaccacaccacacacacactacatatatactgcatacatacaccgcacatcacaccacggaacaccccatactacacacataccccaccatgtatacacacaccatacacgtacctccccaccccacacacccagtccatacacaccacacacactacacaaacccaccacgtggtacatacacataccatgccacacacacacacaaaacacacacaacacacactgtacacatacacaccacacacaccacacatcaaaccccacacataacaccacacagtcatatgctgcacgtgccgcagcacacacagcacacacataccccgtatgcatcggagtcttgagagctttgcacacttttcctagactggtcatgcgtgccttgttcccagagcaggtgggtgttttgcagcttgttctgctcctaaagggcatgcaggcagtgaagctggccggcccctcgcttgcctctcccagatgcagcccagctgcaggtgggcctgcagggcggggtggccgcggcgtcctctttaaggctccagttcctgggggagcccggaagcccttctgtgcctgccagcttgtgcgcagcctcagtggggcccgccctcttccttagtggggttgtccctcagtggttgttgggggactgtaggattattaaatgagatgactcctgtaatatcccttcttgcccacgtttgaactgagatgcatgtggaattcagtgttatgtttgaaaccaagcctcaggaaggtttcagtgcatggaccatattgctaaaacattttttattacaatacaaaagcttcttgaccatcaggcagcctggctgtgtgggtgtctcatgcctggctggcttcagacgctgacagtgacccacatgcattttatattgtgaggcagcacacgcacacacacacagcacacagatgcacacatgccagtaagttttgctcataacagccgcccttaactatctgtgacaccccctgatatttttatttgattatatttgttgaaaaactgtgtttgcaacccccagattgagaactactgacccccatgtgacatctggccctatgtgtaactgcatggaaatgtaaaaattttagcgtgacgtcaatgtgtgtacactatgtattattatcttatttctcacgttggctgactttgaccatgtactcctctaccgcttgattttcctctcagtgaggctaatccccacatttctggggctggacatgccttagagccttcagcacagtgcctaccccaggggctggtgttggaccgcaagcctgagaacaacagggcaggaaaactgggtcaaagcagagctcttgagcaggtggaattggatatctagcttgtctttgaatgctgagggcagtggcttgggtttcaaatgtggaatcctgggaagccgcctggctcccttggtcttgcctgtaagcagcggctgcgtcctggatgttctgtggggctgaggtctctctgtgcagggatctgccatcctcatgttccagttccttccacaagagcacggttggagcagggcttggtttttgccagcttggcgaaaccagagaggtggtgagaaggcgatttttaaaatagacaccagtcgctgcaggacctggaatcaagccttcggggagatacagactccatttatttacaagtaaccgctctgtgactccagccagtgggcacaggttttatttcaactggaagagagtgtcatttaataattagcacatttagggctgcagaagggatagatggcttagcacagatgtctcgcggtggaaatgaaggagccctgagaatgcagacatgctctctcccctttctcttttctcagcgaggagaccatgctcaggccacagtggcattctctaaataagtgatggtgtcatctggagacttccactgagacattttgtgtcaggactactctgaagccttttcaagcacttacattgtagttgctacagacggaaaaacactttgccaagcacagccttattcatgaattgtgtcaggccgggagtccgttcctgctggtgtcaccctccccaaactgctgggctgggggccctctccttgctgctggaggaggcagagtgtgcctcctgctgcacaggagacatttgctacagtgcagttatcctgagctttgcggggccttctgctgctggggctgagaatggctgggaggcttccctgaggatcagagctgttgctgatgcctgtgtaaaccgtaacgagtgtggcccgtgctgttctttgcgttgtgactcttccaagtgcctgtctgatcagagctgacatgaagagcagattccatggtctgagactctggcctcgtggtcgtcagagtgatccaggtgtggcctgcttggtggccttgctggtgcacattctctgtggacgtgtcccaggagggcagtaggatacagccagccagtggatggtggacattgcaagtgctctgaccgctgtgagctggttggtcctcaactggctttgctgccttcttcttagagcagctgggtcggctccatggcccactactttgcagtggatcccctcacccgtctgggcggtgacccctctccctgcctcctttcccctcttggagtcaagggaaggtcatcgacaggaagcagcagcagcgaaaccctctcaccaggtttgctgttttcatctttccatctcctccttccttctgcagtgagatatttgcagaatttactgtgaagcacacctagcctcagtgtgcggcccttgaatcttcacaaatggagccagccctgcgatgcctgggaagaggagcagagcacagggccctggggccccctgctcaccactccccagctgatcacagcgcaggttaatcttggctggcttgagtctgtgtgccttgggttctgcagcacatcctcgtgcgtgtcactcagcatccgtctgtgacatttggcttgagctcacccagggtcttcttctcttgccttgccaccacgtattccggtgtgtgtgtctgccacaatttaggcacatttatatccgccacgggtgtctgctgccctctcggcttccagtttgaggctgttaggaatgatattttgaacatccttgcacacaggctgtgttttagccttttattgtcctttcaggacaccaagggccctccagttcttatggctccacttcctggggcaggtcttgtctccgtggtggcacctgtggtttaattttgtctcagacctcccacgtggcaccctgtttccagtcctgctgtgaaccctctcctctgagaaggggcccctgaaccagctcctgttgcttgctgatgggccccgcctccctcgctggaccctcgggggtctctccagctgtcccctctgtgcatcccaccccaccgccacctgctcaccaaggccaggtgggcacgtccctgtcattcctaacatggtgtttttcagcttcacagtttctgtctctggctgcacagggtccactcaatctgctgccatctacccctcggagagcatgcagtgcctgcctagtgtgtcccaggttctgggatggcagtgagaggttgggggttggaggagaatggacaagacgtgttacttttagcgggagaaggatgtgtgtatgtactgatagtgagaggtgacagcgtgctagcagtcctcagagccctcgcttgctctcggcacctcccctgcctgggctcccactttggcggcatttgaggagcacttcagtcccccactgcactgtgggagcccctttctgggctggccaaggccggagcccactcccccagtttgtagggaggtgtggagggagaggcaggagcgggaacaggggctgtgtgcggcacttgcgggccagctggagttccgggtgggcgtgggcttggtgggccccgcactcggagcagccagccagcccttctggccccgggcaatgggggacttagcacccgggccagtggctgcggagggtgtactgagtcccccagcagtgctggcccaccggcgctgtgctcgatttctcaccgggccttgactgccttcccacggggcagggctcgggacctgcagcccgccatgcctgagcctcccacccactccatgggctcctgtgcggcccgagcctccccgacgagagccaccccctgctccacggcgcccagtcccatcgaccacccaagggctgaggaatgcgagcgcacggcacaggactggcaggcagctccacctgcagccccggtgcgggatccactaggtgaaaccagctgggctcctgagtctggtggggacgtggagagtctttatatctagctcagggattgtaaatacaccaatcagcaccctgtgtttagctcaaggtttgtgagtgcaccaatcgacactctgtatctagctgctctggtgaggacgtggagaacctttatatctagctcagggattgtaaatacaccaatcagcaccctgtgtttagctcaaggtttgtgagtgcaccaatcgacactctgtatctagctgctctggtggggccttggagaacctgtgtgtggaaactctgtatctaactaatctgatggggacgtggagaacctttctatctagctcagggattgtaaacgcaccaatcagcgccctgacaaaacaggccactcggctctaccaatcagcaggatgtgggtggggccagataagagaataaaagcaggctgcccgagccagcattggcaacccgctcgggtccccttccacactgtggaagctttgttctttcgctcttgctactgctagctctttgggtccacgctgcttttatgagctgtaacactcaccgcgaagatctgcagcttcactcctgagcccagcgagaccacgagcccaccgggaggaacgaacaactccagacgcgctgccttaagagctgtaacactcaccgtgaaggtctgcagcttcactcccgagccagcgagaccacgaacccaccagaaggaagaaactctgaacacatctgaacatcagaagggacagactccagacgcgccaccgtaagagctgtaacactcaccgcgagggtccacggcttcattcttgaagtcagtgagaccaagaacccaccaattccggacacaataggggatacaggggctttgaggggatcttgagggtgaggctgcccaacgaggacggggctgaggtgttgaagtaacaaacactgagttagaactcagagcaaatcggaaacagctggtggctgagctgggcgaaaagctgtagtttttaaaacatggtggccaatctcgccattgctgccactgagatgcagggtgtctgtccccttgctgtggatctgggttacttcctgactgccttgattggtggaatgtggtgggtgtgaggctgagtgacccccaatgtggcttccccattgttcaccaggatgctggctctgggagccctgtgatgccaaggaaggagttggccctttggcagccatgctgtgaggaaacccaagctccacaggcagccatgggagctccagtgggcagccctggtattcagtcccctccactcagggccctgataagtgaggggacaggccttccaaggactgtagctgtagcccttggtaattaggtgtgtcagctttggtgtccttggacattggagcagagatgagctgactgaagctggggcccgctgaggctcctcacccacagaattgggagtgtagtaacatgttgcaggctgctgagttcagggtaacatgcaacacagcagcagtgacaggaacaaaagcggtggctgcccaaggagggggaaggaagggccttggggtggggtggggtggggtggaggatgagggggccataggactcaggttttgggtgggagagtggagtgtgaacaagaggcagacccc

SEQ ID NO: 1345 - DNA, 6000 bp, Homo sapiens
cattcaatacgtgttttctggggaagcagtgaaacttcatcaagtggacaagtgcaagagttgggagggccctgaaaggtaagcagttccttcaggtcaggaacctaagacaaaggagcatcacccaccagggaccaaacgtgccagcactgtgacctgcccagatggctcagctccttgtgggccctcagaaggagggggctatacaggataagtgtgatccagatgggggaaaagaatgtgcatccacccactgggtggttctgtgcaggcgcaaaggcaggcggctcctggcagcacaacaatgaacatgtgccaagaccctcagccctcaaagatggcccagggctcagagccccgccacagccctgctgcagcactgggctgtgccctcacagcacatgggacacaccggtcaggaacaacaacaaacaaaagctcctaaactcacagtgagaaccaagtgggtcaattgcaggcctaacgggaaactttctgtccttccaaacaaagtcaaaacacacacacaaatcagaaggcctaacaaacacccacattctacatcaaggcaaattacgttctggctgctcaagcaactctaatttcttgcaacagatcaggaaaatacaaaaactgttacaattctaagcaatttctactttttactttgtagacttctatgcagcacgcatcacttatgtttttgctatagctttaggttacttaacatatcctttactaaatggaagaagaaaacaaagacaccacaggaaatgctggaacaagccccaggtccaggtcagccaaccagcaatggggacccctctggcgcaggctccagaccagacttggcctttgtttctgtactgagtgtaaggataacccttctgtggctggattgtactattatttaattgtcagggtctttgtcttgtctcccctaatgctgatagtagcatattgatttctatccttcatagcccacaaagcacatattcagaggatcaataactattgattcattgattgcctcatggaagccaattcatctgttattaagacgtgtagaaacatgaacttccacaaatcaaattctatttaaaacgccagaggaaagtatatgacctaatgaagaccactttttgaaaattcattttgatattccaaaaataattccttgtaacagaaacaaaccatacataagtacaaaaagaagacaaagtataggttccctcttcctcttccctctcctcccccaacacacactcactcacattcacacacgccccaccctttgctaactgtggagtgctgctttcactcagggctgagtccctagagcctggggcagcgcctggcaccaggtccacataggcggctccataatgatctgctgaataccaggtgtgtgtccttccagatgggcttccgtgctgagcgcctgcacttgtgcatggagagggcacattctctatagtctacactaaggagtgacatttctacttaatagattggcatatcttttaaagtaaacctttgaatgatgccatcatgaagtaaagaatccaatggcatgttttacagggaggaattggagatctccgattattattaacttttcatgatggagaattttcaaagtgcatgcaagtaggcagaacagaacaaagaacccaggtactctcatccagaccccaaactgtccactcagaccatctcgccccttctcatcccctctgcttccccaccccacactaatctgaggcagatcccaaacatcatttcatctaccaacactcagtatctattgctaaagggtgaaagttattctaacataaccacgatgctgtgattaaggaattccttaaaatcatcattcactccacaaatgtccatgagacacatcaatagcctagttttcaaaggagtgatgcttggatcaaatgctgatccaagtgacagcctggatcaggctttgatcgaagccagaaatcttggggtgccacttagatgtgatccagggcagggatgcagtcattgctttcatgggcagcatctgaaacttctggaccaaataacaggaccctgcctgccccccactgaggtttgcacaggtgctgtgggaaggcggctgctgatgccccaggggaagcagcaaggcagtagaaagctggggcccctgctgtgacacccccagctaaaggcaaattcgctcagggagggtcacagaagctgaaaagtgacccacaagcagcaaagcaatttgcttatcccaaggatcgccttaactagtgcacctaaaacaccacccagcttccagggaaggccctggcacaccctctccacctgactgaatcagcagctatctcctccagcagccctggaccctggacggcaatggtgatggggatggggatgcaatgggcagggctgaggaactgcacctgccaagcccagggcggaccctggcccagggaagagaggacccaccccagctgcctctgccacctcccttctcaccttctagtcttcttcctggaattgtccaagttcaaagaagaaataactgccctggttgggaacagcaggcagcagcctttctctcagcaactaggctcgacaatcagccgacggcacgtttatttctatattttcacgtggcaagtttcatccccatgggtcctagctccaaccctggagctctggctccaggggtcaggaggagaatctgcaaccaccctcctggacccgcccatccctccctccccaacagaaatggaaccaagagaggcagaagcctgaacagcctcaatgcagaagcacagaagatagagaaaaccattgatctttgcaatgcattattgattttgctgttgtgctgtcagcagcggacgttccctccctcctcagtcaaagctggccattagcgtgcactcccaagctttggcctagacacacccgcttggtgtggggaaagcggctctaggtaacatctgcctccagcggtccacatggagaggactgtccacaagtggatgatgtcaccaaggacatctccctggccccagacccactggatatcaaatgcaacatggtcgctggtcttgcactctaaacctcagcccaggaccccaggcactcaggggggtctgtgcaaggctgcattttcaacagactctgggtgtgcttctcaggaggtgggccccctcccatggagtccctcccttgtgctgtgctgcaagaccttgggctggcatggcagctggggctctgcatccccacggtggccttttgcctgtctgcactctgaaatacagccactgagttccaccgtctaccaactcctaagcggcccaccctcctgggaccccagggctgctcctggcaccagtgatgtgtttctatttctttgtttgactcgctgagtgtaccacgtacactcttctcagtctgaaggtctggccttatgggagggcagtctttgctcacagaaacaggccagtgcatccctcatcttcccaccccagcctccctggtgggtatgctgagcccgcctgctttcttcttctggctgacgactaccaagacatgatatacgcagacaccaactgtcaaaatgacaatcagggcattatcatctctaccagaatcctgcccctgcactggccagagctgcctgtttctgggacacagtaaacattcccaaataacctcgcctgggcagccagcaggcaggccccaggcctaggacacatatgaggtgacaggccactggtgtcacgtcacccccaggaaaggaaacttccgttccgtggcgcctggtggatttgaaaagactcagaacagcagggtgagatgcttggccccaggccccacgtccagcttggccttcgggggcctggccacccacgagcctgggatgtgctcaacacagagtgaggttttcaaaacaaaagcaaagcaacttcatgtggaaaaccttccggaaagcaggacccagccctcgacaccaggcctcatttgacgcaaactgcccacttacagactcccattcacccactctcccacctaccccccaaaatactaagccagaaaatagaggacaaccacgagttcaactctcctttacacgtttttactggcataaccccagtagagccagccccttgcagctcactaggcggctgcaacaggtgcagcccaagctaaggcttgtggttctcctgggctgttctagaataatgcaaccaaaacccgaaaggaaaccgaggcctgcagcactcactgccaaggcggcgacctgaccactgcggcccaacctgccccacctgtctgagtgcgcggcgccgggtccagtgcacagggtccgcggcctccgcgaccaaaatagaagcccgcgggggcccggccagagcccggctggccggagtggggcctgacctggcggggccggactgggcgggccggggcgcgacggggcctggccgagcgcaccgccccctccctggcccgggtatgcagcgcgcccccgctcccccgcgcccagaggagccacctgcgcgcagggactggggaggcaaccgggaaggggagaaggccggggagggatagcagagaggtccagggggtcggaggggtccgggtaggtgtctctgggaggcgtcccaggaggggccccggggggatccaggaaggagtccaggggtccggggatcccagaaggaggctcctgcaggggttcggggagggccccgagggtccggtgaggagcctaggggtgtggagtgggggctccgcggagggtccaggccgcccccagcgcacctgcccggccccgcgcgccctccctcccgcgccagcccggccgcttacctgcagcgcgcgtcctgcccgcggcggctcccggccgggcgagttcgggcgccaggaatggcggcggcggcggcggcggcagcggcgggaggcggccgggccggggagggggtggcggggaggcccggcggcggcagcggcggctgggatgctgcggcgcgcgagagcgctgaggccggcgcggggacggagtgcgcggggcgggcgcgcaggcccctcctccgctccccctcccttcccgcctcctcccctttcccttccccttcctctcccccttcttctcttccctcctatggccccgcccctttcttcctccttcctcctccctcctcctcgcccctgctcacctccctcctttccctcccccaacctttcttttcctcccttctctttttcctcctctttcttcaccttcgcaacactcttccacctctctccccttctccccacttttgctccccactccttcctcctcacctcccatctctcttgcctccccgccaggcccagagggttgtccctcagccctgggttggtctctgctgagtcaagcacccgttcccaggaccaagaggtgccctgtcaccctcttcctcaccagctctcaatagacaagcttgccccttctggggtcctggatgaaccccaccctttccaggcctcccccaaatcccccagttttttttcacccccagaccctgggccagctcttctgagaacctgacctgcagtgtgcgtgaggcacgtggcacccagaacacttggctgctgactttgggcaagaatatttcacaccaggctgctcccattccccaggggaggggctggcaccacctggagtcttggtttccctgaacccccgtgctagccttttgccaaacgttcatcattttccactctgtatggcaaatggtcctcctgtgaggctgctggtgagacttgtttgtgactagcccatgggtttggggatctgggggccctcagagatggtgctgctccatccagacctcttccctctgcccccaggagaggtgacagggctcgcacagtgactggccaggctgggaggcctattgaggaacacagtcctgagaaggggacacagtttcttacggaaccagctaagat

SEQ ID NO: 1346 - DNA, 6000 bp, Homo sapiens
atttttttccccactaacctctaactgaaaggaagcatttccttcgggtgtacatgcaggcaacaaacacagccacatcagcagtatgtaaggacttctcagcagaaatcacagcgattctcacatcacatcatgctcgttacagactttaaaatatcggctgacttatcatgacttggaaactacagctatcagatctgccgccagagcatattattaaaaaagaagcaagtagatcacattttaaagtattttggtagctggatttcagtataattcatttccttttgaatcctgtatttgactttatgcatttaaacacattactctgaaaagagttctgtagacctcaccactctgtgaagttcaaaatgtagaccagagaagaaagaaaactatcaacaaacaattataatggaagctggtgcaggcaccaaggaagtgacgtgtaaggtgacattcgagctgaggagcagggtgggggatattagctctgcccagggtgcatgggtttgtgttggaggaaatgatgccagggcagagccttgacacataagtgggtgtctgccagccagccagggatgcgaagaggtccatggtctggcagttggtgacagcagtcaccttaaaggtcagaaaggcattgctggggcaagttcacttgctggggcaagtctaatccagcagacaccagcactgattagatcaatggtcagatggggccacatcagcatcctgtacactccccagtatgacgaaggatggcttggtaaaccattctgcatgttcagtgatgtgggaagtgctgccatgagtgtgtgcaccaaaaatggattacaccccttcaccagatttatctagcacttagtggtttgacagttgaacgctgtgcaggagcacagagcaatgataacatctcagcacggccttcatttctatgcttctgctggtgtgaccccacgtttccaagtgtggctttaacaaaaagagctctgtgggtcctgtgggggtctcagtggcagtaaggacatatgagggtgctagaggtgcctggggatctcagagccttcaaaatccctttcggcttccttcattgacatgttctaacaatcagggtgcctgacagagaccggtgtggactctctattttggagaggctggccaggaaggccacactcttaccagccttttctggggtgcggggaggaacagagctaggagtaggagtcacagcatggtcttggcagccactgcatggtaacagtggaggtgtggctcacccacgtctctgcagagtgtggtcacattcaaaggacatctccccggacttttctagaagctgctggcaggtcccagagccaaccttcccacagtccctcagaggaccccgtttctccacttgctgtgctgactctctctctaagcttagcctggacactctgcatgccactacaggtgagaggcggcaggccgactctttctgaagacacctcctccactgcgtaaggctccacactgggcgatctggaaacggctcccagcccactacgtgcctgttccctcctgcactgcaaagtggaagcagaggatcctctctcctcatatccacctgggccgtgttggaagctgagtattatttgtgctgccatacttgagtttttttctcatatgggacttaactattatcaatccagttactatgctcatatgcatatagatggtgtcaacattctggctgggaaatgcagagaaactttgcaaagcatggtctcagtatccaaacacttggcatttctggggaaactaggaaatagattggttaatatgatctttgatatgcttgaacttaatattggaggggaaagtaagggggtgagaggtaaggcaagattggagttcatttagctacttttatttttattttttgagactgagttttgctctgtcgcccaagctggagtgcagtggtatatgatcttggctcactgcaacctccgcctcccgggttcaagtgattctcctgcctcagcctcctgagtagctgggattacaggtttgtgccaccatgcccacctaatttttgtatttttagtagagacggggtttcaccatgttggcaaggctggtctcgaactcctgacctcaggtgatccgcctgcctcagcctcccaaagtgttgggattacaggcgtgagccactgcacccagcctgctacttttatatctatgtttgaaatgtcccacgacagagtgtgaaacaagaataaaaaggcaagcttggtcactttgggagacataggcaatcatgctgagagaagggaacagggaagaaggtcagagaggagggaagaggaagacctaataatggcatccaagtcccggttctaatggtacttggggcatctttggatgcaagtgagccaatagtatgggctgaagttctatcacttacaactaagagtcctgtctccttcatgaatgcaataaacatgtttgggggcaattttatataagcacggtgcaaagaagcccttgtgttcgcagcctgggcattgcggaaagctttttggagtttttactgaattctctcatgttcttctgtatgcattaggaaacaggctagagaggacagtattctggaaggtcatgatgccagaagtgtgggccccaggacagccatgcaaagtctcttctttgccctgggctgccctctattagattctgagcatgtgggtctaaaagccaggagagaattcagcagttgttgagaagcatacccctctgctgctggtcccctccctgcagtgtgttcccaaggtggccccaggcctgtctagacgctggctgtgaagggcacgctcctgtaggggcagccggctcttccacagtgaggtctgtcagaaagcgcccacgataggcaggaatccactttctcatctaatttccacccatctgtcctcattctgcccttcataacaccacagagtaatccttcttcccgggacagttttgcacatattggggttcttctgtcttgtgctccacacattgattttctaggctgaagactcccggtgggtcaactcccctcccacgggatactgctggctgccttagacaccaagcaagggcatggtattctagatgtgtctgactagtgaggaataaaagagagtccccccaccccaccccaatcagtgcaatgcttgcatgtgtagatcctaagcgtgcatccctccttgggtatagaatgctgttaaaccagttctgtcctaatccgttcccattatgtttcaatccaaatgggatgtggaacatggattcatggacccctacaattggaaaagagcttggaaaagacttctctagtttttcctgtaatagtcaccagcactgaacccgagcacacggtgcagtgggctttacctgccattctctctccgtgctccccaaaccctccaggacgaccacactgtcctcatgttgcagggtacagaggtttgctgaggcctgaggttatttggaaactgcagagctgtgagtcaagggagtctatcagattccaggtctggattcttcagcaagagggtggtggctgccatgccgtagagggaggagggggtgcgtgctccaccccaccctgcttgacaccagctttgccatcttagcctttgctgggccgaagccctattctcagagctccggcactgaaccacagaaaccacaggaggccctagaacggaactctgagactgttgggcctttaactctgtgactgttgggcctgggactggcttcatttgtaaactctggctctcagagccagtgctcagcaggaaaacagcctcagggcccctgcccctcaacagcagtctgtagtccagggaggtatcacctggcctggagaggggctccccaactcctcacatttaggggaaatcttagctggttccgtaagaaactgtgtccccttctcaggactgtgttcctcaataggcctcccagcctggccagtcactgtgcgagccctgtcacctctcctgggggcagagggaagaggtctggatggagcagcaccatctctgagggcccccagatccccaaacccatgggctagtcacaaacaagtctcaccagcagcctcacaggaggaccatttgccatacagagtggaaaatgatgaacgtttggcaaaaggctagcacgggggttcagggaaaccaagactccaggtggtgccagcccctcccctggggaatgggagcagcctggtgtgaaatattcttgcccaaagtcagcagccaagtgttctgggtgccacgtgcctcacgcacactgcaggtcaggttctcagaagagctggcccagggtctgggggtgaaaaaaaactgggggatttgggggaggcctggaaagggtggggttcatccaggaccccagaaggggcaagcttgtctattgagagctggtgaggaagagggtgacagggcacctcttggtcctgggaacgggtgcttgactcagcagagaccaacccagggctgagggacaaccctctgggcctggcggggaggcaagagagatgggaggtgaggaggaaggagtggggagcaaaagtggggagaaggggagagaggtggaagagtgttgcgaaggtgaagaaagaggaggaaaaagagaagggaggaaaagaaaggttgggggagggaaaggagggaggtgagcaggggcgaggaggagggaggaggaaggaggaagaaaggggcggggccataggagggaagagaagaagggggagaggaaggggaagggaaaggggaggaggcgggaagggagggggagcggaggaggggcctgcgcgcccgccccgcgcactccgtccccgcgccggcctcagcgctctcgcgcgccgcagcatcccagccgccgctgccgccgccgggcctccccgccaccccctccccggcccggccgcctcccgccgctgccgccgccgccgccgccgccattcctggcgcccgaactcgcccggccgggagccgccgcgggcaggacgcgcgctgcaggtaagcggccgggctggcgcgggagggagggcgcgcggggccgggcaggtgcgctgggggcggcctggaccctccgcggagcccccactccacacccctaggctcctcaccggaccctcggggccctccccgaacccctgcaggagcctccttctgggatccccggacccctggactccttcctggatccccccggggcccctcctgggacgcctcccagagacacctacccggacccctccgaccccctggacctctctgctatccctccccggccttctccccttcccggttgcctccccagtccctgcgcgcaggtggctcctctgggcgcgggggagcgggggcgcgctgcatacccgggccagggagggggcggtgcgctcggccaggccccgtcgcgccccggcccgcccagtccggccccgccaggtcaggccccactccggccagccgggctctggccgggcccccgcgggcttctattttggtcgcggaggccgcggaccctgtgcactggacccggcgccgcgcactcagacaggtggggcaggttgggccgcagtggtcaggtcgccgccttggcagtgagtgctgcaggcctcggtttcctttcgggttttggttgcattattctagaacagcccaggagaaccacaagccttagcttgggctgcacctgttgcagccgcctagtgagctgcaaggggctggctctactggggttatgccagtaaaaacgtgtaaaggagagttgaactcgtggttgtcctctattttctggcttagtattttggggggtaggtgggagagtgggtgaatgggagtctgtaagtgggcagtttgcgtcaaatgaggcctggtgtcgagggctgggtcctgctttccggaaggttttccacatgaagttgctttgcttttgttttgaaaacct
